United States Patent Application Publication US 2018/0126003 A1 - sequence listing, part 147

SEQ ID NO: 258102 - DNA, 4820 bp, Artificial Sequence
  derived and/or modified sequence
ccgggggtggcgaggggaaggcgacatttgcttggcgctgcctccgtgcagagcggccgggagggctttgcagcggccgccgacgcggcgggaggagggggctgaggcggcttcggagttggccggagaaggtgggcatttctcgcttttcctccccttcctgcgctctccccctccctcctgccccgcaccccacgtgaagcagaatataaaggggggtgtgaggctagaggggaaagtgaatggcgaaggactgaagggatccccccttcgggtccccggccgccctgttcaccctcgttcatcctcctttccgaagctcgctctcgaaggcaggagcgaccggcgcctttggctgaggaggaggagaaggaggaatcgcgccaggcggagcgtcaggtcccgttttcctctccggcgtctccaatacaaagattacggtgcagaaggaaattgcactcgtctcctccgcgcccccggtacccaacacaatgcaccagccgcctgagtccaccgccgcggccgccgccgctgcagacattagcgctaggaagatggcgcacccggcaatgttccctcgaaggggcagcggtagtggcagcgcctctgctctcaatgcagcaggtaccggcgtcggtagtaatgccacatcttccgaggattttccgcctccgtcgctgcttcagccgccgccccctgcagcatcttctacgtcgggaccacagcctccgcctccacaaagcctgaacctcctttcgcaggctcagctgcaggcacagcctcttgcgccaggcggaactcaaatgaaaaagaaaagtggcttccagataactagcgttactcctgctcagatctccgctagtatcagctctaacaacagtatagcagaggacactgagagctatgatgatctggatgaatctcacacggaagatctctcttcttcggagatccttgatgtgtcactttccagggctactgacttaggggagcccgaacgcagctcctcagaagagaccctaaataacttccaggaagccgagacacctggggcagtctctcccaaccagccccaccttcctcagcctcatttgcctcaccttccacaacagaatgttgtgatcaatgggaatgctcatccacaccacctccatcaccaccatcagattcatcatgggcaccacctccaacatggtcaccaccatccatctcatgttgctgtggccagtgcatccattactggtgggccaccctcaagcccagtatctagaaaactctctacaactggaagctctgacagtatcacaccagttgcaccaacttctgctgtatcatccagtggttcacctgcatctgtaatgactaatatgcgtgctccaagtactacaggtggaataggtataaattctgttactggcactagtacagtaaataatgttaacattactgctgtgggtagttttaatcctaatgtgacaagcagcatgcttggtaatgttaatataagtacaagcaatattcctagtgctgctggtgtgagtgttgggcctggagttaccagtggtgttaatgtgaatatcttgagtggcatgggcaatggtactatttcttcctctgctgctgttagcagtgttcctaatgcagctgcagggatgactgggggatcggtttcaagtcagcagcaacaaccaacagttaacacttcgaggttcagagttgtgaagttagattctagttctgagccctttaaaaaaggtagatggacttgcactgagttctatgaaaaagaaaatgctgtacctgctacagaaggtgtgctgataaataaagtggtggagactgtaaagcaaaatccgatagaagtgacttctgaaagggagagcactagtgggagttcagtgagcagtagtgtcagcacactgagtcactatacagagagtgtgggaagtggagagatgggagcccctactgtggtggtgcagcagcagcagcagcaacaacaacaacaacagcaacaaccagctctccaaggtgtgaccctccaacagatggattttggtagcactggtccacagagtattccagcagttagtataccacagagtatttctcagtcacagatctcacaagtacaattacagtctcaagaactgagctatcagcaaaagcaaggtcttcagccagtacctctgcaagccactatgagtgctgcaactggtatccagccatcgcctgtaaatgtggttggtgtaacttcagctttaggtcagcagccttccatttccagtttggctcaaccccagctaccatattctcaggcggctcctccagtgcaaactccccttccaggggcaccaccaccccaacagttacagtatggacaacagcaaccaatggtttctacacagatggccccaggccatgtcaaatcagtgactcaaaatcctgcttcagagtatgtacaacagcagccaattcttcaaacagcaatgtcctccggacagcccagttctgcaggagtaggagcaggaacaacagtgattcctgtggctcagccacagggtatccagctgccagtgcagcccacagcagtcccagcacaacctgcaggggcatctgtccagcctgttggccaggctccggcagcagtgtctgctgtacctactggcagtcagattgcaaatattggtcagcaagcaaacatacctactgcagtgcagcagccctctacccaggttccaccttcagttattcagcagggtgctcctccatcttcgcaagtggttccacctgctcaaactgggattattcatcagggagttcaaactagtgctccaagccttcctcaacaattggttattgcatcccaaagttccttgttaactgtgcctccccagccacaaggagtagaaccagtagctcaaggaattgtttcacagcagttgcctgcagttagttctttgccctctgctagtagtatttctgttacaagtcaggttagttcaactggtccttctggaatgccttctgccccaacaaacttggttccaccacaaaatatagcacaaacccctgctacccaaaatggtaatttggttcaaagtgttagtcaacctcccttgatagcaactaatacaaatttgcctttggcacaacagataccactaagttctacccagttctccgcacaatcattagctcaggcaattggaagccaaattgaagatgccaggcgtgcagcggagccctccttagttggcttacctcagactatcagtggtgacagtgggggaatgtcagcagtttcagatgggagtagcagcagcctagcagcctctgcttctcttttcccgttgaaggtgctaccgctgacgacacccctggtggatggcgaggatgagagctcctctggtgcaagtgtggtagctattgacaacaaaatcgagcaagctatggatctagtgaaaagccatttgatgtatgcggtcagagaagaagtggaggtcctcaaagagcaaatcaaagaactaatagagaaaaattcccagctggagcaggagaacaatctgctgaagacactggccagtcctgagcagcttgcccagtttcaggcccagctgcagactggctccccccctgccaccacccagccacagggcaccacacagccccccgcccagccagcatcgcagggctcaggaccaaccgcatagctgcctatgcccccgcagaactggctgctgcgtgtgaactgaacagacggagaagatgtgctagggagaatctgcctccacagtcacccatttcattgctcgctgcgaaagagacgtgagactgacatatgccattatctcttttccagtattaaacactcatatgcttatggcttggagaaatttcttagttgggtgaattaaaggttaatccgagaattagcatggatataccgggacctcatgcagcttggcagatatctgagaaatggtttaattcatgctcaggagctgtgtgcctttccatcccttccggctccctacccctcacttccaagggttctctctcctgcttgcgcttagtgtcctacatggggttgtgaagcgatggagctcctcactggactcgcctctctcctctcctccccccaggaggaacttgaaaggagggtaaaaagactaaaatgagggggaacagagttcactgtacaaatttgacaactgtcaccaaaattcataaaaaacaatagtactgtgcctctttcttctcaaacaatggatgacacaaaactatgagagtgacaaaatggtgacaggtagctgggacctaggctatcttaccatgaaggttgttttgcttattgtatatttgtgtatgtagtgtaactattttgtacaatagaggactgtaactactatttaggttgtacagattgaaatttagttgtttcattggctgtctgaggaggtgtggacttttatatatagatctacataaaaactgctacatgacaaaaaccacacctaaagaaattttaagaatttggcacagttactcactttgtgtaatctgaaatctagctgctgaatacgctgaagtaaatccttgttcactgaagtctttcaattgagctggttgaatactttgaaaaatgctcagttctaactaatgaaatggatttcccagtaggggtttctgcatatcacctgtatagtagttatatgcatatgtttctgtgcatgttctctacacaattgtaaggtgtcactgtatttaactgttgcacttgtcaactttcaataaagcatataaatgttgataaacaa

SEQ ID NO: 258103 - DNA, 686 bp, Artificial Sequence
  derived and/or modified sequence
gcgcggcgcacgtcggcgcgcacggcgggacgggcgccggagtggtcgggcctggcggctggacgggcgcccctcgctgccccgcgcgctccccgccgccccccatgagcgcagccccgcgcggcccgggtccgtaggcggcggggcgccccccatgctgctgcagcccgcgccgtgcgccccgagcgcgggcttcccgcggcccctggccgcccccggcgccatgcacggctcgcagaaggacaccacgttcaccaagatcttcgtgggcggcctgccgtaccacactaccgacgcctcgctcaggaagtacttcgagggcttcggcgacatcgaggaggccgtggtcatcaccgaccgccagacgggcaagtcccgcggctacggcttcgtgaccatggccgaccgggcggcagctgagagggcttgcaaagacccgaaccccatcatcgacggccgcaaggccaacgtgaacctggcatatctgggcgccaagccgcggagcctccagacgggctgaccccgcactacatctacccaccagccatcgtgcagcccagcgtggtgatcccagccgcccctgtcccgtcgctgtcctcgccctacattgagtacacgccggccagcccggcctacgcccagtacccaccggccacctatgaccagtacccatacgccgcctcgcc

SEQ ID NO: 258104 - DNA, 366 bp, Artificial Sequence
  derived and/or modified sequence
atgctgctacagcctgccccttgcgctcccagtgccggttttcctcgcccactcgcagcccctggcgccatgcacggctcccagaaggacacaacttttacaaagattttcgtgggcggactgccataccacaccaccgatgccagcctaaggaaatacttcgaaggcttcggtgacatcgaagaggcggtggtgattaccgataggcagacagggaagtcacgcggctatggcttcgtgaccatggcagatcgggcagcagctgagcgagcatgcaaggaccctaacccaatcatagacggaagaaaagcaaatgtcaatttagcctatctgggagctaagccccggtctctgcagacgggatag

SEQ ID NO: 258105 - DNA, 366 bp, Artificial Sequence
  derived and/or modified sequence
atgctgctgcagcctgccccctgtgcccccagcgctggcttcccccggcccctggccgcccctggggccatgcacggcagccagaaggacaccaccttcaccaagatctttgtgggcggcctgccctaccacaccacagatgccagcctgaggaagtactttgagggctttggagacatcgaggaggccgtggtgatcacagaccggcagacaggcaagagccggggctacggctttgtgaccatggctgacagagctgctgctgagcgggcctgcaaggaccccaaccccatcattgatggcaggaaggccaacgtgaacctggcctacctgggcgccaagcccaggagcctgcagacaggatag

SEQ ID NO: 258106 - DNA, 366 bp, Artificial Sequence
  derived and/or modified sequence
atgctgctgcagcccgccccctgcgcccccagcgccggcttcccccgaccactggcagctcctggggcaatgcacggcagccagaaagacaccaccttcactaaaatatttgtcggcgggttgccctaccacacgacagatgctagtctgcgcaagtacttcgagggctttggggacattgaagaagcggtggtgataacggatcgtcagactggaaaaagtagaggctatgggtttgtcaccatggcggaccgcgccgccgcagagagagcgtgcaaggatccaaacccaatcatcgacgggcggaaagcgaacgtgaacttagcctacctgggagctaaaccccgttcactgcagacgggatag

SEQ ID NO: 258107 - DNA, 366 bp, Artificial Sequence
  derived and/or modified sequence
atgctcctgcagccagcaccctgcgccccatctgcagggttcccgagacccctggcggctcccggagctatgcatggaagtcagaaagacactaccttcaccaagatctttgtgggtgggcttccttaccatactaccgacgcatctttgcgaaagtatttcgagggttttggcgatattgaggaagctgtagtgattaccgaccgacagactggaaaatcacgtggatacggatttgttacaatggccgacagagctgccgctgagcgcgcttgtaaagatcctaaccctatcatcgacggccgaaaggcaaacgttaacctggcttatctcggcgctaaaccaaggagtctgcaaacaggctag

SEQ ID NO: 258108 - DNA, 366 bp, Artificial Sequence
  derived and/or modified sequence
atgctgctgcagcccgccccctgcgcccccagcgccggcttccccagacccctggccgcccccggcgccatgcacggcagccagaaggacaccaccttcaccaagatcttcgtgggcggcctgccctaccacaccaccgacgccagcctgagaaagtacttcgagggcttcggcgacatcgaggaggccgtggtgatcaccgacagacagaccggcaagagcagaggctacggcttcgtgaccatggccgacagagccgccgccgagagagcctgcaaggaccccaaccccatcatcgacggcagaaaggccaacgtgaacctggcctacctgggcgccaagcccagaagcctgcagaccggctag

SEQ ID NO: 258109 - DNA, 1095 bp, Artificial Sequence
  derived and/or modified sequence
atgccctaccagtaccccgccctgacccccgagcagaagaaggagctgagcgacatcgcccacagaatcgtggcccccggcaagggcatcctggccgccgacgagagcaccggcagcatcgccaagagactgcagagcatcggcaccgagaacaccgaggagaacagaagattctacagacagctgctgctgaccgccgacgacagagtgaacccctgcatcggcggcgtgatcctgttccacgagaccctgtaccagaaggccgacgacggcagacccttcccccaggtgatcaagagcaagggcggcgtggtgggcatcaaggtggacaagggcgtggtgcccctggccggcaccaacggcgagaccaccacccagggcctggacggcctgagcgagagatgcgcccagtacaagaaggacggcgccgacttcgccaagtggagatgcgtgctgaagatcggcgagcacacccccagcgccctggccatcatggagaacgccaacgtgctggccagatacgccagcatctgccagcagaacggcatcgtgcccatcgtggagcccgagatcctgcccgacggcgaccacgacctgaagagatgccagtacgtgaccgagaaggtgctggccgccgtgtacaaggccctgagcgaccaccacatctacctggagggcaccctgctgaagcccaacatggtgacccccggccacgcctgcacccagaagttcagccacgaggagatcgccatggccaccgtgaccgccctgagaagaaccgtgccccccgccgtgaccggcatcaccttcctgagcggcggccagagcgaggaggaggccagcatcaacctgaacgccatcaacaagtgccccctgctgaagccctgggccctgaccttcagctacggcagagccctgcaggccagcgccctgaaggcctggggcggcaagaaggagaacctgaaggccgcccaggaggagtacgtgaagagagccctggccaacagcctggcctgccagggcaagtacacccccagcggccaggccggcgccgccgccagcgagagcctgttcgtgagcaaccacgcctactag

SEQ ID NO: 258110 - DNA, 1095 bp, Artificial Sequence
  derived and/or modified sequence
atgccatatcagtatcccgccctgacacccgaacagaagaaagagctttctgatattgcccatagaatcgtggcaccaggcaagggtattcttgccgccgatgagagtaccggaagcatcgccaagaggctacagtccattggcaccgagaataccgaagaaaataggcgtttttatcggcaattgttgctcacagccgacgatagggtaaacccatgtatcggaggggtgatattgtttcatgagaccttgtatcagaaagccgatgatggaaggccctttcctcaggtgatcaagagcaagggcggcgtggtcggcataaaggtggataagggggtcgttcccttggcagggacaaatggtgagacaaccacgcaagggctggacggcctgtcagaacgctgtgctcagtacaaaaaagatggggcagattttgctaagtggaggtgcgtgttaaagattggtgagcacactccctcggcacttgctattatggagaacgccaacgtcctcgcccgctacgcatcgatctgtcagcagaacggaatcgtaccgattgtcgaaccagagatcctgcctgacggtgaccacgacttgaagagatgtcagtatgtgacggagaaggtgctggcggctgtatataaagcgctcagtgaccaccatatatacctggaggggaccttgttaaaaccaaacatggttactccagggcatgcctgcacgcagaaattctcgcacgaagaaatcgcaatggctacagtaactgccttaagaagaactgtgccacccgccgtgactggtatcactttcctgagcggaggacagtccgaggaagaggcctccatcaacctgaacgctataaacaagtgccccctgttgaaaccttgggctctgaccttttcctatgggagggctctgcaagcttcggcgctcaaagcttggggtgggaaaaaagaaaatcttaaggcagctcaggaagaatatgttaaacgggcccttgctaacagccttgcctgtcagggtaagtacactccatcggggcaggccggcgctgccgcatcagaatcgctgtttgtctctaatcacgcatactag

SEQ ID NO: 258111 - DNA, 1095 bp, Artificial Sequence
  derived and/or modified sequence
atgccataccagtacccagctctcacccccgagcaaaagaaagaactgagcgacatcgcacacaggattgttgcccccggcaagggcattctcgccgccgatgaatctaccggctctattgcgaagcgcctccagtcgatcggaactgagaacacagaggagaaccgcaggttctacaggcagctcttgctgaccgcagacgatcgtgtgaatccttgtattgggggagtgatcctgttccacgagacactttaccaaaaggcggatgatgggaggccattcccgcaggttattaagtcgaagggcggagtggtgggaatcaaagtggacaaaggagttgtgccactggcggggactaatggggagacgacaacccagggcctggatggcctgtcggagcgctgtgcacagtacaaaaaagatggcgctgacttcgctaagtggagatgcgtgctcaagatcggggagcacacaccaagcgccctcgccatcatggagaacgcgaacgttctcgctagatacgcctcaatctgccagcagaacggaattgttccaattgttgagcctgagattctgcccgatggagatcatgacctgaagcggtgccagtacgtgacagaaaaagtgctcgccgctgtgtataaagccctgtctgaccatcatatctacctggagggaactctcctaaagcccaacatggttacacctgggcatgcgtgcacacagaaattctctcacgaagagattgccatggcgacagtgacggcgcttcgcaggacagtgccgccagcggtcacgggaatcaccttcctgagcgggggacagagtgaagaggaggcctctataaatctgaacgccattaataagtgtcctcttttaaaaccctgggcactaacattctcctatgggcgcgctttgcaggcaagtgccctgaaggcctggggagggaagaaggaaaacctaaaggccgcgcaggaggagtatgtgaaacgggcgttggcaaatagcctggcctgccaaggcaagtacacccccagcggccaggccggtgctgcagcatcggagtcattgtttgtgtccaatcacgcctactag

SEQ ID NO: 258112 - DNA, 1095 bp, Artificial Sequence
  derived and/or modified sequence
atgccctatcaatatccagccctgactccagaacagaagaaggaactatccgacattgcccatcgtatcgtcgccccaggaaagggcattctggctgccgatgaaagtaccggcagtatagccaaacgactgcaatccatcggtaccgaaaacaccgaggagaaccgccgattttatcggcagctcctgctcaccgctgacgaccgagtgaacccttgcattgggggggttattctgtttcacgagacactgtaccagaaagcagatgacggtcggccgttcccccaagtgatcaagtcgaaggggggagtcgtgggcattaaggtcgacaaaggggtggtgccactcgcaggcacaaacggtgagacaaccacacaaggcctcgatggtttatcagagagatgtgcacagtataagaaagatggggcggacttcgccaagtggcgttgtgtgctgaaaataggtgaacatacaccctccgccttggccatcatggagaatgccaatgtgttagcaagatatgcctcaatctgccagcagaatggaatcgtgcctatcgttgagcctgagattttgcccgacggagatcacgacctcaagagatgccagtatgttaccgagaaggtcctggccgctgtatataaggccctttccgatcatcacatctatcttgaaggtacacttctcaaacccaacatggtgacacctgggcacgcgtgcacacagaagttctctcatgaggagatcgcaatggcaacggtgaccgccttaagacggacagttccccctgctgtcacaggcatcacgtttctgagtggagggcagagtgaagaagaagccagcattaatttgaacgcaatcaataagtgtcccttgttaaagccgtgggcactgaccttcagctatggccgggccctccaggcaagcgcactaaaagcttgggggggcaaaaaggaaaatctgaaagctgcccaggaagaatacgtaaagcgggccctcgccaatagtctggcttgtcagggaaaatacactccttctggtcaggcgggagctgctgcgtcggaaagccttttcgtgtccaatcatgcttactag

SEQ ID NO: 258113 - DNA, 1095 bp, Artificial Sequence
  derived and/or modified sequence
atgccatatcagtaccctgctcttacccccgagcagaaaaaagagctaagcgacattgcgcatcggatcgttgctcccggaaaaggaatcctggccgcagatgagagtacgggttccatcgccaaaagattgcagagtataggaaccgagaacaccgaagagaatcgtcggttttatcgacagctgttattaaccgccgacgacagggtgaatccctgtatcggaggagtgattctgtttcatgagacgttatatcagaaggcagatgacggaaggccattcccgcaggtcataaaaagcaaaggcggtgtggtggggattaaagtggacaagggcgtagttccactggcgggaacaaacggagaaaccactacccagggtttggatggcctttcagaaagatgtgctcaatataagaaggacggagccgattttgccaagtggagatgcgtgctaaaaattggcgaacacacaccaagcgcactggctataatggaaaacgccaacgtgctagctcgttacgcttccatctgccaacagaacggaattgtgccgatcgtggagccagaaatcttacccgatggggaccatgatctaaaacggtgccaatatgtgaccgagaaggtgcttgccgcggtgtataaagccctgtctgaccaccatatctacctcgagggtacactgctgaagcccaatatggttactcccggtcacgcatgcacccagaagttttcacacgaggagattgcaatggcgaccgtgaccgctctgcggcgcaccgtccctccagccgtgacaggtattaccttcctttctggaggacagagtgaggaagaggctagtattaaccttaacgccattaataagtgccccttgctaaagccgtgggctctcaccttctcatatgggagagccctccaagctagtgcactgaaagcttggggcgggaagaaagaaaatctgaaggctgcccaggaagaatatgtcaagcgcgccctggccaactcactggcttgccagggcaaatatacacctagcggccaagcaggcgctgcggcaagtgaaagtctctttgtttctaaccacgcctactag

SEQ ID NO: 258114 - DNA, 1095 bp, Artificial Sequence
  derived and/or modified sequence
atgccctatcagtacccggcactcacccctgaacagaagaaggaattgtctgatatagcccaccggattgtggctccaggtaagggcattctggcagctgatgagtcaaccggatctatcgccaagaggctacagtcaatcgggacagagaacactgaagaaaataggagattctatcggcagttgcttctcaccgctgacgatcgggtcaacccgtgcattgggggagtcattttattccacgagactttataccagaaggctgatgatgggagacctttccctcaggtcattaagagcaaagggggagtcgttggcattaaggttgacaagggtgtggtgcccttagcaggtaccaatggggaaaccaccacccagggcctggacggccttagtgagagatgcgcccaatacaaaaaggatggagccgacttcgccaagtggagatgcgtcctgaagatcggcgagcacacaccctccgcgctcgcgattatggagaatgccaacgtgctggctcgctacgctagtatttgtcagcaaaacggtattgtcccgattgtggaacccgagattctccccgatggagaccatgatctgaaaagatgccagtacgtcacagagaaggtattagccgcggtgtataaggccctgtcagaccaccatatctatctagagggtaccctgcttaagccaaacatggtgaccccaggtcatgcctgtacccaaaaattctcacacgaggagatcgcgatggccacagtcaccgccttgcgtcgcactgttcctcctgccgtgacagggattacttttctctccggcgggcagtctgaagaggaagcatccattaatcttaacgccattaacaaatgtcccctccttaagccatgggccctaactttctcctatggcagggctctgcaggcttccgctctcaaagcctggggcggaaagaaagagaacttgaaagctgctcaagaggagtacgtgaaacgggcactcgcgaatagtctggcatgccaaggcaaatataccccttctggtcaagccggagcagccgccagcgagagtttattcgtgagcaaccacgcctactag

SEQ ID NO: 258115 - DNA, 1095 bp, Artificial Sequence
  derived and/or modified sequence
atgccctaccagtacccagccctgaccccagagcagaagaaggagctgagtgacatcgcccacagaattgtggcccctgggaagggcatcctggccgcagatgagagcacaggcagcatcgccaagaggctgcagagcattggaacagagaacacagaggagaacagacgcttctaccggcagctgctgctgacagcagatgacagagtgaacccctgcatcggcggcgtcatcctcttccacgagaccctgtaccagaaggcagatgatggccggcccttcccccaggtgatcaagagcaaaggaggagtggtgggcatcaaggtggacaagggcgtggtgcccctggccggcaccaacggggagaccaccacccagggcctggatggcctgtctgagcgctgtgcccagtacaagaaggatggagctgactttgccaagtggaggtgtgtgctgaagatcggggagcacacccccagcgccctggccatcatggagaatgccaacgtgctggcccgctatgccagcatctgccagcagaatggaattgtgcccatcgtggagcctgagatcctgcctgatggagaccatgacctgaagcgctgccagtatgtgacagagaaggtgctggccgctgtgtacaaggccctgagtgaccaccacatctacctggagggcaccctgctgaagcccaacatggtgaccccaggccacgcctgcacccagaagttcagccatgaggagatcgccatggccaccgtgacagccctgcggaggacagtgcccccagctgtgacaggcatcaccttcctgagcggcggccagagcgaggaggaggccagcatcaacctgaatgccatcaacaagtgccccctgctgaagccctgggccctgaccttctcctatggccgggccctgcaggccagcgccctgaaggcctggggcggcaagaaggagaacctgaaggccgcccaggaggagtatgtgaagagggccctggccaacagcctggcctgccagggcaagtacacccccagcggccaggccggggccgccgccagcgagagcctgtttgtgagcaaccacgcctactag

SEQ ID NO: 258116 - DNA, 1095 bp, Artificial Sequence
  derived and/or modified sequence
atgccctaccagtaccccgccctgacccccgagcagaagaaggagctatccgatatagcacatcgtattgtggcacccggaaaaggcatccttgctgcggacgaatcaacggggtccattgcaaaacgattacagtctattggaaccgagaacactgaagaaaatcgtcggttctaccggcagctgctgctcacagcagacgatcgggttaacccctgtatcggcggagtgattcttttccacgagaccttatatcaaaaagccgatgacgggcgacccttcccccaggtaattaaaagcaagggcggagtggtggggatcaaggtggataaaggagtagttccactggccggaacaaacggcgagacaacaacgcaaggattagacggactgagcgaaaggtgcgctcagtataaaaaagacggcgccgactttgcaaagtggaggtgtgtgcttaaaatcggagaacacaccccttccgcgctggcaatcatggagaacgctaacgttctcgcacgttatgcctcgatctgtcagcagaatggaattgtgccaattgtggagcctgaaatcctccccgacggtgaccacgacctcaaacgatgtcagtatgtcacagagaaagttctggccgccgtgtataaagccctctctgatcaccacatctatctggaaggaacactgttgaaaccgaacatggtgactccaggccatgcctgcacacaaaagttctctcatgaggaaattgcaatggctacagtcactgctctccgccgcactgtaccccccgccgttaccggaattacctttctgtccggcgggcaaagtgaagaagaggccagcatcaatctgaatgccatcaataaatgtccattgctgaagccctgggccttgacctttagctatggcagagccctgcaggcttctgctttgaaggcatgggggggtaagaaagagaatctgaaggccgcgcaggaggagtatgttaagcgcgcactggccaatagtttggcctgccaaggcaagtacacaccctcaggccaggccggcgccgccgcaagcgagtcactcttcgtctctaatcatgcctattag

SEQ ID NO: 258117 - DNA, 1095 bp, Artificial Sequence
  derived and/or modified sequence
atgccctaccagtaccccgccctgacccccgagcagaagaaggagctctctgatatcgcacatcgaatcgtcgcacctgggaaggggatcctggctgcagatgagtctaccgggtctatcgctaaaaggctccaaagtatcggaaccgagaatacggaggagaaccgacgcttctatcggcagctcttgcttacagctgatgaccgcgttaatccatgtattggcggtgttattttgttccacgagaccctgtaccaaaaagcggatgatgggaggcccttccctcaggtgattaagagcaagggcggggtggtcgggattaaagtggacaaaggcgttgtccccctggccggcacgaacggagagacaactacacagggtctcgacggtctatctgagcgctgtgctcaatataaaaaggacggagccgactttgccaaatggcggtgtgttttgaagatcggagagcacacaccatcagcactggctattatggaaaatgctaatgtcttggcaaggtacgccagcatttgccagcagaacggcatagttcctatcgtggagcctgagattctgccggacggtgatcatgatctgaaaaggtgtcagtacgtgaccgagaaggtgctggctgctgtgtacaaagcactgtcagatcatcatatctatctggagggtaccctgctcaaaccaaacatggtcaccccagggcacgcctgcacccaaaaattttcacacgaagagatagctatggctaccgtgaccgctttaagacgcactgttcctcccgctgtgactggaatcactttcctgtccggcggacagtctgaagaagaggccagcatcaatctgaatgcaatcaacaagtgccctctactgaaaccatgggctctgactttctcttatggacgagctcttcaagccagcgccctcaaagcctgggggggcaaaaaagaaaacctgaaagctgcccaggaagagtacgtcaaaagggctctggcaaatagcctcgcatgccagggcaaatacacccctagtggacaggccggggcagcggcgagcgagtctttgtttgttagcaatcacgcttattag

SEQ ID NO: 258118 - DNA, 1095 bp, Artificial Sequence
  derived and/or modified sequence
atgccctaccagtaccccgccctgacccccgagcagaagaaggagcttagtgacattgcccaccgcatcgtcgctcccggcaaaggaattctggctgccgacgagagcacaggaagtatcgccaaacggctccagtctatcggaacggaaaacaccgaggagaaccggcgattctaccgtcagttactccttacagctgacgatcgcgtaaacccctgcattgggggggtcattctttttcatgagactctttaccagaaggcggacgatggaagaccatttccccaggtaatcaaatccaaggggggagtagtgggcattaaagttgataaaggcgtagttcccctggccggcactaacggagagaccaccacccaaggattagacggtctctcagaacgctgcgcgcaatataaaaaggacggggctgattttgctaaatggcgctgtgtgctgaaaattggagagcacaccccctcagcccttgccatcatggagaacgctaacgtactcgcgcgctacgccagcatatgccagcaaaacggcatagtgccaatcgtcgagccagagattctgccagacggggaccatgacctgaaaaggtgtcagtacgtcacagagaaagttctggccgcagtctacaaagccttaagtgatcaccacatttatctagagggcacattgctgaagcccaacatggtgactccgggccacgcctgtactcagaaatttagccacgaggaaatagccatggccacagtgacggcccttcgtcgaacagttccccctgcggtgaccgggatcacattcctgagcggaggtcagtcggaagaggaagcatccatcaacctgaacgccatcaataagtgtcctcttctgaagccttgggctcttaccttctcttatgggagggcattgcaagcaagcgctctcaaagcatggggcggcaagaaggagaatctgaaagccgcccaggaggaatacgtgaagcgcgctctggcaaattctcttgcgtgccaggggaagtatactccctcgggccaagccggtgccgctgcatctgagtctctgttcgtatccaaccatgcgtattag

SEQ ID NO: 258119 - DNA, 1095 bp, Artificial Sequence
  derived and/or modified sequence
atgccctaccagtaccccgccctgacccccgagcagaagaaggagcttagcgatattgcccatcgcatcgttgctcccggaaagggaattttagcagccgacgaatcaacaggaagcatcgcaaagagattacagtcgataggtactgaaaacaccgaagagaaccgtcggttttatagacagttgttgcttacggccgacgaccgcgtaaatccctgcatcggaggagtcatcctgttccacgagaccctttatcagaaggccgacgatgggcggcctttcccacaggtcatcaaaagcaaaggcggagttgttggaataaaagtagataagggggttgttccactggctgggacaaatggcgaaacaacaacccagggactagatggcctttctgagcggtgcgcccagtacaagaaagatggtgcagattttgccaaatggcgctgcgtgcttaagattggagaacatactccctctgcccttgctatcatggaaaacgccaacgtgttagctagatacgcctcaatttgccagcagaacgggatagttcccatcgttgagcctgagatactacctgatggggatcacgacctcaagagatgtcagtatgtgaccgagaaggtcctcgccgcagtctataaagccttatctgaccatcacatttaccttgagggcactttgctgaagcctaatatggtcactcccggacacgcctgcacccagaagttcagtcacgaagagattgccatggcaacagttacagctctacgccgcactgtgccacccgccgtgactggaatcacgtttctgagcggtgggcagtcagaggaggaagcctccattaatctcaacgcgattaacaagtgccccctccttaagccttgggcgctgaccttctcttatggcagagctttgcaggcaagcgctttgaaagcatggggaggcaaaaaagagaatctgaaggctgcacaggaggagtacgtgaagcgggctctggcaaactcccttgcttgtcaagggaagtatactccctctggtcaagctggcgctgccgcctcagagtcactgtttgtgagcaaccatgcctattag

SEQ ID NO: 258120 - DNA, 1095 bp, Artificial Sequence
  derived and/or modified sequence
atgccctaccagtaccccgccctgacccccgagcagaagaaggagctgagcgacatcgcacatagaattgtggctcctggtaaaggaattcttgccgccgacgagagtaccggatctattgccaagcgtctccaatccatcggaactgaaaacaccgaggagaaccgacgcttctatcggcaactgctcctcactgccgacgaccgggtgaatccctgcatagggggggtcattctttttcatgaaacactgtatcagaaggccgacgatgggcgcccattcccacaagttatcaaaagtaaaggtggtgttgtgggaattaaagttgacaagggagtcgtgccactcgcaggaaccaatggagaaacgactacccaaggccttgacgggctgtcagaaaggtgcgcccagtacaaaaaagatggcgccgatttcgccaagtggaggtgtgtgctgaagatcggggagcacacgccatcagcgctcgccattatggagaatgcgaatgtgctagctcgatacgcttctatctgccagcaaaatggcatcgtgcccatcgtcgaacctgagatcctgcccgacggggaccacgacttaaagaggtgtcagtatgtaacagaaaaagtcctcgccgccgtgtacaaagcactgtctgatcatcatatctatttggagggtacacttctcaagcctaacatggtcacacccggtcacgcttgcacgcagaagttttcccatgaagagattgccatggctaccgtgactgccctgaggagaactgtcccccccgccgtgactgggattactttcttgagcggaggccagtccgaggaagaagcctcaattaatctgaacgctataaacaagtgcccactcctgaagccctgggccctaacctttagctatggccgcgcattgcaggcctccgctctcaaggcctggggcggaaagaaggagaatctgaaagctgcgcaagaggaatatgttaagagggccctagcaaattctctggcatgccaagggaaatacacaccatcggggcaggctggcgcggcagcgtctgagagcctttttgtttcaaatcacgcttattag

SEQ ID NO: 258121 - DNA, 1095 bp, Artificial Sequence
  derived and/or modified sequence
atgccttatcagtaccctgccctgacccctgaacagaaaaaggagctgagcgatatcgctcatcgcatagtagcccctggcaagggtattctggcagccgacgaaagtaccggcagtatcgcgaagcgtctgcagagcatcgggacagaaaacacagaggagaatcgccgtttctatagacagctgcttctaaccgccgacgaccgggtgaacccctgcataggcggtgtaatcctgttccacgaaacattataccagaaagcagatgatgggaggcctttccctcaggtgattaagtctaaggggggagtggtcgggattaaggtcgataagggcgtggtccctctggctggaactaacggcgagaccacaacacagggcctggatggcctgtccgagcggtgcgcccagtataagaaagatggtgccgatttcgccaagtggaggtgcgtattgaagatcggagagcataccccctcagccttagctatcatggagaatgccaacgtattggcacgctatgcctcaatttgccagcagaacggaattgttcccatcgtggaaccggagatactgccggatggggaccatgatctcaagagatgtcagtacgtcacggagaaagttctcgcagctgtgtacaaagctcttagcgaccatcatatctacctggaaggaactctgctgaagccaaacatggtgacacctggtcacgcttgtacgcagaagtttagtcacgaagagattgccatggcaacagttacagctctgcgccgaacagtgcccccagccgtcaccggaatcactttcttgtctggcggacagagcgaggaggaggcttctattaatcttaacgccattaataagtgtccattactgaagccctgggccttaaccttttcatacggccgagcactccaggcctctgccctcaaagcatgggggggtaagaaggagaacctgaaggccgcacaggaggaatacgtgaaacgcgctctggccaactctttggcttgccaggggaaatataccccctccggacaagctggtgccgcagcctcagaatccttgttcgtcagcaatcatgcctattag

SEQ ID NO: 258122 - DNA, 1095 bp, Artificial Sequence
  derived and/or modified sequence
atgccttaccagtatcccgcactcactccagagcagaagaaagagctgagtgacatcgctcaccgtatcgtggctcccggaaaggggatactcgccgctgacgaatctacgggatcaattgcaaagcggctgcaatccatcggcaccgagaacaccgaagaaaatcggaggttttatagacagttgctgctcacagcagatgaccgggtgaatccctgcattgggggtgtgattctgttccatgagaccctgtaccagaaggctgatgacggaagaccctttcctcaagttattaagagcaagggaggcgtggtgggaataaaggtggacaagggagttgtccccttagccggaactaacggcgaaacgacaacgcaggggctcgacggcttatctgaacgatgtgcccagtacaaaaaggatggagctgattttgccaagtggcgctgcgtgctgaagattggcgagcacacgcccagtgctttggcaatcatggagaacgctaacgtgctggcaagatatgccagcatatgtcagcagaatgggattgtgccaattgtcgaacccgaaattttgccagacggcgaccacgaccttaaacgctgtcagtacgtcacagagaaggtccttgccgcagtttacaaagcactctctgaccatcacatctacctcgaggggaccctcctgaaacccaacatggttaccccgggacacgcctgcacccagaaattttctcatgaagaaattgccatggctaccgttacggccttgcgcaggaccgtgcctccagccgttacgggtatcacattcctgtctggcggtcagagtgaggaggaggcatcaattaacctgaacgcaatcaataagtgcccactgttgaagccatgggcactgacattttcatatggcagggccctgcaggcctccgctttgaaagcctggggtgggaagaaggagaatctcaaagctgcccaagaggagtatgtgaagcgagccctggccaacagccttgcctgccagggtaagtatacaccgtctggtcaagcaggggcagctgcctcagaaagccttttcgtttctaaccatgcgtattag

SEQ ID NO: 258123 - DNA, 1095 bp, Artificial Sequence
  derived and/or modified sequence
atgccctaccagtacccagctttgacgccggagcagaagaaagaactttccgacattgcccaccggatcgtagccccaggtaagggcattctagctgccgacgagagcactggtagcatcgcaaagcggttacagtccattgggactgagaatactgaagagaatcgcagattttatcgacagttgctgctcaccgccgacgaccgggtaaatccttgcatcgggggtgtcattctttttcatgaaacgctgtatcagaaggcagacgatggcaggcccttcccccaggttatcaaaagcaaaggtggggtcgtaggaataaaggtggataaaggtgtggttcctctggccggaaccaacggggagaccaccacgcagggcctcgacggactaagcgagaggtgtgcgcagtataaaaaggacggcgctgactttgccaagtggaggtgtgtcctgaagattggtgaacacactccatcggccttggccattatggagaacgccaatgtcttggcaaggtatgccagcatatgccaacagaatggtatagtgcctattgtggagcccgaaatccttcccgacggcgaccacgatttaaaaaggtgccagtacgttaccgagaaggtgctggccgctgtctacaaagcactctccgaccatcacatttatttagagggaaccctgcttaaaccaaacatggtgacaccaggccatgcctgcacacagaagtttagccacgaggagatcgcgatggctaccgtcaccgcactgcgtcggacggtcccaccagctgtcacaggcataacatttctgagcgggggtcaaagcgaagaagaagcctccattaacctaaatgctatcaataagtgtcctctcttgaaaccatgggctttaaccttttcatacggcagagccctgcaagccagtgctttaaaggcttggggaggcaagaaagaaaacttgaaggcagcccaggaggaatatgtgaagcgagccctcgccaatagccttgcgtgtcaggggaagtacaccccgtccggtcaggctggcgctgccgcaagcgaatctctctttgtgagtaaccacgcctactag

SEQ ID NO: 258124 - DNA, 1095 bp, Artificial Sequence
  derived and/or modified sequence
atgccttatcagtaccccgcactgaccccggagcagaaaaaagagctgtccgacatcgcccaccgaatcgtggccccaggaaaaggcatcctcgcggcagatgaatcaaccggatcaattgccaaaaggctgcagagcatcgggaccgaaaacaccgaagagaatcgcagattttacaggcagctgctgttgactgctgacgacagggttaacccttgcattggtggtgttatcttgtttcatgaaacgctgtatcaaaaagcggacgatggcaggcctttcccccaagtgatcaagagcaaaggcggtgtggtcggcattaaggttgacaagggggtagttcctctggccggaacaaatggggagactactacccagggcctggacggactctctgagagatgcgcacagtataagaaagacggcgctgatttcgcaaaatggagatgtgtattgaagatcggggagcacactccgagcgccctagctatcatggagaatgcaaacgtactggctagatacgcgtccatctgtcagcagaacgggatagtcccaatagtggagcctgaaattctccctgatggggaccacgacctgaagcggtgtcagtacgtcaccgagaaggtacttgccgcagtgtataaggctctcagcgatcatcacatctacctggagggaacacttctgaagccgaacatggtaaccccagggcacgcctgcacccagaaattttcccacgaggagattgccatggctaccgttaccgctctacggagaaccgtcccacctgccgtaactggaattacctttctgagcgggggtcagtcagaggaagaagcatctataaatctcaatgcaataaacaaatgcccgctcctgaaaccgtgggccttgacattttcttatggacgggctctgcaggcaagcgcactcaaggcttggggaggcaaaaaggagaatttgaaagccgctcaggaagagtatgtaaagagggcccttgctaacagccttgcctgccagggtaaatacactcccagcggtcaagctggcgcagcagcgagtgagagtctattcgtgtccaaccatgcctattag

SEQ ID NO: 258125 - DNA, 1095 bp, Artificial Sequence
  derived and/or modified sequence
atgccatatcaatatccggctctgacacctgagcagaagaaagagttatccgatatcgctcatcggattgtggctccaggaaagggcattcttgccgctgacgagtcaaccggctcaatcgcaaaacgcctccagtccatcgggacagaaaataccgaggagaatcgtcgcttctatcgccaactcttacttaccgccgacgatcgcgtcaatccctgtattggtggtgtgattctgtttcacgagaccctgtatcagaaagccgacgacggcagacccttcccgcaggtgattaagtccaaagggggtgtggtcggaatcaaggtcgacaagggtgtggtgcccctagccggtaccaacggtgaaacaaccactcagggactggacggtttatcggagagatgcgcccaatacaaaaaagatggcgcagactttgcgaaatggagatgtgtgctgaagattggagagcacacaccatctgcactggccatcatggagaatgcgaacgtgctggccaggtacgctagtatctgtcagcagaatggtatcgttcccatagtcgagcccgaaatactgccagacggagatcatgacctgaaacggtgtcaatacgtgacagagaaagtattagccgcagtgtacaaagctttgtcggaccaccatatatacctggagggcacactactcaaaccgaacatggttactccagggcatgcttgcacccagaaatttagccatgaggaaattgcaatggcgaccgtcacggcattgaggcggacagtgccacctgcagtaacaggcattacatttctgagcgggggacagtccgaagaagaggcaagcatcaatcttaatgccataaacaagtgtcctctcttgaagccctgggcattaacctttagttacggtcgggcacttcaggccagtgctctgaaggcctgggggggtaaaaaagaaaacttaaaggcggcacaagaggagtacgtgaaaagagctctggccaacagcctggcctgtcagggaaagtacacccccagcggccaagctggagccgcagcaagcgaatcgcttttcgtcagcaatcatgcttactag

SEQ ID NO: 258126 - DNA, 1092 bp, Artificial Sequence
  derived and/or modified sequence
atgccttatcagtaccccgcattgacaccggaacagaaaaaagagttgagtgatattgcccaccgcatagtggcacccggcaagggaattctcgccgcagacgaaagtactggcagcattgccaaaagattgcagagcattggaaccgagaacaccgaggagaatcgacggttttacagacagcttctccttaccgccgacgacagagtgaatccatgtattggcggggtgatcctcttccatgaaactttgtatcagaaagccgatgatgggcgaccattcccacaggtgattaaatctaagggaggggttgtcggaatcaaggtggataagggggtggtgccattagctggtacaaatggagagacaaccactcagggattggacgggctaagcgagcgttgtgcccaatataaaaaggacggcgccgatttcgcaaaatggagatgtgttctcaagattggagagcacaccccatcggccctggcgatcatggaaaatgccaacgtgctggcacggtacgcctcaatttgccaacagaacggtattgtccccatcgtggaaccagagatcttgccagacggggaccatgacctcaaaaggtgccagtacgtcactgagaaggtgctggccgcagtgtacaaagccttgagtgaccaccatatttacctcgaggggacgcttctgaagcccaacatggtgactcccggacacgcctgtacacaaaagttctctcacgaagagatcgctatggcaactgtaacggccctcagacgcacagtccctcctgctgtaactggtataacgtttctaagcggcggccagagcgaagaagaggcttctattaacttgaacgcaattaataaatgtccacttttgaagccctgggccctcaccttctcctatgggagggcgcttcaggcttctgcactgaaggcctggggcggtaagaaggagaacctgaaggccgcccaagaagaatatgtcaagagagcactggcaaattctctcgcgtgtcagggcaagtatactccctctgggcaagccggagccgctgcgtctgagtctctgtttgtgagcaatcacgcttat

SEQ ID NO: 258127 - DNA, 1092 bp, Artificial Sequence
  derived and/or modified sequence
atgccttaccagtaccctgcccttacaccggagcagaaaaaggagttgtccgatatcgcccaccgaatcgtcgctcccggcaaaggcatccttgccgccgatgagtccacaggatcgatagcgaagcgtctccagtcgatcggcaccgagaacaccgaagagaataggcggttctatcgtcagctcctgctcaccgcagatgaccgcgtcaacccttgtattggaggcgtcatcctatttcatgaaacgttgtaccaaaaggccgatgacggtcgtccattccctcaggtgataaaatccaaggggggagttgttggtatcaaggtcgataagggggtggtcccgctggccggtaccaacggtgagacgaccacccaggggctggacggcctgtccgagcggtgtgctcagtacaagaaggatggggcggacttcgcgaagtggcggtgtgttctcaagatcggagagcatactccttccgcgttggcgatcatggagaatgccaatgttctcgctcgctatgcctccatatgtcagcaaaatggcattgtgcccattgtggagccagaaattctgcctgacggtgatcatgaccttaaaaggtgtcagtacgtaaccgaaaaagttttggctgcagtttataaggcactatctgaccatcacatttacctagaggggacactactgaagcctaacatggtgactcctggccacgcatgtacacaaaaattctcccatgaggagatcgctatggccacagtgacggccttgcgccgtaccgtcccgcctgctgtgactggcatcaccttcctgtccggtggccagagtgaggaagaagccagtatcaacctcaatgccattaataaatgcccactgttgaaaccatgggcgcttactttttcctacggacgcgccctccaagcgtctgcgcttaaagcatggggcgggaagaaggaaaatctaaaagctgcccaagaagaatatgttaagcgggctctagcaaacagtttggcatgtcaagggaagtacactccgagcggtcaggcaggcgcggccgcctcggagtcgttgtttgtctcaaatcacgcatat

SEQ ID NO: 258128 - DNA, 1092 bp, Artificial Sequence
  derived and/or modified sequence
atgccgtatcaatatccagcgctgactccagagcaaaagaaagagctctcggatatcgcccaccggatcgtggcccctggaaagggaatcctcgctgctgatgagtccacgggatccatcgccaaacggctccagtccattggaactgaaaacacggaggagaatcgccggttctaccgccaactgctgctgaccgcggatgatcgggtcaatccttgcatcgggggagtgatcctgttccatgaaaccctctaccaaaaggcagatgacggtagaccgttcccgcaagtgatcaagagcaaggggggagtggtcggcatcaaggtcgataaaggagtggtcccgttggcaggcaccaacggggaaaccactactcaagggctcgatggactgtcggagcgctgtgcccaatacaagaaggacggggctgactttgctaagtggcggtgtgtgctgaagatcggcgaacacaccccctccgctctggcaatcatggaaaatgccaatgtgctggcccgctatgcttcgatctgccagcagaacggaatcgtgccaattgtcgaaccggaaatcctcccagacggggatcatgacctgaagagatgccagtacgtcaccgagaaggtccttgcggccgtctacaaagctctgtcggaccatcatatctaccttgagggcacccttttgaagccaaacatggtgacccccggccacgcgtgcacccagaagttctcacatgaagaaatcgctatggccaccgtcactgcactgcgccggactgtcccgccagcggtgactggaatcaccttcctgtccggcggccaatcggaggaagaagccagcataaatctgaatgctatcaacaagtgtccgctgctgaagccctgggcactgacttttagctacggacgggccctgcaggccagtgccctgaaagcgtggggtgggaaaaaggagaacttgaaggctgctcaggaggagtacgtgaagcgcgccttggccaactcccttgcatgtcagggaaagtacaccccgagcgggcaggccggagccgcggcaagcgaatcactgtttgtgagcaaccacgcatac

SEQ ID NO: 258129 - DNA, 1092 bp, Artificial Sequence
  derived and/or modified sequence
atgccctaccaataccccgctcttaccccagagcagaagaaggaactcagtgatatcgcccatcggattgtcgccccaggtaaagggatccttgccgctgacgagtccactgggtccatcgctaagaggttgcagagcattgggacagagaataccgaggagaaccggcggttttacagacagctcctgctaaccgctgatgacagagtgaacccgtgcattggaggggtcatcctgttccacgaaactctgtatcagaaggccgacgacggcaggccctttcctcaggtcataaaaagcaagggtggggtcgttggcatcaaggtggataaaggagtagttcccttagccgggacgaacggtgaaacaaccactcagggactggacgggctgtcagaacgctgcgcgcagtacaaaaaagatggagctgactttgctaagtggagatgcgtgctaaaaatcggtgagcacaccccaagtgctttggccataatggagaacgccaatgtactggctcgatatgcatccatttgccagcaaaacggcatcgtgcctatcgtggaacctgagattctgcctgacggggaccatgaccttaaaagatgtcaatacgtgactgaaaaggtgctggcggcagtctacaaggccttgtctgatcaccatatctatctggagggcaccctcctcaaacccaacatggtgactccaggccacgcgtgtacacagaaattctctcatgaagagattgccatggcaacagtcactgccctgcggcggactgtgccgcctgcggtgaccgggataacctttctctctggcgggcaatcagaagaggaagcaagcatcaatctgaatgcaatcaacaaatgtccactgcttaagccctgggctctaacgtttagctatggtcgagccctccaggcaagtgcactcaaagcgtggggtgggaagaaggaaaatctgaaggccgcacaggaagaatatgtgaagagggcgctagccaacagcctcgcctgccaaggaaagtacactccaagtggccaggccggcgccgccgcatcagaaagcctattcgtgtctaaccacgcatac

SEQ ID NO: 258130 - DNA, 1092 bp, Artificial Sequence
  derived and/or modified sequence
atgccttatcagtaccccgctctcactccagagcagaaaaaagagctttccgacatcgcacaccgcattgtggctccaggcaaaggcatcctggcagccgacgagagcacggggtcaatcgcgaagaggttacaaagtattggtacagagaataccgaggaaaacagacgcttttacagacagctgttactcaccgccgacgaccgcgttaacccatgcatcggaggcgtgatcttgttccacgaaactctgtaccagaaggccgacgacggacgacccttcccccaagtcattaaatccaaaggcggagtggttggtataaaggttgacaagggggtcgttccactggctggcaccaatggcgagacaaccactcagggtctcgatgggcttagcgagagatgcgctcagtataagaaggatggcgctgatttcgccaaatggcggtgcgtgctaaagatcggggaacacacaccttcagcactcgccatcatggagaacgctaacgtgctagcccgttacgcctccatctgtcaacagaacggaattgtccctattgtagaaccagagattctgcctgatggcgaccacgatctgaagagatgccagtacgtcacggaaaaagtgttggcagccgtgtacaaggcgctctccgaccaccacatataccttgaagggacgctgctgaaaccaaacatggtgacccccggccatgcctgtacacagaaattctctcacgaggaaattgccatggctacagtgacagccctcaggagaactgtaccacctgcagtaacaggcatcacatttctttctggcggccaatctgaagaggaggcctccataaacctcaacgccatcaacaagtgccccctgcttaaaccatgggccctaacattcagctacggacgggccttgcaagcgtcggccttaaaggcctgggggggcaaaaaagagaatctgaaagccgcgcaggaggagtatgtgaaaagggccctggctaactccctagcctgccagggaaaatacacgccttctggtcaggccggcgcggctgcctccgaaagtctgtttgtttccaaccacgcctac

SEQ ID NO: 258131 - DNA, 1092 bp, Artificial Sequence
  derived and/or modified sequence
atgccttaccagtaccccgccctgacaccggagcagaagaaggaactgagcgatattgcccaccggattgttgccccgggcaaggggatattagctgccgacgagtctacagggagcattgcaaagaggctgcaaagtatcggtacagaaaataccgaggaaaatcgcaggttttaccgacagctgctgcttactgcagatgatcgtgttaacccatgtattggaggggtgattctgttccacgagacgctataccagaaggcggacgatgggaggccattcccccaggtcatcaagtcaaaaggaggtgtggtagggatcaaggtagataagggtgtggttcctctggctggaaccaacggggagaccactactcaagggttggacggcctgagcgagagatgcgcacagtataaaaaggatggagcagactttgccaaatggaggtgcgtgctgaagattggagagcacactccgtccgcattggccatcatggaaaacgcgaatgtcttagccagatacgcctccatctgtcagcagaatggtatcgtgccaatagtggagccagagatcttgccagacggcgatcatgatttaaagcgctgtcagtacgttacagagaaggtgctggcagctgtgtataaggccctctcagatcaccacatttatctggaggggaccctactgaaacccaatatggtcactcccgggcacgcatgcactcagaaattcagtcacgaggaaattgctatggcgacagtgaccgctctcagacgcaccgtgccacccgcagtgactggcatcaccttcttgtccggcggacagagtgaagaagaggcttccattaatctgaatgccattaataagtgcccactgctgaaaccctgggcgctcactttcagctatgggagggcgctgcaggcatctgcactcaaggcatggggaggaaagaaggaaaacctgaaggccgcccaagaggagtatgtgaagcgagccctggccaatagcctcgcctgccaaggcaagtatactcctagtgggcaagctggggctgctgcatccgagtccctgtttgtgtctaatcatgcttac

SEQ ID NO: 258132 - DNA, 1092 bp, Artificial Sequence
  derived and/or modified sequence
atgccgtatcaatatcctgccctcactccagaacagaagaaagagctgtctgacattgctcatcggatcgttgctccaggcaagggtatcctcgccgctgatgaaagcacagggagtatcgcaaagcgattgcagagcatcggtactgagaacaccgaagaaaatagacgattctaccgacagctgctgctgaccgccgatgatcgagtaaatccttgcatagggggggtcatattgttccatgagacactgtatcagaaggccgacgacgggagacccttcccacaagtcataaaatcaaaaggaggtgtcgtggggattaaggtggataagggggttgttcctctggccgggaccaacggtgagactaccacccaagggctggacgggctgagcgagagatgcgcacagtacaagaaagacggcgcagactttgcgaagtggcgatgtgtactgaagatcggcgaacacaccccaagcgccctggcaatcatggagaacgcaaatgtgcttgctcgctacgctagtatatgccagcaaaacggtatcgtcccgattgtggagcctgagatactgccagacggagaccacgacctgaagagatgtcaatacgtgaccgagaaagtgctcgccgctgtgtataaggcactgtctgatcaccatatctatctcgaagggaccttgcttaaaccaaatatggtgactccagggcatgcttgtacgcagaaattttcacacgaggaaatcgctatggccacagtcaccgccctgcggaggaccgtgcctcctgccgtgacaggaataacattcctgtcaggggggcagtccgaggaggaggcaagcataaatctgaatgcaataaacaagtgccctttgctgaaaccatgggccctgaccttctcttacggacgcgctctgcaagcctcagccttgaaggcctggggtgggaaaaaagagaacctgaaggcagcccaggaggagtacgtgaaaagagcactggccaactctttggcgtgccaaggaaaatacacgcctagcggccaggcaggcgccgccgcttccgagtctctctttgtgagtaaccatgcctat

SEQ ID NO: 258133 - DNA, 1092 bp, Artificial Sequence
  derived and/or modified sequence
atgccctaccagtatccagcattgactcctgaacaaaagaaagagctctccgacatagcacacagaattgtggcgccaggtaagggtattctggccgccgatgagtccaccggctcgatagcaaaacggctgcaatcgatcggcaccgaaaataccgaagaaaaccggagattctaccgtcaactgcttcttaccgctgatgatagggtgaatccatgtatcggtggagtcattctcttccatgaaaccctctaccaaaaggccgatgatggtcgcccatttcctcaagtgattaagtcaaaggggggtgtggtcgggatcaaagtggacaagggtgtggttccgctggcaggtaccaacggagaaactaccacccagggcctcgatggtctgtcggagaggtgcgcgcagtacaagaaagatggcgcggactttgcaaaatggcggtgtgtgttgaaaattggggaacatactccttctgcacttgcaataatggagaatgcgaacgtcctcgctcgttacgcctccatttgccagcagaatggtattgtgcctatcgtggaaccggaaattcttcccgacggtgaccatgatcttaagagatgccaatacgtgactgagaaggtcctggcggcagtctacaaggcgctttcggatcaccatatctacctcgaggggactcttctgaagcctaacatggtgacccccgggcatgcgtgtacccaaaagtttagccatgaagagatagctatggcaacggtgactgcacttcgtaggactgtgccgccagctgtcaccggtataacctttctgagcggcggacaatccgaagaagaagcctcaatcaatctgaatgcaatcaataagtgtccccttctgaagccctgggccctgacgttttcctacgggcgcgcactgcaagcgtcagcactcaaggcatggggaggaaaaaaggaaaacctcaaggcagcgcaggaagaatacgtcaagcgggcattggcaaactcactcgcctgtcaaggcaagtacacccccagcggacaggcaggagcggcggcatcggaatcactgttcgtgagcaatcacgcttac

SEQ ID NO: 258134 - DNA, 1092 bp, Artificial Sequence
  derived and/or modified sequence
atgccctaccagtacccagccctgactcctgaacagaaaaaggaactctccgatattgcccataggatagtggccccaggcaagggcatcttagctgcagatgagtctactggctccatcgctaaaaggctgcagagcatcgggaccgagaacactgaagagaatagacggttttatcggcagttactgttaacagcggatgaccgtgttaatccctgtatcggtggagtgatactttttcatgaaacactgtatcaaaaagccgatgatggccgtcctttcccgcaggtgataaaatctaaaggcggcgtggtgggcattaaagtcgacaaaggggtcgtgcccctggccggcaccaacggagagactactacccagggactagatggtctgtcagagcggtgcgcccagtataaaaaggatggagcagacttcgctaagtggcgatgtgtactgaaaattggagaacacacaccaagtgcccttgccatcatggagaacgccaatgtgctggcccgctacgcttccatttgtcagcagaacggcatcgtcccgattgttgaacccgagatactgcctgacggggatcatgacttgaaaaggtgccaatacgtaacagagaaagtgctggccgctgtctacaaagctctttcagaccaccatatatacttggaagggaccctgctgaagccgaacatggtgactcctgggcatgcatgcacacaaaaattttcccatgaagagattgcaatggccacagttacggccctgaggcggactgtcccccccgctgtaaccggaattaccttcctgagtggcgggcaatccgaggaggaagcttccattaaccttaatgccatcaataagtgccccctactaaaaccatgggcacttacatttagctatggaagggcattgcaggcgagcgctctcaaagcatggggcggaaagaaggaaaacctgaaggctgcccaggaagagtatgtgaaaagggccttggccaacagcctggcttgccaaggaaagtacacaccctccggccaggccggtgccgctgcctcagagagtctgttcgtgagtaaccacgcatac

SEQ ID NO: 258135 - DNA, 1092 bp, Artificial Sequence
  derived and/or modified sequence
atgccgtaccagtaccccgctttaacacccgaacagaaaaaggaactctcagacatcgcacatcggattgtggcgcccggtaaggggatcctggctgccgacgagtccacaggcagcatcgctaaaagattgcaatctataggcactgagaataccgaagagaatcggaggttctaccgccagctcctcctgacagccgacgatcgtgtgaacccttgcattgggggcgttatcctgtttcacgaaactctttaccagaaagccgatgacggacgtccattcccacaggtaatcaagtcaaaaggcggagtcgttgggattaaagtcgacaaaggcgtagtaccactggctggtacgaatggtgagactacaactcaggggctggacggattgtccgagaggtgcgctcaatataagaaggacggcgccgacttcgcgaagtggcggtgtgtattgaagataggcgaacatacaccaagcgcactcgctatcatggagaacgcaaatgtgcttgcacggtacgcaagcatttgccagcagaacggcatcgtgcccattgtggagccagagatccttcccgacggagaccacgatctgaaaagatgtcagtatgttaccgagaaggttcttgcagcagtgtacaaagcactctccgaccaccatatctaccttgaggggaccctcctgaaaccaaacatggttacccctgggcacgcttgcactcagaaattttcacacgaggagatcgcgatggcgacagtgacggcactgcgccggactgttccgccagctgtgacaggaatcacctttttatccggcggtcaaagtgaggaggaggcgtccattaatctcaatgccattaataaatgtcccctgcttaaaccgtgggctctgacctttagctacgggcgcgcgctgcaggctagtgcccttaaggcctgggggggtaagaaagagaatctaaaggcagctcaagaggagtatgtaaagcgtgcgttggccaactccttggcttgtcagggcaaatacaccccgtctggtcaagcgggagccgcagccagcgagagcctcttcgtgtcgaaccacgcctac

SEQ ID NO: 258136 - DNA, 1092 bp, Artificial Sequence
  derived and/or modified sequence
atgccgtaccagtaccctgcactgactccggagcagaaaaaggaactgtccgacatagctcaccggatcgttgctccaggaaagggaatcctcgccgccgacgaatccactggcagcatcgccaaacgccttcagagtatcggaaccgagaacaccgaggaaaataggcgcttctatcgccagctgctgctcaccgcggacgatcgcgtcaacccttgcatcggcggtgtgatcctgtttcacgaaaccctttaccaaaaagctgacgatggccggccgttccctcaggtcatcaagtcgaagggtggcgtcgtgggaattaaggtggacaagggagtcgtcccactggctgggactaacggagaaaccactacccaaggactggacggcctgtcggaaaggtgcgcacaatacaagaaagatggcgccgattttgcaaagtggcggtgcgtgctgaagatcggagaacataccccgtcggccctcgcgatcatggagaacgcgaatgtgctcgcaagatacgcctcgatctgtcaacaaaatggtatcgtcccaattgtggaaccggaaatcctccctgatggcgatcacgacctgaagcggtgccagtacgtgacggaaaaagtgcttgccgcggtttacaaggccctgtccgaccaccatatctacttggaaggaaccctgctcaagccgaacatggtcaccccggggcacgcttgcacccagaaattctcccatgaggagatcgcgatggccactgtgacggcactccgaagaactgtgccacccgccgtgactgggatcaccttcctgtcaggaggacagtcagaagaggaggcctcaattaatttgaacgcaattaataagtgtccattgcttaagccctgggctctgactttcagctacgggagagcgctccaggctagcgccctcaaagcctggggagggaagaaggagaacctgaaagccgcacaggaggagtatgtgaagcgcgccctggcgaactcattggcctgccagggaaagtacactccgtcgggacaagcgggtgcagcggccagcgaatccctgttcgtgtctaaccatgcatac

SEQ ID NO: 258137 - DNA, 1092 bp, Artificial Sequence
  derived and/or modified sequence
atgccgtaccagtacccggccctgacccccgaacagaagaaggagctctcggatattgcgcacagaatcgtcgccccaggaaagggaatcctggcagccgacgagtcgacgggtagcatcgccaagcggctgcagagcatcggaactgaaaacacggaagagaacagacggttctaccgccaactcttgctcaccgccgacgatcgggtgaacccatgcataggtggagtgatcctgttccatgagactctttatcagaaggccgatgatggccgcccgtttcctcaggtcatcaaatcgaaggggggagtcgttggaatcaaggtggataagggagtggtgcccttggcaggaaccaacggcgaaaccactacccagggcctcgatggtctgtcagagagatgcgctcaatacaaaaaggacggcgcggacttcgcaaagtggcgctgcgtcttgaaaatcggggaacacactcctagcgcgctggctatcatggaaaatgccaacgtgctggcgcggtatgcctcgatctgccagcagaacggcatagtgcctatcgtggagcccgaaatcctcccggacggcgaccacgaccttaagcggtgccagtacgtgaccgagaaggtgctggcggcggtctacaaggccctttccgaccatcatatctacctggagggcactctgctgaagccgaatatggtgaccccgggtcatgcctgcacgcaaaagttcagccacgaagagatcgccatggctactgtgactgccctgcgccgcactgttccgccagccgtgactggcatcactttcctctcgggcgggcaatcagaagaggaggcgtcgatcaacctcaatgcgatcaacaaatgcccgctgttgaaaccttgggcactgaccttttcgtacggacgggcgctgcaggccagcgctctcaaggcctggggcgggaagaaagagaatctgaaggccgcgcaagaagaatacgtcaaacgcgcactggcaaactccctggcttgccagggcaagtacactccctcgggccaggcgggagcagcggcctcagagtcgctgtttgtttcgaatcatgcatac

SEQ ID NO: 258138 - DNA, 1092 bp, Artificial Sequence
  derived and/or modified sequence
atgccgtatcaatacccggcactgactcctgaacagaagaaggaactgtcggacatcgcccatcgcattgtggcaccgggcaagggaatcctcgcggcagacgaaagcaccggctccatcgccaagcggctccagtccatcggaactgagaacactgaagagaacagacgtttttaccgccagctcctgttgactgccgacgacagagtgaatccttgtatcggaggagtgatcctctttcatgagactctgtaccagaaggcggacgatggcaggcccttcccgcaagtcattaagagcaaggggggtgttgtgggaatcaaagtggataaaggagtggtgccgctggcgggtaccaacggagaaactactacccagggcctggatggactgagcgaacgctgcgctcaatacaaaaaggatggagccgacttcgcgaaatggcgctgtgttctcaaaatcggggaacatacgccttcggctctggccatcatggaaaatgccaatgtgcttgctagatacgcatcaatctgccaacagaacggtatcgtgccgatcgtggaaccagagatcctgccagatggagatcatgacctcaagaggtgccagtacgtcaccgagaaggtgctggctgccgtgtacaaagcgttgtccgaccatcacatttacctcgaaggaaccctgctgaaaccaaacatggtcaccccgggacacgcatgcacccaaaagttcagccatgaagagatcgcaatggccactgtgaccgcgttgagacgcaccgtgcctccggccgtgactggaattaccttcctcagcggagggcagtccgaggaagaagcctccatcaatctcaatgcgattaacaaatgtccgctgttgaagccttgggccttgactttctcgtacggacgggcgctgcaggccagcgcactgaaggcttggggaggaaagaaagagaacctgaaggcggcacaggaggagtacgtgaaacgggccctcgctaactccctggcctgtcagggaaagtacactccttcaggccaagcaggcgcggcagcctccgagagcctgttcgtttccaaccacgcttac

SEQ ID NO: 258139 - DNA, 1092 bp, Artificial Sequence
  derived and/or modified sequence
atgccataccaataccccgcactgacgcctgagcaaaagaaggaactttccgatattgcacaccgcatcgtggcaccaggaaagggcatcctggcagccgacgaatcgacgggctcaatagccaagcgacttcagagcattggaaccgagaacaccgaagaaaaccgaaggttctaccgccaactgctcttgactgccgacgatcgggttaatccttgtataggtggagtgatactctttcacgaaacgctgtaccaaaaggcggatgatggccgcccgttcccccaagtgattaagagcaagggcggtgtggtgggaataaaggtggataagggcgtcgtcccactggcgggtactaatggtgagactaccacccagggactggatggtcttagcgagagatgtgcccaatacaaaaaggatggcgcagacttcgccaaatggaggtgtgtgctcaagattggtgaacataccccttcggctctggcgattatggaaaacgcaaacgtccttgcaagatacgcaagcatttgtcaacaaaacggcatcgtccctattgtcgagccagagattcttcctgatggcgatcatgatttgaagagatgccagtacgtgactgagaaagtgctcgcagcggtgtacaaggcactctcggatcatcatatctacttggaaggaactctgctgaaacccaacatggtgacccctggtcatgcatgtactcagaagttttcgcatgaggagattgctatggccactgtcactgcactgaggagaaccgtccctcctgcggtgaccggcattacttttctttcgggtggacagtcagaagaagaggcgagcatcaatctcaatgcaataaacaaatgtcctctgctcaagccttgggctctcaccttctcgtacggcagagcactgcaagcatcggccctgaaagcgtggggaggaaagaaagaaaacctgaaggcggcgcaagaagaatacgtgaaacgggctctggcaaacagcctggcctgtcaggggaaatacaccccatcgggacaggcgggagccgcagcctccgaaagcctcttcgtgtcaaatcatgcttac

SEQ ID NO: 258140 - DNA, 1092 bp, Artificial Sequence
  derived and/or modified sequence
atgccgtaccaataccctgctcttactccggagcagaagaaggagttgtccgacattgctcataggattgttgcgcctggaaagggaatcctggcagccgatgaatccacggggtcgatcgcaaagaggctccaatccattgggacggaaaacactgaggaaaaccggagattctaccggcaacttcttcttaccgccgatgacagagtcaatccatgtattgggggcgtcattctttttcatgagactctgtaccagaaggccgacgacggacggccctttcctcaggtcattaagtcgaaagggggagtcgtgggtatcaaggtggataaaggcgtggtgcctctggccggaaccaatggagaaactactactcagggactcgatggtctgtccgaacggtgcgcacaatacaaaaaggacggagcagactttgcaaaatggcgatgcgtgcttaagattggtgagcataccccatcagccctggcaattatggaaaatgcgaacgtgctggcgagatatgcatccatttgccagcagaacgggattgtccccattgtcgagccagaaatactgcctgatggtgaccatgatctgaagcgatgtcagtacgtcaccgaaaaggtgctggcagcagtgtacaaggccctgtccgatcatcacatttacctcgaagggacccttcttaagcctaacatggtgacccccggacatgcatgtactcagaaattctcgcatgaagaaattgccatggccaccgtgaccgcgctgaggcgcaccgtgccacctgcagtcactggcataacgttcctgtcaggtggtcaatccgaggaagaagcatccattaaccttaatgccatcaacaagtgtcctcttctcaagccttgggctcttaccttttcgtatggacgtgcattgcaggcgtctgcactgaaggcctggggagggaaaaaggaaaaccttaaggcagcacaggaagaatacgtcaagcgtgcacttgcaaacagccttgcctgtcaaggcaagtacactccaagcgggcaggcgggcgctgccgcgtcagagtcgctctttgtctcaaatcacgcatat

SEQ ID NO: 258141 - DNA, 1092 bp, Artificial Sequence
  derived and/or modified sequence
atgccctaccaatacccggctctcactccggagcagaagaaagaactctcagatatcgcccacaggatcgtggcgccgggcaaaggaatcctcgccgctgacgaatcgaccggttctattgccaaacggcttcagtccatcggcactgagaacaccgaggaaaatcgccgattctaccggcagctcctgctcaccgctgacgatagagtaaacccttgcatcggaggcgtgatcctgtttcacgaaaccctgtaccagaaggcggatgacggtcgcccgttcccgcaggtcattaagtcgaaaggtggagtcgtgggcattaaggtggataagggcgtcgtgccgctggcaggtactaatggcgaaactaccacccagggactggacggactgagcgagagatgcgcacagtacaaaaaggacggtgctgacttcgccaagtggcggtgcgtgctgaagatcggcgaacacaccccgtcagccctcgcgatcatggaaaatgccaacgtgctggcgaggtacgcctcaatctgccagcaaaacggcattgtgccgatcgtggaacccgaaatcctgcctgacggagatcacgacctcaagagatgccaatatgtgaccgagaaggtgctggccgcagtgtacaaagccttgagcgatcatcacatttacctggagggaactctcctgaaaccgaacatggtgactcctggtcatgcctgtacgcagaagttttcacatgaggaaattgctatggcgaccgtgactgcgctccggcgcactgtgccacctgcagtgaccgggatcaccttcctgtcggggggtcaatccgaggaggaagcatccatcaatctgaacgcgatcaacaaatgtccgctgctgaagccgtgggcactgaccttctcctatggccgggccctgcaggcctccgccctcaaggcatggggcggaaagaaggagaatttgaaggcggcacaggaggaatatgtcaagagagccctggctaatagcctcgcctgccagggcaagtacacgccttccggacaggcaggtgccgccgcttccgaatcgctgttcgtctcaaaccacgcatat

SEQ ID NO: 258142 - DNA, 1092 bp, Artificial Sequence
  derived and/or modified sequence
atgccgtaccagtaccctgctctgactcctgagcagaaaaaggaattgagcgatattgcacacaggatagtggcaccgggcaaaggtattctcgcagcggacgaaagtactgggtcgattgctaagcgccttcagtccattggtacggaaaacaccgaggaaaacaggcgcttttacaggcagctcctgctgaccgcagacgatagagtgaacccatgtatcggaggagtgattctcttccatgaaactctgtatcaaaaggcggatgacggtcgtccttttcctcaagtgatcaaatccaagggcggagtcgtgggaatcaaggtggataaaggtgttgtgcccttggcagggactaacggagagactacgactcaagggctcgatggcctctccgaacggtgtgcacagtacaagaaggatggggcggattttgcaaagtggcgttgtgtactgaaaataggagagcatacgccaagcgcgctggccatcatggaaaacgccaacgtgttggccagatacgcatcgatatgccaacaaaacggcattgttccaattgttgaacctgagattttgccagatggtgaccacgaccttaagcggtgtcaatacgtcaccgaaaaggtgcttgcagctgtgtacaaggccctttccgaccatcacatctatctggagggcacccttctcaaacccaatatggtgactcctgggcatgcatgcacccagaagttcagccatgaggaaatagcaatggcaaccgtcactgcactcagaagaaccgtgccacccgcggtaactggaatcacttttctcagcggaggacaaagtgaagaagaggcttcgattaatcttaacgcaatcaataagtgccctttgttgaagccatgggcactgaccttctcctacggaagagcccttcaagcctcggcacttaaagcctggggtggcaagaaggaaaatcttaaagcagcacaagaggaatacgtcaagagggcccttgcgaattcacttgcatgtcagggtaagtataccccatcagggcaagcaggtgccgcagcttcggaatcactctttgtgtcgaaccatgcctac

SEQ ID NO: 258143 - DNA, 1092 bp, Artificial Sequence
  derived and/or modified sequence
atgccataccagtacccggcgctgacacctgagcagaagaaggagttgtccgacatagcacaccgcatagtggctccaggtaaaggaatcctcgccgcagatgaatctaccggctcaatcgctaagagactgcagagtataggaacagagaacaccgaagagaacaggagattctataggcagctgctcctgactgcagatgacagagtcaatccttgtataggaggtgtgatcctcttccacgagaccctgtaccaaaaagccgacgacggaagacctttcccacaagtgatcaagagtaagggtggagtggtcggcatcaaggtggacaagggagtagtcccactcgccggcaccaacggcgagaccaccacacagggcctggacggcctgtcagaaaggtgcgcgcagtacaagaaagatggagctgacttcgcaaaatggaggtgcgtgctgaaaattggagagcacactcctagcgcattggcaataatggagaatgctaatgtcctggcgaggtacgcgagcatatgccagcaaaacggtattgtgccaattgtggagccggaaattttgcctgacggcgaccatgacttgaaacgctgccagtatgtcactgagaaagtgctggcagctgtgtacaaggcactgtccgaccaccacatctacttggaaggaactctgctgaaacccaatatggtcacgccaggacatgcatgtacgcagaagttctcccatgaggaaatcgctatggccactgtcacagccctgcgccgcactgtccctcccgcggttactggtattaccttcctgtctggcggtcagtccgaagaggaggcgagcataaatctgaatgcgatcaataagtgccctcttctgaaaccatgggctcttactttctcatacggtagggctctccaagcaagtgccctgaaggcatggggtggcaagaaggagaacctgaaggcagcgcaagaagagtacgtgaaacgcgctctggcaaattctctggcgtgccagggcaagtatacgccatctggccaggcaggcgctgcagcttctgaatctctctttgtctccaaccatgcatac

SEQ ID NO: 258144 - DNA, 1092 bp, Artificial Sequence
  derived and/or modified sequence
atgccgtaccaatatccagcccttacccctgaacagaaaaaagagctttctgacattgcacaccgcattgtggcacccgggaaggggattctggccgctgacgaatcaacaggtagcatagcgaaaaggctccagagtattggaactgagaataccgaagaaaaccggagattttatcggcaactcctgttaaccgctgacgatagagtaaacccatgcattggcggcgtaatcctctttcatgaaactctgtatcagaaggctgatgacggccgtccgtttccccaggtgatcaaatctaagggcggcgtggtcggcatcaaagtggataagggcgtggtgccactcgccgggacaaatggggaaaccactacccaaggattggacggtctttctgagcgctgcgctcagtacaagaaagacggcgctgacttcgcaaagtggagatgcgtgctcaaaattggagagcatacaccatctgcactggcaatcatggaaaacgctaatgtcttggctcggtacgccagtatatgccaacagaacggaatcgtgccgatcgtcgagcccgaaatcctgcctgacggcgaccatgatctcaagcgatgccagtatgtgaccgagaaggtgctggctgcagtgtacaaggcactttcagaccaccacatctaccttgagggcacgctcctaaagcccaacatggtgacacctggacacgcgtgtacacagaagttctctcacgaagaaatcgctatggccacagtgaccgcactgagaaggacggtacctcctgcggttaccggcataaccttcctgagcggaggccaaagcgaagaagaagctagcatcaacctgaacgcaatcaacaaatgtccactgttgaaaccgtgggccttaacattttcctatgggcgcgccctgcaggctagcgctctgaaagcctggggcggaaaaaaggaaaacctcaaggccgctcaagaggaatacgtgaaacgcgctctggccaatagcctggcttgtcagggaaagtataccccttctggacaggctggggccgccgcttcggaaagccttttcgtgtcaaaccatgcctat

SEQ ID NO: 258145 - DNA, 1092 bp, Artificial Sequence
  derived and/or modified sequence
atgccatatcagtatcccgcgttgacaccggagcagaagaaagaactgtctgatatagcacaccgcatcgtggccccgggcaaagggattcttgctgccgacgagtctacagggagtattgcgaagaggctgcaatctatcggcactgagaacacagaagagaataggcggttttatagacagctcctgttgactgctgatgatagagtcaacccatgcattggcggcgtcatccttttccacgaaaccctttaccagaaggctgacgatggccgaccattcccccaagtaataaaatccaaaggcggggtagtcggcattaaggtggataaaggggttgttcccttggctggcacaaatggagagacaactacacaaggtctggatggcctgagtgagcggtgtgcccagtacaaaaaggatggggcagatttcgcaaagtggaggtgtgtcctcaaaatcggagagcatacaccgagcgccctggctatcatggagaacgccaacgtcctggctaggtatgcctcaatttgccagcagaatggtattgtaccaatcgtggagccggagattttgcccgacggcgaccacgacctgaaaagatgtcagtacgttactgaaaaggtgctcgctgctgtttataaagccttgagcgatcatcacatatacctcgaaggcacccttctgaagccgaatatggtgacgcctggccatgcatgtactcaaaaattcagccacgaggagatcgccatggcgactgtgaccgcactgaggagaaccgtgccacccgctgtgactggaatcacgttcttgtccggcgggcagtctgaggaggaagcgtctatcaatctgaatgccattaataagtgccctctgctgaagccctgggctctgacattcagctacggcagggctttgcaggccagcgccttgaaggcctggggcgggaagaaagaaaacctgaaggcagcccaggaagaatatgtgaaaagagctctggctaattcactggcttgtcaggggaaatacaccccatctggacaggcaggtgccgccgcctccgagtctctgttcgttagtaatcacgcatat

SEQ ID NO: 258146 - DNA, 1092 bp, Artificial Sequence
  derived and/or modified sequence
atgccttaccagtaccctgcccttaccccggagcaaaagaaggagctgtccgacatcgcacatcggatcgtcgcaccgggaaagggtatcctggcggcggatgagagcactggctctatcgcgaagcgcctccaatccattggcaccgagaacactgaggaaaaccggcggttctacagacaattgctgctgacggccgacgaccgcgtcaatccctgtatcggcggagtcatcctcttccatgagacgctttaccagaaagccgatgacggaaggccgtttccgcaagtgattaagagcaagggaggcgtggtcggcatcaaggtggataaaggtgtcgtgcctctcgccggaacgaatggcgaaactactacccagggacttgacggactgtccgaacggtgcgcccaatacaagaaagatggggcagacttcgcaaagtggcggtgcgtgctgaaaattggcgagcataccccgtccgcgctggcaattatggaaaatgccaacgtgctggccagatacgcatccatctgccaacaaaacggaatcgtccccatcgttgagcccgaaatcttgccggatggagatcacgatctgaaaagatgccagtacgtgactgaaaaagtgctggccgccgtgtacaaggccctctcggaccaccacatttatctggagggaactctcttgaagcctaacatggtgactccgggacacgcatgtactcaaaagttctctcacgaagaaattgccatggccactgtcacggcgctccgcagaaccgtgccacctgccgtgacgggaatcacttttctttccggcggccagtcagaagaagaggccagcattaacttgaacgcgatcaataagtgcccgctgctcaaaccatgggcccttaccttctcctatggtcgggctctgcaggcgtccgccctcaaggcctggggcggaaagaaggaaaacctgaaggcggcccaggaggagtacgtgaagagagccctggccaactcgctggcttgccagggaaaatacaccccgtcgggacaagcgggcgcagccgcaagcgaatcgctgtttgtgtcaaaccacgcctat

SEQ ID NO: 258147 - DNA, 1092 bp, Artificial Sequence
  derived and/or modified sequence
atgccctaccagtaccctgctctgaccccggaacagaaaaaggagctgtcagacatagcccatcgcatagttgcccctggaaagggcatcttggccgccgacgagtctacaggcagcatcgccaaaaggctgcagtctatcggcacagagaatactgaagaaaataggaggttttacaggcaacttctccttacagccgacgacagggtgaatccgtgtatcggaggggtaatcttatttcatgaaaccctgtaccagaaagccgatgacggacgcccttttccccaggtgatcaagtctaagggcggcgtggtcggcattaaagtggataaaggagtggtgccactcgccgggacaaacggagagacaaccactcaaggcctcgacgggttgtctgagaggtgtgcgcagtataaaaaagatggcgccgactttgcaaaatggcggtgcgtgttgaagattggcgaacacacaccgtcagctctggccattatggaaaatgccaacgtgcttgcccgctatgcctccatttgccaacagaatgggatcgtccccattgtcgaacccgaaatcctgcctgacggcgaccacgatctgaaacgctgtcaatatgtgacggaaaaagtgctggccgcggtttacaaagcactctcagaccaccacatctacctcgaagggaccctgctgaaacccaacatggtcactccagggcacgcgtgcacccagaagttttctcatgaggagatcgcgatggccaccgttaccgccctcagacggacagtcccccccgctgtcacaggcatcacctttttgagtggggggcagtccgaagaagaggccagcatcaatttaaacgccattaataagtgcccactcctcaaaccttgggcgttaaccttttcctatggccgagccttgcaggcgtccgctctgaaggcttggggcggcaagaaggaaaacctgaaagctgcgcaggaagagtacgtgaagcgcgcgctggctaactctctcgcatgccagggtaagtatactccatccggccaggccggagccgctgcctccgagtcactgtttgtgtctaatcatgcctat

SEQ ID NO: 258148 - DNA, 1092 bp, Artificial Sequence
  derived and/or modified sequence
atgccctaccagtatccagccttaacacccgaacagaaaaaggaactttccgatatcgcccatcgcattgttgcccctgggaaaggaatactcgcagccgatgaatctacaggatcaatcgccaaacggctgcagtctataggaacagaaaatactgaagagaaccgccgattctaccggcagctgttactgacagccgatgacagagtcaacccatgcatcgggggagtgatattatttcatgaaactctctatcagaaggcagatgatgggcggccctttcctcaggtgatcaaaagtaaagggggagtggtagggattaaagtagataaaggagtggtgccactcgccgggacaaatggagagactacaactcaggggttagatgggctatcggaacgatgtgcgcaatataagaaagacggagccgatttcgcgaaatggcggtgtgttcttaagataggggaacatacaccaagtgctttggccatcatggaaaacgccaacgtactcgcgcgatatgcttctatttgtcagcagaacgggatcgtcccaattgtggaacccgaaatcttaccagatggagatcacgatctcaaaagatgtcagtacgtgactgaaaaagtcttagccgctgtgtataaagccctctccgatcatcatatctatctcgaaggaacactactaaaaccaaatatggtgactcccggacatgcatgcacacagaaattctctcacgaagaaatagctatggctactgtaacagcccttaggcggacagtgcccccggccgtgacgggaatcacatttctgtctggagggcagtccgaagaagaagcctcaattaacttaaatgccataaataaatgtcctctcttgaaaccatgggccttaactttctcatatggacgggccctgcaggcaagtgcactgaaagcctggggggggaaaaaagaaaacctaaaagccgcccaggaagaatatgttaaaagagcccttgctaacagtctggcctgccaggggaaatatactccctctggacaggcaggagctgcagcctcagaaagtctctttgtatccaaccacgcgtat

SEQ ID NO: 258149 - DNA, 1092 bp, Artificial Sequence
  derived and/or modified sequence
atgccataccaataccccgcacttactcctgaacagaagaaggagctgtcggacatcgcccatcgcatcgtcgcacctggaaagggtatactcgcagctgatgagtccacgggatccattgcaaaaagacttcaatccattggcaccgaaaataccgaagaaaacagaaggttctatcgacagctgctcctgactgcagatgacagagtgaacccatgtattggcggagtgattctttttcatgaaactctttaccaaaaggctgacgacggccgcccgttcccacaggtgataaagagcaaaggaggtgtcgtggggattaaagtggataagggtgtagtgcctctcgcaggcactaacggcgaaaccacgacccaggggctggatggtctttcagaaaggtgcgctcagtataagaaggatggcgccgattttgccaagtggcgctgcgtcctcaaaattggtgaacacactccttccgcgcttgctattatggaaaacgcaaatgtcctggcaagatacgcctcgatttgtcagcaaaatggaatcgtgccaatagtggaacccgagattcttccggacggcgatcatgacctgaaacgatgtcagtacgtgaccgaaaaagtgcttgccgcagtctacaaggccctcagcgatcatcacatttaccttgaaggaaccctccttaaaccgaacatggtgactcctggacacgcctgcacccaaaagttttcccatgaggagattgcaatggcgaccgtcacggcccttaggcgtactgtgcctccggcagtgacgggtattaccttcctctcaggcggccaatcagaagaagaggcatcgattaacctcaacgcaataaacaagtgtcctctcctgaaaccttgggcgcttacgtttagctacgggcgagcactccaagcatcggccttgaaagcgtggggtggaaagaaagagaatctgaaggcggcacaagaagaatacgtcaagcgtgcacttgcaaactcacttgcatgccaggggaaatacacgccctcgggacaagcaggagctgcagcctctgagagcctttttgtcagcaaccatgcatat

SEQ ID NO: 258150 - DNA, 1092 bp, Artificial Sequence
  derived and/or modified sequence
atgccgtaccagtaccccgcactgactccagagcaaaagaaggaacttagcgacatcgcacatagaattgtggcccccggaaaaggaatacttgcggcagatgaatcgaccggatccattgcaaagcgcctgcaatccatcggcaccgagaatactgaagaaaacagacgcttctaccggcagctcctcttgactgcagatgatcgagtgaatccttgcatcggtggagttatcctgtttcacgagactctgtatcaaaaagcagacgacggtagacctttccctcaggtgatcaagagtaagggcggagtggtgggaatcaaggtcgataagggtgtggtgccactggccggcactaacggagaaactacgacccagggtttggatggcctgtcagaaaggtgtgcccagtacaagaaagatggtgcggattttgcaaagtggcgctgcgtgctcaagatcggtgagcatacccccagcgcccttgcaattatggagaacgcaaacgtccttgcaagatatgcgtcgatatgccaacaaaatggaattgtccctattgtggagcctgaaattctgcctgatggggatcatgatcttaagcggtgccaatacgtgacggaaaaggtcctggccgctgtgtataaggcgttgtcggaccatcacatatatcttgaaggaaccttgctgaagcccaacatggtgacccctggtcatgcttgcacccaaaagttttcgcacgaggaaattgcaatggcgaccgtgactgcacttagaaggaccgtccctcccgccgttacgggtatcacctttctctctggaggacaaagcgaggaagaagcctcgattaacttgaatgccataaacaaatgccccttgctgaaaccatgggcactgactttttcgtacggtagggcacttcaggccagcgcactgaaggcatggggtggaaaaaaggagaatttgaaggcggctcaagaagaatatgtgaagcgggctcttgcaaactcactggcatgtcagggtaaatacaccccgtcagggcaagcgggcgcagcagcatccgagtcactcttcgtctccaaccatgcgtac

SEQ ID NO: 258151 - DNA, 1092 bp, Artificial Sequence
  derived and/or modified sequence
atgccgtaccaatacccggcactgactcccgaacaaaagaaggagctgtcggatatcgcacatcggatcgtggcacctggtaaaggtattctggcggctgatgagtccactgggagcattgccaaacgccttcagtccattggaaccgaaaacactgaggaaaaccgtcgtttctatcgccaacttctcctgaccgccgatgatagagtgaatccatgtatcggaggtgtgatcctcttccacgaaaccctgtaccagaaggcagatgatgggcgccctttcccccaggtgattaagtccaagggtggagtggtgggcataaaggtggataagggtgtggtccccctggcaggaactaacggagagactaccacccaaggactggacggactttccgaacgatgtgcacaatacaagaaagacggtgcagactttgcaaaatggagatgtgtgctgaagattggagaacataccccctctgcacttgcaattatggaaaacgcaaatgtgttggcccggtacgcctctatttgtcagcaaaacggcatcgtccctattgtcgagcctgaaatccttcctgacggcgatcacgacctcaaacgctgccaatacgtcacggaaaaggtgcttgccgccgtgtacaaggcactgtctgaccatcacatataccttgaaggtaccctgttgaagccaaatatggttactccagggcatgcatgtacgcaaaagttttcacatgaagaaatcgcaatggcaaccgtgaccgcgctccgccggaccgtgcctccagcagtcaccggtatcaccttcctttcgggaggtcagtcggaagaagaagcctcaatcaatttgaacgccatcaataagtgccctcttctgaagccatgggctctgactttttcatacggaagggcactgcaggcatcggcactgaaagcatggggcggaaagaaggaaaaccttaaggccgcacaggaggaatacgtcaagcgggcgcttgccaactcacttgcctgtcagggcaagtacactccgtccggccaagctggagccgcagcatcggaatccctgttcgtgtcaaaccatgcatac

SEQ ID NO: 258152 - DNA, 1092 bp, Artificial Sequence
  derived and/or modified sequence
atgccctatcagtatccggcgctgacgcccgagcagaagaaagaactgagtgatatcgctcacagaattgttgctccaggcaaaggaattctagccgcagacgaatcaaccggctcaatcgccaagaggctccagtccatcggaacagagaacacagaagagaaccgccggttctatcggcagctgttactgacggccgatgatagagtgaatccatgcatcggaggcgtaatcctttttcacgaaacattgtatcagaaagccgacgatggtcggcccttcccccaggtgattaagagcaaagggggggtagtgggcatcaaagtggataagggcgtggtgcccctggccggaaccaacggtgagactacaacccaagggttggatggtctgtctgagaggtgcgcacaatataaaaaagacggtgccgatttcgcgaagtggcgctgtgtgctgaagatcggagaacacaccccatctgcacttgccattatggagaacgctaatgtgttagcccgatacgcatctatctgtcagcaaaacggcatcgttcccatcgtcgagcctgagatactacccgacggcgatcatgacctgaaacgttgtcagtatgtgacagagaaagtgctggctgcagtctacaaggccctttctgatcatcacatttatttggaaggaactctccttaaaccaaacatggtgacccctgggcatgcctgtacacagaaattctcccatgaagaaattgccatggccaccgtaaccgccttgcggagaacagttccgccggcagtaaccggtatcacattcctcagtggagggcaatctgaggaagaggctagtatcaacctaaatgctataaataagtgtcccctgttgaagccgtgggcactgaccttcagttatgggcgagcactgcaagcttccgccttaaaagcttggggcgggaagaaggagaatcttaaggctgctcaggaagagtatgtcaagcgagcgctggccaactcgttggcgtgccagggaaaatacacaccctcagggcaagctggggctgcagcatctgaatcccttttcgtgtctaatcatgcttat

SEQ ID NO: 258153 - DNA, 1092 bp, Artificial Sequence
  derived and/or modified sequence
atgccttatcagtacccagcactgacaccagaacaaaaaaaagaactgagtgacatagcccacagaatcgtagcaccagggaagggtatcctggccgccgatgaaagcacaggctccatagccaaaaggctgcagtctattggaactgaaaacacagaggaaaaccgacgtttctataggcagctcctgttgaccgcagacgatcgagtcaatccatgcatcggaggtgtgatcctttttcatgagacactgtaccaaaaggctgacgacgggaggcctttccctcaagtgatcaagagcaaagggggcgtagtgggaataaaggtggataaaggagtagtgcctttagcggggacaaatggcgagacgaccactcagggactggatgggctcagtgagcgctgtgctcagtataagaaggatggagccgatttcgccaagtggagatgcgtgctgaaaatcggagagcacacaccttcggctctagccataatggagaacgctaacgtcctggcgcgatacgccagtatctgtcagcagaacgggattgttcccattgtagaaccggaaattttgcctgatggggatcacgacttaaagcgctgccagtatgtgacagaaaaggtgttggcagcagtttacaaggcactaagtgatcaccatatctaccttgagggaaccctccttaagcccaacatggtgactcctggacacgcgtgtacccagaagttctcacacgaagaaattgccatggccactgtgaccgcacttagacggaccgtgccacccgctgtgactggcatcaccttcctgtcaggcgggcagtctgaagaagaggcctcaataaatctgaatgccataaacaagtgtcccctcctcaagccttgggccctgaccttctcttacggtagggcactgcaggctagtgcacttaaggcctggggaggtaagaaagagaatctaaaggccgcccaggaggagtacgtgaaaagggccctagctaactctctggcctgtcagggaaagtacactccctcagggcaggcaggcgcggcagcctcagagagtctttttgtctctaatcacgcttac

SEQ ID NO: 258154 - DNA, 1092 bp, Artificial Sequence
  derived and/or modified sequence
atgccctatcagtatcccgcactgacaccagaacaaaaaaaggaactgagcgatatcgcacatcggattgtggccccaggtaaggggatcttggcggccgacgagagtaccgggtctattgccaagcggcttcaaagcataggcacagagaatacggaggagaaccgaagattctaccgccagctgctacttaccgcagatgaccgggtgaacccctgcatcggaggcgtgatcctctttcacgagaccctgtaccaaaaagccgatgatggtaggccctttccgcaggtgataaagagtaagggaggagtggtgggaataaaggtggacaagggggtcgttcctctggcaggcacaaacggtgaaactacaacacaagggctggatgggttgagcgaaagatgcgcccaatataagaaggacggcgctgattttgccaagtggaggtgtgtactgaaaatcggcgaacataccccttctgccttggcaatcatggagaatgctaacgttctggcgcgttacgcttcaatatgtcagcagaatgggattgttccgattgtggagccggaaattttgcccgacggcgatcacgatctgaaacggtgccagtacgtgacagaaaaggtgctggccgccgtctataaggccctgtctgatcatcatatctatctggaaggaaccttgctgaaacctaacatggtcacccccggccacgcttgcacccaaaagtttagccatgaagaaattgcgatggcaaccgtaaccgccctgaggcggaccgtgcctcccgcagtaacaggaatcaccttcctgagcggggggcagtctgaagaggaggcctcaatcaatctaaatgctataaataagtgtcccttgctgaaaccctgggcccttaccttttcgtacggaagagctcttcaggcctcagcccttaaagcatggggtgggaaaaaggagaatttgaaagcggcccaggaggagtatgtgaagcgtgctctagctaactcactcgcctgtcagggcaaatatacaccatcagggcaagctggggccgccgctagtgaatctctgtttgtgtccaaccatgcttat

SEQ ID NO: 258155 - DNA, 1092 bp, Artificial Sequence
  derived and/or modified sequence
atgccttaccagtaccctgccctgacgcctgaacaaaagaaggaactgtctgacatagcgcatcgtatagtagctcccggcaaaggaatcctcgcggccgacgagtcaaccggctctattgcaaagcgactccagagcatcggcacggagaatactgaggagaaccggcggttttatagacagctcctgctgaccgcagacgaccgcgtgaatccgtgcattggaggtgtgattctttttcacgagactttgtaccagaaggcggatgatggtcgtccattccctcaggttatcaagtctaagggaggtgtagttggaataaaggttgacaaaggagtggtgccgttagctggtacaaacggcgaaaccactactcaaggccttgacgggctgagcgaacgctgtgcccagtataagaaagatggcgccgacttcgcgaagtggcgctgtgtgcttaaaataggggaacatacaccctccgcactcgccattatggagaacgccaacgtgttagcccgttacgcttcgatctgccagcagaatggtatcgtgcctatcgtggagcctgagattctcccggatggggaccacgacctgaagcggtgtcagtacgtgacagaaaaggttctggctgcagtgtacaaggccctctcggaccatcacatctatctggaagggaccctactgaaacccaacatggtgacgcccggccacgcctgcacccagaaattttcacacgaggaaatcgccatggctactgtgacggcattaagaaggactgtccctcccgctgtcactgggattaccttcctgtcggggggtcaatctgaggaggaggcctccatcaatctgaacgccatcaataagtgccccttattaaaaccctgggcgctaaccttctcgtacggcagagcactccaagcttctgcactgaaggcttggggtggcaaaaaggagaacctaaaggccgctcaggaggaatatgtgaagagagcactggccaattcactggcctgtcaagggaagtacaccccttccgggcaggcaggtgccgctgcctccgagtctctgttcgtgtcaaatcacgcctat

SEQ ID NO: 258156 - DNA, 1092 bp, Artificial Sequence
  derived and/or modified sequence
atgccttaccagtaccctgcactgactcctgagcagaaaaaggaactctccgacatcgcgcaccgcatcgtggcaccgggaaagggcatcttggcggcggatgagtccactgggtccatcgcaaagcggttgcagtccatcggtaccgagaacaccgaagaaaacagacggttctaccgccaactgcttctgaccgccgatgatcgcgtcaatccttgcatcggaggagtcatcctgttccatgaaaccctgtaccagaaggcggacgatggccggccgtttcctcaggtgatcaaatccaaagggggcgtggtggggatcaaagtcgataaaggtgtcgtgccgctggctggaaccaatggagaaaccactacccagggtctggacggactctcagagcgctgcgctcagtacaaaaaggacggcgctgatttcgccaaatggcgctgtgtgctcaagatcggagaacacacgccatcggccctggctatcatggagaatgctaacgtcctcgctcgctacgcttcaatctgccaacagaacggaatcgtgccaatcgtcgagccggaaatcctgccggatggcgaccacgatctgaaacggtgtcaatacgtcaccgaaaaagtgctcgctgccgtgtacaaggcactgagcgaccatcacatctacctggagggtactctgctgaagccaaatatggtgacgccgggacacgcctgcactcagaagttctcccacgaagaaatcgccatggcaactgtgactgccctcagacgcaccgtgccgcccgcagtgaccgggatcacctttctgtcgggaggacaatcggaagaagaagcctccatcaatctcaacgcgatcaacaagtgcccgctgcttaagccatgggccctgactttctcctacggaagagcgctgcaggcttcggcgctgaaagcatggggtggtaagaaggaaaacctcaaggccgcgcaggaagagtacgtgaagagagcccttgctaatagccttgcttgccaagggaagtacactccttcggggcaagctggagcggctgcgagcgagtccttgttcgtgagcaaccacgcatat

SEQ ID NO: 258157 - DNA, 1092 bp, Artificial Sequence
  derived and/or modified sequence
atgccataccaataccctgccctgacccctgaacagaagaaggaactgtcagatatcgcacaccgcattgtggcaccggggaaaggtattctggctgcggatgaatcgactggaagcattgccaaacggcttcagagcatcggcactgagaacaccgaagaaaatcgcagattctaccggcagctcctgcttaccgcggacgatagagtcaatccgtgtattggcggcgtgatcttgttccatgaaaccctttaccagaaggccgatgatggtcggcctttcccgcaggtgatcaagagcaaaggaggagtggtgggcatcaaggtggacaaaggtgtggtgccgctcgcgggaactaacggagaaaccaccactcagggtctggatggcctgtcggagcgctgcgctcaatacaagaaggatggagcggacttcgccaagtggagatgcgtgttgaaaatcggagagcacaccccatcagcgctcgccatcatggagaacgcaaacgtgctggctagatatgcctcgatctgccaacaaaacggcatcgtgccaatcgtggaacccgaaattctgccggatggtgaccatgacctgaaaaggtgccagtacgtcactgagaaggtcctggcagccgtctacaaggccctcagcgatcaccacatctatctggagggcactctgctcaagcccaacatggtgactccgggacatgcttgtactcaaaagttcagtcacgaagaaatcgctatggccactgtcactgccctgaggcgcacggtgccgccggccgtgactgggatcactttcctgtcaggaggacagtctgaggaggaggcttccatcaatcttaacgcgataaacaaatgcccgttgctcaaaccgtgggctctgactttttcgtacggccgcgccttgcaggcgagcgcacttaaggcgtggggaggaaagaaggagaacctgaaagcggcacaggaagagtacgttaaacgcgccctggctaactcattggcgtgccaaggaaagtacaccccgtcgggtcaggcgggagcggcggcctcggagtcgctgttcgtgtccaaccacgcctac

SEQ ID NO: 258158 - DNA, 1092 bp, Artificial Sequence
  derived and/or modified sequence
atgccgtaccagtatccagctttgacacccgagcagaaaaaggagctttccgatattgctcacagaatcgttgccccaggtaaggggattctggcagccgacgagagcaccggttcaattgctaagcgcctgcaatctataggcacggagaatacagaggagaacagacgcttctacaggcagttgctgctcacggcggatgatcgcgttaacccgtgtatcggcggggtgatcctgtttcatgagactctgtaccagaaggccgacgacgggcggccgtttccgcaggtgatcaaatcaaagggcggggtggtcgggatcaaggtggacaaaggcgtggtacctctggctggtacaaatggcgagactactacacagggcctggacggattgtcagagcgctgtgctcaatataaaaaggatggggctgacttcgccaagtggcgctgtgtcctcaagataggagagcacaccccaagtgctctggctatcatggaaaacgccaatgtactcgctagatatgcttctatttgtcagcagaatgggatcgttcccatcgtcgaacccgagatccttcccgatggagaccatgacctgaagaggtgccagtacgtgaccgagaaggtcttggccgcggtgtataaggcgcttagcgatcaccacatctatctggagggaacactccttaaaccaaatatggtcactccgggccacgcatgcactcagaagttcagccacgaagaaatcgctatggccactgttaccgcactgcgtcgtaccgttccgcctgccgtgacaggtatcacctttctgagtgggggccagagcgaagaggaggctagcattaacttaaatgcaatcaacaagtgcccactactgaaaccctgggccttgactttttcatacgggcgtgcgcttcaggctagcgccttaaaggcctggggaggtaaaaaggaaaacctgaaggctgctcaggaggaatatgtgaagcgcgcactggccaattcgttggcatgccagggcaaatatactcccagcggtcaagcaggtgctgcagccagtgaaagcctattcgtttccaaccacgcctat

SEQ ID NO: 258159 - DNA, 1092 bp, Artificial Sequence
  derived and/or modified sequence
atgccataccaatatcccgccctgacgcctgaacagaagaaggaactttctgacattgctcaccgcatagtcgcgccaggaaagggcatccttgccgccgatgaatccacaggtagtatcgcaaagcggctgcagtcaatcgggacagaaaacacagaggagaaccggagattctacaggcaactgctgctgaccgcggatgaccgggtcaatccctgcatcggcggcgtgatactgtttcacgagaccctctatcaaaaagcagacgatggccgaccctttccacaggtaattaaatccaagggcggggtggtggggatcaaggttgataaaggtgtcgtgcctctggctgggaccaacggggagacaacaacccagggcctcgacgggctgtccgagcgctgcgctcagtataaaaaagacggtgccgacttcgcaaagtggcggtgtgtcctgaaaatcggcgagcacacgccctcagctctggccatcatggaaaacgcgaacgtgctggcccggtatgcatctatatgccagcagaacggcatagtgcccatcgtagaaccagaaatacttcccgatggagatcacgatctgaaaaggtgtcaatacgtgactgaaaaggtcctcgctgccgtctacaaggcactgagtgaccaccatatctatttggaaggaaccctcctcaaacccaatatggttaccccaggccacgcatgtacgcagaagttctctcatgaagagatcgcgatggcaacagtgacagcgttgagaagaactgtgccccccgcagttaccggcatcacctttctctccggagggcaaagtgaagaggaggccagcatcaacttgaatgcaataaacaaatgtccccttctgaagccttgggcactcaccttctcctacgggagagccctgcaggccagcgccctgaaggcgtggggaggcaaaaaggagaaccttaaggctgcccaggaagagtacgtgaagcgagcacttgctaatagtttggcttgtcaggggaaatacacaccaagtggccaggccggagctgctgcttccgagtctctttttgtgtcaaaccatgcctat

SEQ ID NO: 258160 - DNA, 1092 bp, Artificial Sequence
  derived and/or modified sequence
atgccataccaataccctgcgctgacgccggagcagaagaaggaactgtcagatatagcgcacagaattgtggcaccaggaaaagggattctcgccgcagatgaatcgaccgggtccattgccaaacgtctgcaatcgatcggtaccgaaaacaccgaagagaacaggaggttctaccgccagcttcttctcactgcagacgaccgggtcaacccctgcattgggggagtgatcctgtttcacgaaaccctttaccaaaaggcagatgatggcagacctttcccacaagtgattaagtcaaagggtggcgtggtgggcattaaagtggataagggcgtggtgcctctcgccggaacgaatggtgagactactacccaagggctcgatggcctctcggagcgctgtgcacaatacaaaaaggacggagcagattttgccaaatggagatgcgtgcttaagatcggcgaacataccccatcagccctcgcaataatggaaaacgcaaacgtgctggcaagatacgcgtccatctgtcagcagaatggtatagtgcccatcgtggaaccggagattctcccggacggtgatcatgatcttaaaagatgccagtacgtcactgaaaaggtgttggcagccgtctacaaggcgttgtccgaccatcacatatacttggaaggaacccttctgaagccaaacatggttaccccgggtcatgcgtgtacccaaaagttttcgcacgaggagatagccatggccacggtgaccgcgctcagacgaaccgtcccacctgccgtcaccggaatcactttcctgagcggcggccagtcggaggaagaggcaagtatcaacctgaatgcaatcaataagtgtccgcttcttaagccatgggcactcactttttcctacggaagagcgttgcaagcatcggctcttaaagcatggggcggaaagaaggaaaaccttaaggcggcacaggaagaatacgtgaagagagccctcgcaaattcactcgcctgtcagggaaagtacacgccttccggccaagcgggtgcagccgctagcgaatcactcttcgtgtccaaccatgcatac

SEQ ID NO: 258161 - DNA, 1092 bp, Artificial Sequence
  derived and/or modified sequence
atgccgtaccagtaccccgcgcttactcctgaacaaaagaaggagctctcggatatcgcccatcggattgtcgccccgggcaagggaattctcgcggcagatgagtcaaccggaagcattgccaaacggctccagtcaatcggcaccgaaaataccgaggaaaatcggaggttttatcgccaactgctgttgaccgctgacgatcgggtgaacccatgcatcggaggtgtgatcctgttccacgagacgctgtaccagaaagccgatgacggtcgcccattcccgcaagtcattaagtcaaagggaggcgtggttggaatcaaggttgacaaaggagtggtgccgcttgctggcaccaatggtgaaactaccactcagggattggatggactctccgaacggtgcgcgcaatacaagaaagacggtgcagacttcgcaaagtggcgctgcgtgctgaagatcggcgagcacaccccctcggcactggcaattatggaaaacgcgaacgtgctggcacgttacgccagcatctgccagcagaacggaattgtcccgatcgtggaaccggaaatcttgccggatggagatcacgacctcaagcggtgccagtacgtgaccgagaaagtgctggcagccgtctacaaagctctgtcggaccaccacatctacttggagggtaccttgctcaagccgaacatggtgactccgggacatgcgtgcacccaaaagttctcgcacgaggaaatcgctatggccaccgtgactgcgctgagaaggacggtcccgcctgcggtgaccggtatcactttcctttcagggggccagtcagaggaggaagcatccatcaatctgaatgcaatcaacaaatgccccctcctcaagccatgggccctgaccttttcttacggaagggcgcttcaggccagcgccttgaaagcgtggggaggaaagaaggaaaatctgaaagccgcacaagaagaatacgtgaaacgcgccctggccaactctctggcttgtcagggaaagtacaccccatccgggcaggctggtgcagctgcttccgagtcattgtttgtctctaaccatgcatac

SEQ ID NO: 258162 - DNA, 1092 bp, Artificial Sequence
  derived and/or modified sequence
atgccatatcaatatccagcacttactcctgaacaaaagaaagaattaagtgatattgcacatcgtattgttgcacctggaaagggaattttggcagctgatgaatctactggatctattgcaaaaagattacaatcaattggaactgaaaatactgaagaaaatagaaggttttatcgacaacttcttttgacagcagatgatcgtgttaatccatgtattggaggagttatattattccatgaaactctttatcaaaaggctgatgatggtcgtccatttccacaagttattaaatcaaaaggtggagttgttggaattaaagttgataaaggagttgttccacttgctgggactaatggagaaacaactactcaaggattagatgggttatcagaaagatgtgcacaatataaaaaagatggagcagattttgctaaatggagatgtgttttaaaaattggagaacatacaccatctgctcttgctattatggaaaatgccaatgttcttgctagatatgcttctatttgtcaacaaaatggaattgttcctattgtagaaccagaaattcttcctgatggagatcacgatttaaaacgttgtcagtatgtaacagagaaagtacttgctgcagtatataaggctctttctgaccatcatatttatcttgaaggaactttacttaaaccaaatatggtaactccaggacatgcttgtacacaaaaattcagtcatgaagaaattgcaatggctacagttacagcccttagacgaacagtacctccagctgttacaggtattacattcttgagtggaggacaaagtgaggaagaagcttctataaatttaaatgctataaataaatgtccattacttaaaccatgggcacttactttttcatatggaagagcattacaagcctcggcattaaaagcatggggtggaaagaaggaaaacttaaaagctgcacaagaagaatatgtgaaaagagcattagctaattcattagcatgtcaaggaaaatatacaccttcaggtcaagcaggagcagctgcttctgaatcattatttgtttcaaatcatgcttat

SEQ ID NO: 258163 - DNA, 1092 bp, Artificial Sequence
  derived and/or modified sequence
atgccgtaccaatacccagccctcaccccggaacagaagaaagagctttcagacatcgctcatcgaattgtggcacctggaaagggaatcctggcggccgatgaaagcactggttcgatcgcaaagcgcctgcagtccataggaacggaaaacactgaggagaacagacggttttaccgccagctgctgctcaccgcagatgaccgggtgaacccgtgtatcgggggagtgattctgttccatgaaactctgtaccaaaaggccgacgacggacgccctttcccgcaagtcattaagagcaagggaggtgtcgtgggaatcaaggtggacaagggtgtagtgccactcgccggaaccaacggagaaaccacgacccagggattggatggcctgtcggaacggtgtgcgcagtacaaaaaggacggtgcagacttcgctaaatggcgctgcgtcctgaagatcggtgaacataccccttcggctctggcaatcatggaaaatgccaacgtgctggctagatacgcgtcaatctgccaacagaacggaatcgtcccgatcgtggaacccgaaatcctcccagatggcgatcatgatctcaaacggtgccaatatgtgaccgaaaaagtgctggcagctgtgtacaaagccctgagcgaccatcacatatacctggaggggaccctcctcaaaccgaacatggtaactccagggcacgcttgcacccagaagttttcgcacgaagagatcgcgatggcgactgtcactgcacttaggcgtaccgtcccgcccgctgtgacggggatcaccttcttgtcgggaggccagtcagaagaggaggcctcgattaatctcaatgccatcaataagtgcccactgctgaagccttgggcactgactttctcttacggacgggccctccaagcaagcgcgctcaaggcctggggcggtaagaaggaaaaccttaaggcggctcaggaggaatacgtcaagcgggccctggcgaattcccttgcttgtcaaggaaagtacactccatcgggacaagccggggcagcggcttccgagtccctgttcgtgtccaaccacgcatat

SEQ ID NO: 258164 - DNA, 1092 bp, Artificial Sequence
  derived and/or modified sequence
atgccatatcagtatccagcactgaccccagagcaaaaaaaagagcttagtgatattgcacaccgaattgtggcacccggcaagggcatcctggctgctgacgaaagcactggaagtatcgctaaaaggctccagtcgattggtacagagaatactgaggaaaacaggagattttacaggcaactgctcttgactgctgacgaccgagtaaacccctgcatcggcggcgttatcttattccatgagacgctctaccagaaagccgatgacggacgacccttcccgcaggtcatcaagagtaaggggggagttgtaggtattaaagttgataagggcgtcgtgcccctggccggaacaaacggtgagaccacaacacagggcctggatggcctgtccgaaaggtgtgcgcagtataaaaaggatggcgcggactttgccaaatggcgatgtgttcttaaaataggcgagcacacgccaagcgctctagctattatggagaatgccaatgtacttgccaggtatgcatctatatgtcagcagaatggtatcgttccgatcgtggaacccgaaattcttcctgacggcgaccacgatttaaagcgatgccagtacgttactgagaaggtactggctgctgtgtacaaagcgctgagcgatcaccacatctatctggaaggaacattattgaagccaaatatggtgaccccgggacacgcctgtactcagaagttctcccatgaggagattgcaatggcgaccgtgacagctctgcgacgtaccgttccccccgcagtgactggtataaccttcctcagtggcggacagtccgaggaggaagcttccatcaatctgaatgccattaataagtgtccactcctcaaaccgtgggccctgaccttctcatacggccgcgccctgcaggctagcgccttgaaggcctgggggggcaagaaggaaaacctgaaggctgctcaagaggaatacgtgaaaagggccctggcaaattctctagcctgccagggcaaatacacgcctagcgggcaggcaggggctgccgcctccgagtcactgttcgtgtctaaccacgcctac

SEQ ID NO: 258165 - DNA, 1092 bp, Artificial Sequence
  derived and/or modified sequence
atgccataccagtatccagcgttgacacctgagcagaagaaagagctcagcgatatcgcgcatcgcatcgttgcgccgggtaagggcattctggcagcggacgaatctacaggtagcatagcgaaacgactgcaaagcatcggcacggagaacactgaggagaatagaagattttatcgtcagctgcttttgacagctgatgaccgcgtgaacccgtgcatcggtggtgtgatcctgtttcatgaaaccctgtatcagaaggctgacgacgggcgtccattccctcaggtgattaaaagcaaggggggcgtggtgggtatcaaagtcgataaaggtgtggtccctttggcaggcactaatggcgaaactaccacgcagggactggatggtttgtctgagcgatgtgcgcagtacaagaaagatggtgcggatttcgctaagtggaggtgtgtgctgaagattggagagcacactcctagcgcgcttgcgattatggagaacgcaaacgttctggcacgctacgccagcatttgccagcagaacggtatcgttccgattgtggagccagaaattttgccagacggtgaccacgacctaaagcgctgtcagtatgtcactgagaaggttctagcagcagtctacaaagcgctgagcgatcatcatatctacctggagggcaccctgctgaagcctaatatggtaactccgggccatgcgtgcacccagaaattctctcacgaggagattgccatggcgaccgtcaccgcgctgcgccgcaccgtgcccccggccgtgaccggcatcacctttctgtctgggggccagagcgaggaagaggctagcataaatctgaacgcgatcaacaaatgcccattgttaaagccctgggcattaacattcagctatggtcgcgcactgcaggcttccgcgctgaaggcctggggggggaagaaagaaaatttgaaagcagcccaggaagaatatgtgaagcgcgcgctcgcgaatagcctggcatgtcaaggcaaatatactccgtcgggacaggcgggcgccgctgcctcagagtcactattcgtgtccaatcacgcttac

SEQ ID NO: 258166 - DNA, 1092 bp, Artificial Sequence
  derived and/or modified sequence
atgccttatcagtatcctgccctcacccctgaacaaaagaaagagctgagtgatatagcccatcggatcgttgcccctggtaagggcattctggctgccgacgagagcacgggatctatcgccaagcgactgcagtctatcgggactgagaacactgaggaaaacagaagattctatcgccagcttctcctgactgccgacgatcgcgtcaatccatgcattggcggagtgatccttttccatgaaacactctatcagaaggctgacgacggccgcccatttccacaggtcattaagagcaaaggaggggtggtcggcattaaggtggacaagggcgtcgtgcctttagccggcactaatggtgagacaaccactcagggcctcgacgggctctctgaacggtgtgctcagtacaagaaagacggtgcggacttcgcaaagtggagatgtgtgctgaaaattggcgagcatacgccttccgctctcgccattatggaaaacgccaatgttctggcaagatacgcctccatctgccagcaaaacgggattgtccctatcgtggagccggagatcctgccggacggcgaccatgacctaaagaggtgccaatacgttactgagaaggtacttgcagccgtctacaaagccttgtctgatcaccacatttatctggagggtaccctgctgaagcctaatatggtcaccccagggcatgcctgcacccaaaaattcagccacgaagaaatcgccatggctaccgtgaccgccttaagaaggaccgtgcctccagctgttaccgggataaccttcctgtctggaggccagtccgaggaagaggcgtctatcaatctcaacgccatcaataagtgccccttactgaaaccctgggcactcacattcagctatggaagagctttgcaggcctccgctctgaaagcgtggggaggcaagaaggagaacctgaaggctgctcaggaggagtacgttaagcgtgccctcgccaactcacttgcttgccaaggcaagtacacacctagtggacaggccggagcagcagccagcgaaagtctgttcgtgtctaatcacgcctat

SEQ ID NO: 258167 - DNA, 1092 bp, Artificial Sequence
  derived and/or modified sequence
atgccttatcaatacccggccctgactcctgagcaaaagaaggaactctcagatatcgcgcatagaatcgtcgcccctggcaagggaatcctggcagcagacgagtccactggatcaatcgcaaaacggcttcaaagcatcggtaccgaaaacactgaagagaataggcgcttttatcgccagcttttgctgaccgcagacgatcgggtgaacccctgcatcggcggagttatcctgttccatgagactctttaccaaaaggccgacgacggacgccccttccctcaagtgatcaagagcaaagggggcgtcgtcggaatcaaggtcgacaagggagtggtgcccttggctggtaccaacggagagactactacccaggggctcgacggtttgtcggagcgctgtgcgcagtacaagaaagacggtgccgatttcgctaagtggaggtgtgtgttgaagattggagaacatactccgtctgccctcgccatcatggaaaacgccaatgtgctcgcgcgctacgcctcgatctgtcagcaaaacggcatcgtcccgatcgtggaacctgagattttgccagacggcgaccacgatcttaagagatgccagtacgtgactgagaaggtgctggccgcagtgtacaaggccctgtcagatcaccacatttacttggagggaacccttctcaaaccgaacatggtgacgccggggcatgcgtgtacgcagaagttctcgcacgaagagatcgcgatggcgactgtgaccgcccttcgccgcaccgtcccgccggcagttaccggcattacctttctgagcggaggccagtccgaagaagaagcaagcattaatctcaacgccatcaataagtgcccactgctcaagccgtgggccctcacgttctcatacggccgggcgctgcaggcatccgcactcaaagcatggggtggtaagaaggaaaatctgaaagcagcccaagaggagtacgtgaaacgtgctctcgccaactcactcgcgtgccaaggaaagtacaccccatcggggcaggccggagcagctgcctccgaatctttgtttgtgtccaaccacgcgtac

SEQ ID NO: 258168 - DNA, 1092 bp, Artificial Sequence
  derived and/or modified sequence
atgccgtatcaataccctgctctgactccagaacaaaagaaggaactcagcgacattgcccaccggattgtcgcaccgggaaagggtatcctggcagccgatgagagcacgggttcgatcgcgaaaaggctgcaatccatcgggactgaaaacactgaagaaaaccgcagattctaccgccaactgcttctgaccgctgatgaccgggtgaatccatgtatcggaggagtgatactgtttcacgaaaccctttaccagaaagctgacgacgggcggccatttccgcaggtgatcaagtcgaaaggtggcgtggtgggaatcaaggtggacaaaggggtggtcccgctggcggggaccaacggcgagacgaccactcagggcctcgacggcctgtccgagcggtgcgctcagtataagaaggatggagccgacttcgccaagtggcggtgcgtcttgaagatcggggagcacaccccatcagcgcttgcaatcatggaaaacgccaatgtcctggcaagatacgctagcatctgccagcagaatggtatcgtccctatcgtggaaccggaaattcttcccgatggtgaccacgaccttaagcgttgtcagtacgtgactgaaaaggtgctggctgctgtgtacaaggccttgagcgaccaccatatctaccttgagggcactctcctcaagcccaacatggtgaccccgggacacgcctgcactcagaaattctcacatgaggagatcgccatggccaccgtgactgcgctgagacggactgtgccgcctgctgtgaccggaattaccttcctctcaggaggacagtcagaagaagaagcgtcgattaacttgaatgcgatcaacaagtgtcccctgctcaaaccgtgggccctcaccttctcgtacggccgggcgctgcaagcgtcagccctgaaggcttggggagggaagaaagaaaatctgaaggccgcgcaggaagaatacgtcaagcgggcgctggctaactcgctggcttgccaagggaagtacactcctagcggccaggccggagccgctgcatcggaatcgctcttcgtgagcaaccacgcttat

SEQ ID NO: 258169 - DNA, 1092 bp, Artificial Sequence
  derived and/or modified sequence
atgccgtaccagtacccagccctgacccctgagcagaaaaaagagctgtctgatattgcgcatcggatcgtcgcaccaggaaagggaatcctcgctgcagatgaatcgaccggaagcatagccaagcgattgcaatcaataggtactgagaatacggaagaaaataggcggttctaccggcagctcctgcttaccgcagatgatagagtgaacccatgtataggcggtgtgattctgtttcacgaaaccctgtaccaaaaggcagatgatggacggccttttccacaagtgatcaaatcgaagggtggcgtcgtcggcatcaaggtggacaagggtgttgtgcctctcgcaggaaccaatggggaaactactacccagggactggatgggttgtcggaacggtgcgcacaatacaagaaggatggggccgattttgccaagtggcgatgcgtgcttaagatcggagagcacacgccctccgctctggctattatggaaaatgcaaatgtcctggcgcgttacgcaagcatttgtcaacagaacggaatcgtccctatagtggaaccagaaatccttcccgacggggaccatgatttgaagcgctgccaatacgtaaccgaaaaggtgcttgccgcggtgtacaaggctctttcggaccaccacatatatcttgaggggaccctcttgaagccaaacatggtgacgcccggtcacgcatgtactcaaaagttctcgcatgaggagatcgccatggcaactgtcacggcgctgaggaggactgtcccccctgcagtgactggcatcacgtttctctcaggtggacagtccgaagaggaagcaagcataaatctcaacgctatcaacaagtgtcctcttctgaaaccatgggcacttactttctcctacggccgagctctgcaggcatccgcccttaaggcttggggtggcaagaaagagaacctgaaggcagcacaagaagagtacgtgaagcgtgcactcgcaaactcccttgcatgtcaaggtaaatacaccccctccgggcaagcaggcgccgcagcatctgaatcgctgtttgtgtccaaccacgcctac

SEQ ID NO: 258170 - DNA, 1092 bp, Artificial Sequence
  derived and/or modified sequence
atgccctatcagtatcctgcgttgactcctgaacaaaaaaaagagctgtccgatatcgcacatagaatcgtggcacccggcaaaggaatcctggctgccgacgagtccacgggatcaatcgcgaagcgcctgcagtcgatcggtactgagaatacagaagaaaacagacgcttttaccgtcagctgctgctaaccgctgatgacagagtgaacccgtgcataggtggggtcattctgtttcacgagaccctgtatcaaaaggcagacgacggtcgccccttcccgcaagtgataaagagcaagggaggggtggtaggtatcaaggtggataaaggggtcgtgccccttgccggaaccaatggtgaaactactactcagggtttggacggtctgtcggaacgatgtgcacagtataagaaagatggagccgactttgctaaatggaggtgcgtgctgaagatcggtgaacatacccctagtgccttggccatcatggagaatgcaaacgtgctggcccggtacgcctcgatatgccagcagaacggtattgtacccattgtcgagccggagattttaccggatggggatcatgatttgaagagatgtcaatacgtgaccgagaaggttctggccgccgtctacaaggctctgagcgaccatcacatctacctggagggcacccttctgaagcccaacatggtcacacccggacacgcatgcacccagaaattttctcatgaggaaattgccatggctacggttaccgctctgcgacgaacagtacccccagccgtgaccggaattactttcctgtctggcgggcagtctgaagaagaggcctctatcaacctaaacgctatcaataaatgtccgctacttaagccctgggccctgacattctcctatggaagggctctgcaagcctcggccttgaaggcttggggggggaagaaagagaacctcaaggccgcccaggaagagtatgtcaagcgcgctttagccaattcactggcctgtcaagggaaatacacccctagcggacaggcgggggctgcagcttctgaaagcctgttcgtgagcaaccacgcatac

SEQ ID NO: 258171 - DNA, 1092 bp, Artificial Sequence
  derived and/or modified sequence
atgccctaccagtaccctgccctcacccctgaacagaaaaaagagctctccgatatcgcacacaggattgtggctccaggcaagggcatccttgctgcggacgagtctaccggatccatagctaagagactgcagtcgattggaaccgaaaacaccgaggaaaatagacgtttttaccgtcaattgcttctgaccgcagatgatagagtcaatccatgtatcggaggagtgattctttttcacgaaaccctttaccaaaaggcagatgacggcaggccatttccccaggtgatcaaaagtaaaggaggtgtggtgggaatcaaggtcgataaaggtgtggtgcctcttgcgggaactaacggagaaactactacgcagggtcttgatggtctgtcggagagatgtgcacaatacaagaaggacggcgccgatttcgcaaagtggcgctgtgtgctgaagataggtgaacatactccctccgcactcgcaataatggaaaatgcaaatgtgcttgccagatacgcttccatatgtcagcaaaacggtatagttccgattgtcgagcctgaaattctgcccgatggtgaccacgatctgaagcgatgccaatacgtcactgaaaaggtgcttgcagcagtgtataaagcactctcggaccatcatatctacctcgaaggtaccctgctcaaacctaacatggtgacccctggtcacgcatgcacgcagaagttttcccacgaagaaattgctatggccaccgtgaccgccctgcggcggactgtgcctccagcagtgactggcatcaccttcctgtcaggaggtcaatcggaagaagaagcatccattaatctcaacgcaatcaataagtgtcctctgctgaaaccttgggcactcacttttagctacggtagagcgctgcaggcgtcagcacttaaggcttggggaggcaaaaaagagaaccttaaggccgcccaggaagaatacgtgaagcgagcgctggcgaattccctcgcctgtcaaggaaagtacactccatccggacaagccggagccgcagcatcggagtcgttgttcgtgtccaatcacgcatac

SEQ ID NO: 258172 - DNA, 1092 bp, Artificial Sequence
  derived and/or modified sequence
atgccctatcagtatccagccttgactccagagcagaaaaaggagctctcagacattgctcacaggatagtggcgcctggtaagggtatcctggctgcggacgaaagcacgggtagcatcgccaaacgcctacagagtattggcacggaaaacaccgaggagaacaggcgattctaccgccagctgctgctaacagcagacgatcgggttaatccctgcattggaggagtgatcctgttccatgagactctttaccaaaaagccgacgacggccgcccatttccacaggtaatcaagtccaagggaggtgttgtgggcattaaagtggataaaggcgtcgtgcctcttgcagggacaaacggagagactacaacacaggggctggatggcctgagtgagcgatgcgcccagtataagaaagatggcgctgatttcgccaagtggagatgcgtacttaagatcggcgagcataccccctctgctctcgccattatggagaacgccaacgtcctggcccgctacgcttctatctgtcagcagaacgggatcgtgcctatcgtcgagccagagatcctgccagatggcgaccacgatctgaagaggtgccagtatgtaacagaaaaggtacttgctgctgtctacaaagcactgtctgaccatcacatctacctcgaagggactcttcttaaaccaaacatggtgaccccgggacacgcttgcacccagaagttttcacatgaagagatagccatggccaccgttacagccctaagacgcacggtgccacccgcggtaacaggcattacatttttgtccggcggacaatctgaagaagaagcgagtatcaatctgaacgcaatcaacaaatgcccactgcttaagccctgggcactaaccttttcctacgggcgtgcactgcaggcatcggccttgaaggcatggggtggtaagaaagagaatctaaaagctgcacaggaagagtacgtgaaacgggctctggctaacagcctggcttgtcagggaaaatatacccccagtgggcaagctggtgcagcagcatctgaatccctgttcgtttctaaccacgcctac

SEQ ID NO: 258173 - DNA, 1092 bp, Artificial Sequence
  derived and/or modified sequence
atgccatatcagtatcccgccctgacccccgagcagaaaaaggagctgtccgacattgcgcaccggatcgttgcccctggcaaaggcatactggctgcagacgagagcacaggatctatcgctaagcgcttgcaaagcatcggtacagagaacacggaggagaatagacgtttttatcggcaacttttgctgaccgctgatgatcgagttaatccctgcataggtggcgttattctattccatgagactctctaccagaaggctgacgacggacgtcctttcccccaggtcattaagagcaaaggaggcgtagtcggaattaaagttgataaaggcgttgtcccacttgccggaaccaacggtgagacaaccacccaaggccttgatgggttgtcagagcgctgcgctcagtacaagaaggacggcgcagacttcgccaaatggcggtgcgtcctgaagatcggcgagcacacccccagcgcattggccatcatggagaatgccaatgttctggcgcggtacgcttccatatgtcagcagaatggaatcgttcctattgtggagcccgaaatcctcccagacggtgaccatgacctaaagcgatgccagtacgtcactgaaaaagtgctcgccgcggtttacaaagctctgagcgaccaccacatctacctagagggcactctgctgaagccgaacatggtcacccccggccacgcatgcacacagaagttcagccacgaagaaattgctatggccactgtgacggcactacgaaggaccgttccaccagccgtgactggcatcactttcctgtccggcggacagagcgaggaagaggcatccattaatctgaatgctattaacaaatgcccactgctgaaaccctgggctctgaccttttcttacggtcgcgcgcttcaggcatctgccctgaaagcttggggcggcaagaaggagaacctgaaagcagcccaggaagagtacgtgaagcgggcgttagccaattctctggcctgccagggaaaatacaccccatccgggcaggcgggcgccgccgcgtctgaaagcttgttcgtttcaaatcacgcatac

SEQ ID NO: 258174 - DNA, 1092 bp, Artificial Sequence
  derived and/or modified sequence
atgccttatcagtaccccgctttgacgccagaacagaagaaagaactctctgatatcgcccacagaatagtggccccagggaaaggaatccttgctgcggatgaatcaacaggatctatcgcaaagaggctgcagtctatcggaactgaaaatactgaggaaaatcgcaggttttatcgacagttattactcacagccgatgaccgtgtgaacccttgtattggaggggttatattgtttcacgaaacactgtatcagaaagcggatgacgggcggccctttcctcaggtaatcaagtcaaaagggggggtggtggggatcaaagtggacaaaggagttgtaccactagccgggacaaatggggagacaacgactcaagggctggacgggctgtcagaacggtgtgcccaatataaaaaagatggggcagatttcgctaagtggcggtgtgtacttaaaataggggagcacactccctccgcgctggccatcatggaaaatgctaacgtccttgcaaggtatgcatctatctgccagcagaatggaatcgtacccatcgtggaacctgagatcctgcccgatggagatcatgacctcaaaagatgccagtatgttacagaaaaagtcctggccgcagtatataaagctctgtctgatcatcacatatacctagaagggacactgctgaaacccaatatggtgacacctgggcacgcctgcactcaaaaattttcccatgaagagattgccatggccacagtaacagctctgcgacggactgtgccacccgccgtgacaggaatcacatttttgtcaggggggcagtcagaagaagaagcatctatcaatctgaatgcaatcaataaatgtccccttctcaaaccctgggcactgacattttcctacgggagggctcttcaggcttcagctttgaaagcctggggaggaaaaaaagaaaatcttaaggctgcccaggaagaatatgtcaaaagggcgctcgcgaactccctggcatgtcagggaaaatatactccctccggacaggccggggctgccgcctccgaatctctctttgtttctaatcacgcttac

SEQ ID NO: 258175 - DNA, 1092 bp, Artificial Sequence
  derived and/or modified sequence
atgccgtatcaatatccggcgctaacgccggaacaaaaaaaagaactatcggatatagcgcatcgaatagtagcgccgggtaaaggtatattagcggcggatgaatcgacgggttcgatagcgaaacgattacaatcgataggtacggaaaatacggaagaaaatcgacgattttatcgtcaattattattaacggcggatgatcgtgtaaatccgtgtataggtggtgttatattatttcatgaaacgctatatcaaaaagcggatgatggtcgtccgtttccgcaagtaataaaatcgaaaggtggtgtagtaggtataaaagtagataaaggtgtagtaccgttagcgggtacgaatggtgaaacgacgacgcaaggtctagatggtttatcggaacgttgtgcgcaatataaaaaagatggtgcggattttgcgaaatggcgatgtgtattaaaaataggtgaacatacgccgtcggcgctagcgataatggaaaatgcgaatgttctagcgcgatatgcgtcgatatgtcaacaaaatggtatagtaccgatagttgaaccggaaatactaccggatggtgatcatgatttaaaacgttgtcaatatgttacggaaaaagtattagcggcggtatataaagcgttatcggatcatcatatatatctagaaggtacgttattaaaaccgaatatggtaacgccgggtcatgcgtgtacgcaaaaattttcgcatgaagaaatagcgatggcgacggtaacggcgttacgacgtacggttccgccggcggttacgggtataacgtttctatcgggtggtcaatcggaagaagaagcgtcgataaatttaaatgcgataaataaatgtccgttattaaaaccgtgggcgctaacgttttcgtatggtcgagcgttacaagcgtcggcgttaaaagcgtggggtggtaaaaaagaaaatttaaaagcggcgcaagaagaatatgtaaaacgtgcgttagcgaattcgttagcgtgtcaaggtaaatatacgccgtcgggtcaagcgggtgcggcggcgtcggaatcgttatttgtatcgaatcatgcgtat

SEQ ID NO: 258176 - DNA, 1092 bp, Artificial Sequence
  derived and/or modified sequence
atgccatatcagtaccctgcactcaccccagagcaaaaaaaggagctgagcgatatcgcccaccgcatcgtagctcccggcaaggggattctggctgccgacgagagcactggcagcatagccaaaagactccagtccatcggaaccgagaacaccgaagagaacaggaggttctaccggcaactgttgctaaccgcagacgaccgcgtgaacccatgcatcggcggagtcatactgttccatgagactctgtaccagaaagccgatgatggacgcccttttcctcaagtgatcaaaagtaaagggggcgtggtgggcatcaaggttgacaagggcgtggttcctctggctggcacaaatggcgagacaaccactcaaggcctcgatggcctgagcgaacggtgcgcacagtacaagaaagatggcgcagacttcgcaaagtggagatgcgttcttaagatcggagagcacaccccaagtgcactggctattatggagaacgccaatgtgctggcaagatacgcctccatatgccaacagaacgggatagttccaatcgtcgagccagaaatccttccagacggagaccacgacctgaagcgatgccagtacgtcaccgagaaagtccttgcagctgtgtacaaagctctgagcgaccaccatatatacctggagggcacgctgctgaaacccaacatggtgaccccaggccacgcctgcacccagaaattttcgcatgaggaaatcgctatggctacagtaaccgctcttaggcggactgttccccctgcagtcactggcatcactttcctgtccggcggtcagtctgaagaggaagcctccataaacctgaacgctatcaacaagtgcccactgttgaagccttgggcacttacattcagttacggccgggctctccaggccagcgctttgaaagcatggggaggcaaaaaagaaaacttaaaggccgcacaagaagaatacgtcaagagagccctggctaactccctggcgtgccaagggaagtataccccaagcggacaagcaggggcggcagcctcggaaagtctcttcgtaagtaatcacgcttac

SEQ ID NO: 258177 - DNA, 1092 bp, Artificial Sequence
  derived and/or modified sequence
atgccttatcagtatcctgctctgactcctgagcaaaagaaagaactgtccgacatcgcccacaggattgtagccccgggcaagggcatccttgcggccgatgagagcaccggaagtatcgccaagagacttcagagcatcggaaccgagaatacagaagagaatcgccgcttctaccgacagctcctcttaaccgctgacgatcgggtcaatccctgtatcggaggagtcattctctttcatgaaacgctgtaccagaaagccgatgacggccgccccttcccccaagtgatcaagtctaagggcggagtggtgggcatcaaggtagacaaaggggtagtgcctttagccggcacaaatggagagactaccacacagggtttggatggacttagcgagcgttgcgcacaatacaagaaagacggcgcggactttgctaaatggcgctgcgtcctaaagatcggagaacacaccccgtcagctttagccatcatggagaacgccaacgtgctggctcggtatgccagcatctgccagcagaatggtattgtacctattgtcgaacctgagatattacctgacggcgaccacgaccttaagcgttgccaatatgttacagagaaggtgttggcggccgtttacaaggctttgtctgaccaccacatctaccttgagggcacattactgaaacccaacatggtgacacccggccatgcttgtacccagaagttttctcacgaagagatagcaatggctactgtgaccgctctgagaagaactgtcccccctgcagtgaccggtattactttcctgagtggtggccagtctgaggaagaggcgtcgattaatctgaacgcgatcaataagtgtccgctgctcaaaccctgggcactgacattttcttacggccgagcgttgcaagcaagtgccttaaaggcctggggtgggaaaaaggaaaaccttaaagcagctcaggaagagtacgtgaagagagccttggcaaactctctggcatgtcaagggaaatacacacccagcggccaagctggagcagcagcttctgaaagcctgtttgtcagcaaccacgcatac

SEQ ID NO: 258178 - DNA, 1092 bp, Artificial Sequence
  derived and/or modified sequence
atgccgtaccaatatccggccctcactccagaacaaaagaaagaactgtcggatatcgcccacaggattgtagcaccgggtaaaggaattttggcagcagacgagtcgaccggttccattgccaaacggctgcagtctatcggaactgagaataccgaagaaaacaggaggttctacaggcaacttctcctgaccgccgatgaccgcgtgaacccatgcattggcggagtcatcctctttcacgaaactctttaccagaaggcagatgacggacggcccttcccacaagtgatcaagtcgaaggggggcgtggttgggatcaaagtcgataagggggttgtccccctggccggcactaatggagaaaccaccacgcaagggcttgacggtttgtccgaaagatgcgcccagtacaagaaagacggagccgattttgccaagtggcgctgcgtgctcaagatcggagaacataccccttcggcgctggctatcatggagaacgcaaatgtgctggcacgctatgccagcatatgtcaacaaaacgggatcgtgccaatcgtggagccggaaattcttccagacggagatcacgacctcaagagatgtcagtacgtcaccgagaaggtgctggccgccgtgtataaagcgctctcggaccaccacatctacctggaaggaactctgcttaagccgaacatggtcaccccaggacatgcctgtactcagaagttcagccatgaagaaatcgcgatggccactgtgactgccctcagacggacggtgccgccagccgtgacgggaatcactttcctgtcaggaggccagtcggaggaggaagcatcaatcaatctcaatgccatcaacaaatgcccacttctgaagccttgggctctgaccttctcctacggacgtgccctccaggcttcagcactgaaagcctggggagggaagaaggagaaccttaaggccgctcaggaagaatacgtgaaacgcgccctcgcgaatagcctcgcatgtcaaggaaagtacaccccgtcgggacaggccggagctgcggcgtccgaatcactcttcgtgtcgaatcacgcctac

SEQ ID NO: 258179 - DNA, 1092 bp, Artificial Sequence
  derived and/or modified sequence
atgccgtaccagtacccggcgctgaccccggaacagaaaaaggagctgtccgacatcgcccatcggatcgtcgcaccggggaagggaatcctggcggccgatgagtcaactggaagcatcgccaaacggctgcagtccatcggcaccgaaaatactgaagagaatcgccgcttttaccgccagctgcttctcactgctgatgatcgcgtgaacccctgtatcggtggagtgattctgtttcacgagacgctctaccaaaaggccgatgacggacggccatttccccaggtgatcaaatcaaaggggggagtcgtgggcatcaaagtggacaaaggtgtcgtgccgctggcgggaacgaacggcgaaaccactacccaaggtcttgacggactgtccgaacgctgcgcccagtacaagaaggacggggctgatttcgcgaagtggcgctgtgtgctgaagatcggcgagcacaccccttccgcattggcaatcatggaaaatgctaacgtgctggcgcggtacgcatcgatctgtcaacagaatggaatcgtgccgattgtggaaccggagatccttccagatggagatcacgatttgaagcggtgccagtacgtgaccgaaaaagtgctcgctgcagtgtacaaggcactgtccgaccatcatatctacctcgaggggactctcctgaaaccaaatatggtgactccggggcacgcatgcacccagaagttctcgcatgaggagattgctatggccactgtgaccgcgttgcgccgcaccgtgccgccggcggtcactggaatcactttcctctcaggaggacagtcggaggaagaggcatccatcaacctgaatgccatcaataagtgcccgctcctgaagccttgggccctcactttctcctatggacgggctctccaggcctcggcgctgaaggcatggggaggcaagaaggaaaacctgaaggcagcccaggaggaatacgtcaaacgagccctcgccaactccctggcttgccagggaaaatacaccccgtcgggccaggccggagcagccgcgtcagagtccctgttcgtatccaaccacgcttac

SEQ ID NO: 258180 - DNA, 1092 bp, Artificial Sequence
  derived and/or modified sequence
atgccataccaatacccagccctgaccccagagcaaaagaaggaactctcggacatcgcacacagaattgtggccccaggaaaaggtatcctggccgctgatgaatccactggctccatcgcgaagcggctgcagagcattggcaccgaaaataccgaagagaatcggcggttctataggcagctcctcctcactgccgacgaccgcgtgaatccgtgtatcggaggagtcattctttttcatgaaaccctgtaccaaaaagccgacgatggacggccttttcctcaagtgataaagtcaaaaggaggagtcgttgggatcaaggtcgataagggcgtggtccctctggcagggaccaacggagaaacgaccacccaagggctggacggactttcagaacgttgcgcccagtacaaaaaggatggtgccgatttcgccaagtggcgatgcgttttgaaaatcggagaacacaccccgtcggcactggccatcatggaaaacgccaatgtgctggccagatacgcgtcgatctgccagcagaacggcattgtgccaatcgtcgagccggagatcttgccggacggtgatcacgatctgaagagatgccaatatgtgactgaaaaagtcctcgcggcggtgtacaaagcgctctcagaccatcatatctatctggagggaacgctgttgaagccgaacatggtgacccccggacacgcttgcacccagaagttctcccacgaagagattgcaatggcaactgtgaccgctctgcgtcgcaccgtgccacccgccgtgaccggaatcacgtttctgtccggcgggcaaagcgaagaggaagcatcgatcaacttgaatgccattaacaaatgccctctcttgaaaccttgggcccttactttctcatacggacgggcactccaggcgtctgccctcaaggcgtggggtgggaagaaggaaaacctcaaggcggcacaggaggagtacgtgaagcgcgccctcgcgaactctctggcctgtcagggcaagtacactccgtctggacaggctggtgcagcggcttcggaaagccttttcgtgagcaatcacgcttac

SEQ ID NO: 258181 - DNA, 1092 bp, Artificial Sequence
  derived and/or modified sequence
atgccataccaataccccgcacttacccctgagcaaaagaaggaactctccgacattgcacatagaattgtggcacctggaaaaggaatccttgcagcagacgaatccaccggaagcattgctaaaagactccagtcgatcggaaccgagaacaccgaagaaaacaggagattctaccggcaacttctgttgactgcagacgaccgtgtcaacccttgtatcggcggagtgattctgttccatgagactctgtaccagaaggcagacgatggccggcctttccctcaagtgattaagtcgaagggtggagttgtaggtattaaggtggataagggggtcgtgccccttgcaggcactaatggtgaaactaccactcagggactcgatggactttcagaaaggtgtgcgcaatacaaaaaggacggggcggacttcgcaaaatggcgatgtgttctcaagatcggagaacatactccctccgccctggcaattatggaaaacgctaatgtgctggcgcgatatgcatcaatttgccagcagaacggtattgtgcccatcgttgaaccagagattctgccagatggcgaccatgatcttaaaaggtgtcagtacgtgactgaaaaagtgctggcggcagtctacaaggccctctcggaccaccatatctatcttgaaggaacccttctcaagcctaatatggtgaccccggggcatgcttgcactcagaagtttagccacgaagaaatcgcaatggctactgttacggcactgcggcggaccgtccctcctgcagtgactggaataaccttcctgtccggtggacaatcggaggaagaggcatcgataaatctgaacgccattaacaaatgtcctctgctgaaaccatgggccctgacttttagctatgggagggcactgcaagcaagcgcccttaaggcatggggaggtaagaaggaaaatctgaaggccgcccaggaagagtacgtcaagagggcacttgcgaatagcctggcgtgccagggaaaatacacgcctagcggtcaggcaggtgcagcagcctccgaatcgctgtttgtgtcgaaccacgcatat

SEQ ID NO: 258182 - DNA, 1092 bp, Artificial Sequence
  derived and/or modified sequence
atgccataccagtaccctgccctgactccggaacagaagaaggagctcagcgacatcgcgcatcgcatcgtcgccccagggaaaggaatcctggcagctgacgaatcaaccggatcgatcgctaaacgcctgcaatccatcgggaccgagaacaccgaggagaaccggcgcttttacaggcagctgctcctcaccgcagacgatagagtgaatccctgcatcggaggtgtcatcttgttccatgaaaccttgtatcaaaaagcagacgatggacgacctttcccgcaggtgatcaagagcaagggaggcgtcgtgggaatcaaggtggataaaggggtggtgccattggctggtaccaacggcgagacgaccactcaagggctggacggactgagcgaacggtgcgcccaatacaagaaggacggtgccgattttgccaaatggcgctgcgtgctgaagatcggggaacacaccccgtcggcccttgcgatcatggagaacgcaaacgtcctggcccggtacgcttcaatctgccaacaaaatggtatcgtcccgattgtggagccagagattctcccggatggggatcatgacttgaaacgatgtcagtacgtcaccgagaaggtgctcgcggcggtgtacaaggccctctccgaccaccacatctaccttgagggaaccctgctgaaaccgaacatggtcactccaggacacgcttgcacccaaaagttcagccatgaagagatcgcgatggctaccgtgaccgctcttcgccgcactgtgcctccagctgtaactggaatcacgtttctgtcagggggccagtcagaagaagaggcatccatcaatcttaacgcgatcaacaaatgtccactgctgaagccgtgggcgctgaccttttcatacgggcgggcgctgcaggcgtcggccctcaaggcttggggaggcaagaaggaaaatctgaaagcggcgcaggaggaatatgtgaagcgcgccctggccaactcgctcgcctgccaaggaaagtacacccctagcggacaggcaggcgcagctgccagcgagtcacttttcgtgagcaatcatgcgtac

SEQ ID NO: 258183 - DNA, 1092 bp, Artificial Sequence
  derived and/or modified sequence
atgccttaccagtacccagctctgaccccagaacagaagaaagagctttccgatatcgcccatcggatcgtagcacccggcaaaggaatactagcggctgacgaaagcacggggagtatcgccaagcgactccagtctatcggcactgagaacacggaagagaataggaggttctataggcagctcttacttaccgccgatgatcgggtcaatccgtgtatcgggggtgtgatcctttttcacgaaacactgtatcagaaggcagatgacgggcgacctttccctcaagttatcaagagcaaaggtggcgtcgtaggcattaaagttgacaaaggagttgttcccctcgctggcactaatggcgagaccacaacacagggactggatggcctgtcagagcgctgcgctcagtacaaaaaagacggagccgacttcgcgaagtggcggtgcgtcttaaagatcggtgaacacaccccatctgccctggctattatggaaaacgcaaatgtcctggccagatacgcctcgatctgccagcagaacggcattgtgcccatcgttgaaccagagattctccccgacggggatcacgaccttaagcgttgtcagtacgttactgaaaaagttctggctgccgtctacaaagccttgtccgatcaccatatttaccttgaaggaacacttctgaagccaaatatggtgacgccaggtcacgcctgtacccagaaatttagccatgaagagattgccatggctaccgttaccgctctaagacgtactgttccacccgcagtgacaggcattaccttcctcagcggtggacagagcgaggaggaggccagcatcaacttgaacgcgattaacaagtgcccattgctgaagccttgggctctcactttctcgtacgggcgagccctccaggcttctgccctgaaggcgtggggtggtaagaaagaaaatttgaaggcggcacaggaggagtacgtgaaacgtgccctcgccaactcactcgcctgtcagggcaagtacactccatcgggccaggccggagccgcagcttcggaatctctcttcgtgtccaaccacgcttat

SEQ ID NO: 258184 - DNA, 1092 bp, Artificial Sequence
  derived and/or modified sequence
atgccttatcaatatccggctttgactccagaacaaaagaaggagctgagcgatatcgctcacaggatcgtggcccccgggaagggtattctggccgccgatgagagtaccggatcgatcgcaaagaggcttcaatcaatcgggactgagaacacagaggagaaccgacgcttctaccggcagctgctgctgaccgcggatgatcgagtcaatccatgcatcgggggtgttatattgtttcacgaaacactctatcagaaggccgatgatggacgtccattccctcaggtgataaagtcaaagggcggggttgtagggatcaaggtcgacaagggagtagtaccactggctggtacaaatggcgagacaacaacccaaggtctggacgggctgtccgaacggtgtgcccaatacaagaaagacggagccgactttgccaaatggaggtgcgtgctcaagattggtgagcacactccgagcgctctggctatcatggaaaacgctaacgtcctggctaggtatgcctctatttgtcagcagaacgggattgtacctatcgtggagccggaaatactgccagacggtgaccacgacttaaagcggtgtcagtatgtcactgaaaaggtgttagccgccgtgtacaaggcattgtcagatcaccacatttacctggaggggacccttctgaagcctaatatggtgaccccgggccacgcctgtactcagaagttctctcacgaagagattgccatggccaccgtcacagctctgcggcgcacggtccctccagcggtaaccgggatcaccttcttatcgggcgggcaatctgaagaagaagccagtattaacctgaacgctatcaataaatgccccctgttgaagccttgggcgctgacgtttagttatggccgggccctgcaggcctctgcattgaaggcttggggcggaaagaaggaaaatctcaaagccgcgcaggaggaatatgttaaacgagctcttgctaactctctggcctgtcagggaaagtatactcccagtggccaggcaggtgccgccgcctctgaatcactgttcgtgtcaaatcacgcctat

SEQ ID NO: 258185 - DNA, 1092 bp, Artificial Sequence
  derived and/or modified sequence
atgccctaccaatacccagccctgactcccgagcagaaaaaagagctgagcgatatcgcacaccggattgtggccccaggaaaaggcattttagctgccgatgaatctaccgggtcaattgccaagcgactccagagcattgggaccgagaatactgaggagaacaggaggttctacagacagctgctcctgactgctgatgaccgggtgaacccctgtattggtggggtcattctgtttcacgagaccctctatcagaaagccgacgacggcaggcccttcccccaagtgatcaaatctaaaggtggggtcgtggggattaaggtggacaagggggtggtgcctttagcagggactaacggagagaccacaactcagggcctcgatggtctctccgagagatgtgcccagtacaagaaggatggagccgacttcgccaagtggcggtgcgtgctaaaaatcggtgaacatacgccctccgccctcgctattatggagaacgctaatgtgttggccagatatgcgtctatctgccagcagaacggtattgtcccaattgtggagcccgaaattcttcctgacggtgatcacgatctgaagagatgtcagtacgtcacggagaaggtgctggccgctgtatacaaagccctcagcgaccaccacatttaccttgaaggaactctgctcaagccgaatatggtgaccccaggccatgcgtgcacgcagaaattctctcacgaggaaatcgcgatggcgacagtgaccgccctgcgtcgaacagtaccaccagctgtgacgggaataacctttctcagtggtgggcagagtgaagaggaggcgagtatcaatctcaatgctatcaacaaatgcccgctcttgaagccctgggccctgaccttttcctatggtagagctcttcaggcttctgcccttaaggcttggggtggaaagaaggaaaacctaaaagctgctcaagaggagtatgtaaagcgggcattggccaacagcttggcatgtcagggaaagtacacccctagcggtcaggccggggctgctgcatcagagagcctcttcgtatctaatcacgcctac

SEQ ID NO: 258186 - DNA, 1092 bp, Artificial Sequence
  derived and/or modified sequence
atgccatatcaatacccagctctgactccagagcaaaaaaaggaattgtctgacattgcacatagaatcgttgcacctggtaagggaatcttggctgctgacgagagcacaggatccattgctaagaggttacaatctatcggaactgaaaataccgaggagaatcgtaggttttacagacagctcttgctcaccgctgatgatagagtcaatccctgcataggaggtgtgatcctgttccatgaaactctctaccaaaaagcagatgatggacggccgttcccccaagttattaagtcaaagggaggagttgtagggataaaggttgataagggcgtggtcccattggccggaacaaatggagaaacaaccactcagggattagatggactttctgaacgatgcgcccagtacaagaaagatggcgcagattttgctaaatggcgttgtgttctcaagatcggagaacatactcctagcgcattggcgattatggagaatgctaacgtgctcgcccgatatgcttctatttgtcagcagaatggaattgtgccgattgttgaaccagagattctaccagatggtgatcacgaccttaaaagatgccaatatgtcacagaaaaagtgcttgcagcagtgtacaaagcgctgtcagaccatcacatttacctagagggcacactgttaaaaccaaacatggttacaccagggcacgcatgtacacagaaattttcgcatgaagagattgctatggccacagttactgctcttagacgaacagtgccgccagcggttacaggaattacctttctttcaggaggtcagtccgaagaagaagcatctatcaatctcaacgcgattaataaatgtccgttactcaagccgtgggctctcacattttcatatggaagagctctccaggcctccgctctcaaagcttggggaggaaaaaaagagaacctaaaggccgctcaagaagagtacgttaaaagagccctagctaattctcttgcttgtcaaggtaaatatactccatccggacaagcaggggctgcagcttcagagagccttttcgtttcaaaccacgcctat

SEQ ID NO: 258187 - DNA, 1092 bp, Artificial Sequence
  derived and/or modified sequence
atgccataccagtaccccgcgctcactccagagcagaaaaaggaactctccgatatcgcccaccggattgtggctccgggaaagggtattctggctgcagatgaatccaccgggtcaatcgcaaagcgcctgcagagcatcggtactgaaaataccgaggaaaaccgaaggttctaccgccaactcctgttgactgcagatgaccgggtcaacccgtgtatcggtggagtgattctgttccacgaaactctttaccagaaggccgatgacggccgcccgttccctcaggtgatcaagtcgaagggcggagtggtcggaatcaaagtggataagggagtggtgcctctggcgggaaccaatggtgaaaccacgacgcagggactcgatggactctcagaacgctgcgcacagtacaagaaggacggagcagacttcgccaaatggcggtgcgtcttgaagatcggcgagcatactccctccgccctcgccatcatggaaaacgctaatgtcctcgcgcgctacgcctccatctgccagcaaaatggtatcgtcccaattgtggagccagaaatcctcccggatggcgatcacgacctgaagaggtgtcagtacgttaccgagaaagtgttggccgctgtgtacaaggccctgagcgaccaccacatttatctcgaggggaccctgctcaagcccaacatggtgactcctggacacgcttgcacccagaagttctcgcacgaagagatcgctatggcgaccgtgaccgccctgcgccggacggtgcctcctgccgtcaccgggatcaccttcctctcgggaggacaatccgaagaagaggcgtccatcaatctgaatgcaattaacaagtgccctttgctgaagccatgggcgctgactttctcatacggaagagcgctgcaggcatcggccctgaaggcgtggggaggaaaaaaggaaaaccttaaggccgctcaggaggagtacgtgaagcgggctctcgcgaattccctggcgtgtcagggaaagtacaccccgtcgggacaggcaggtgcagcagcatcggaatcgctctttgtgtcgaaccacgcgtac

SEQ ID NO: 258188 - DNA, 1092 bp, Artificial Sequence
  derived and/or modified sequence
atgccctaccaataccccgctctcacgcccgagcaaaagaaagagctttcggatatagcacatcggattgtcgcgccaggtaagggcatccttgcggctgacgagagcacgggatccattgccaagcgactgcaatccatcggtactgaaaatactgaagaaaatcgccgcttttacagacagctccttctgaccgcggatgatagagtgaatccatgtatcgggggcgtgatactgttccatgaaaccttgtaccagaaggccgatgacggccgaccatttccacaagtgataaagtcgaagggaggagtggtgggcatcaaggtggataagggagttgttcctctcgctgggaccaacggagaaaccactactcaggggcttgacgggctctcggaaagatgtgcgcagtacaaaaaggacggagccgacttcgctaagtggaggtgtgtcttgaagattggtgaacacactccatcagcacttgcaatcatggagaacgccaacgtgctggcacggtacgcatctatttgtcagcaaaacggtatcgtgcctattgttgaacctgaaatcctccccgatggggaccacgatcttaaaagatgccagtacgtgaccgagaaggtcctcgcagccgtctacaaggcgctgtccgatcatcacatatatctcgaggggactcttctgaaacctaacatggtgacccctggccatgcatgcactcagaagttttcacatgaggagatcgcaatggcaacggtgaccgcactcagaaggaccgtgcctccagctgtcacgggaattacctttctgtccggaggtcaatcagaagaagaagcctccattaacctgaacgcaattaacaaatgtcctctgcttaagccttgggccctcactttcagctatggtagagcgcttcaagcatctgcgctgaaagcgtggggtggaaagaaggaaaatctgaaggccgcgcaggaggaatacgtcaagcgtgcgctcgccaacagcctcgcctgccaaggaaaatacaccccatcaggccaggctggcgccgctgccagcgaatcgctttttgtctccaatcatgcatac

SEQ ID NO: 258189 - DNA, 1092 bp, Artificial Sequence
  derived and/or modified sequence
atgccttaccagtatcccgcactcacgcctgagcaaaagaaagagctgtccgacattgcccatcgaatcgtggctccaggcaagggtatattagccgcagacgagtctacaggctctatcgcaaagcggctgcaatcaataggcaccgaaaatactgaggagaataggaggttttatcggcaactactccttaccgccgacgatcgagtgaatccatgtatcgggggggtcattctctttcacgagacactgtaccagaaagccgacgatggacggccttttcctcaggtgatcaaatccaaggggggagtcgttggtataaaagtagataaaggcgtcgtccccctcgccgggaccaacggggagaccaccacccaggggctggacggccttagcgagaggtgcgctcagtacaaaaaagacggcgccgacttcgccaaatggaggtgtgtattgaagataggggagcacactccatccgccttggccattatggagaacgcaaatgtactggctaggtatgcctccatctgccaacaaaatgggattgtacccattgtagagcccgagatccttcccgatggcgaccacgacctgaaaagatgccagtatgtgacagagaaagtactggccgccgtgtataaggcactaagtgaccaccatatctacttggaaggcacactgctgaaaccaaacatggtcacaccgggccatgcttgtacacagaaattcagccacgaggaaattgccatggccactgtaaccgccctgcggagaacagtccctccagccgttaccggcataacgtttctctccggcggtcaaagcgaagaagaagcttccattaatctaaacgccattaataagtgtccgctcctgaaaccttgggcgctcacattttcctacgggcgtgctctgcaggcctctgccttgaaggcatggggaggcaagaaagagaatctgaaggccgcgcaggaagaatacgtgaaacgtgcactagcaaattccttggcgtgtcaaggtaagtataccccttcgggccaggccggagccgccgcaagcgaaagtctgttcgtgagcaaccatgcatac

SEQ ID NO: 258190 - DNA, 1092 bp, Artificial Sequence
  derived and/or modified sequence
atgccctaccagtaccccgccctgaccccagaacagaaaaaggaactgtcagatattgcacatagaatcgtggcgccagggaagggaattctcgcagcggacgagagtaccggatcgatagccaagcgcttgcagtccataggtaccgagaataccgaagaaaatcgccgcttttaccgacagctgcttctgactgcagatgatagagttaacccatgtatcggtggtgtcattctttttcatgaaactctgtaccagaaggccgacgatggtcgccctttccctcaagtcatcaaatccaaagggggtgtggtgggtattaaggtggacaagggtgtggtgcccctggccgggaccaatggagaaactactacccaaggacttgatggactctctgaacggtgtgcgcaatacaagaaggacggcgcagattttgccaaatggcggtgtgtcctgaagatcggagagcataccccatcagcacttgctattatggagaacgcaaacgtgctggcaaggtacgcctccatttgtcagcagaacggaatcgtgcccatcgtggaaccagagattctgccagatggggaccatgatctgaagcgatgccaatacgtgaccgaaaaagtgctcgctgcagtgtataaggcgctttcggatcatcacatatacctggaaggaactttgcttaagcccaatatggtgactccaggccacgcgtgcactcagaaattctcgcatgaagaaattgccatggctactgtgactgcattgaggaggaccgtcccacctgcagtgactggtatcacctttctctcgggaggccaatccgaggaggaagccagcatcaaccttaatgcaattaacaagtgcccgctcttgaagccctgggccttgacttttagctacggtcgagccctgcaggcctcagcattgaaggcctggggaggaaaaaaggaaaaccttaaggcggcacaggaagagtacgttaagcgtgcacttgctaactccttggcttgccagggaaagtacaccccctccggccaagcaggagcggcagcctcggaatcactttttgtgtcgaatcatgcctac

SEQ ID NO: 258191 - DNA, 1092 bp, Artificial Sequence
  derived and/or modified sequence
atgccataccaatatcccgctctgacccccgaacagaagaaggagctgagcgacatcgcccaccgcatagtcgcaccaggtaagggaatcctcgcagccgacgagagcactggctccattgctaagaggctgcagtctataggtaccgagaatacagaggaaaatcgtaggttctacaggcaattgctccttaccgctgacgatcgcgtcaacccctgcatcggcggcgtaattctcttccatgagacactgtatcagaaggctgacgacggcaggccctttccccaggtgattaaatcaaaaggaggtgtcgtgggtatcaaggtggacaaaggcgtcgtccccttggctggtaccaacggagagaccaccacccaaggactcgacggcctgtcagagcgctgcgcccagtacaaaaaggacggcgccgatttcgctaagtggcgttgcgtgctgaagataggtgaacacactccctccgccctcgcaatcatggaaaatgccaatgttctggctaggtatgcctctatctgccagcagaacggtatcgtgcccatagttgaaccagaaatccttcctgacggcgaccatgatttgaaaagatgtcagtatgtgacagaaaaagttttggccgccgtttataaggctctttcagatcaccatatatatctggagggtacattgcttaagcctaatatggtgactcctggacatgcatgtacacaaaaattctctcatgaggagatcgccatggctacagtgaccgctctgaggcgcaccgtaccacccgctgtaacaggaattacctttctttcaggtggacagagcgaggaagaagcctccataaacttgaacgcaatcaacaagtgtcccttgctcaaaccttgggctcttaccttctcatacggtcgcgcactgcaggcttccgctctcaaggcatggggtggcaagaaggaaaatcttaaggctgcccaggaagagtatgtaaagagagccctggcaaattcactggcttgccaaggcaagtacactccatctggacaggctggagctgccgctagcgagtccctgttcgtcagtaaccacgcctat

SEQ ID NO: 258192 - DNA, 1092 bp, Artificial Sequence
  derived and/or modified sequence
atgccctaccagtaccctgctctgactcctgagcagaaaaaggagctttctgatattgcccatcggattgtcgctccgggtaagggaatcctggccgccgatgagagcactgggtctatcgctaagaggctgcaatcgatcgggaccgaaaataccgaggaaaaccgccgtttttatcgccaattactcttaactgccgacgaccgagtgaatccctgtattgggggggttatactgtttcatgagacactctatcagaaggcggatgacgggcggccatttccacaggtcattaaatccaagggcggcgtggtgggcataaaggttgataaaggtgtggtacccctggctggtacaaacggagaaactactacacagggactagatggcctgagtgagagatgtgcccagtacaagaaggacggggccgactttgcgaagtggcgttgcgtcctgaagattggggagcacaccccgtccgccttggccattatggaaaacgctaacgtgctggcaagatatgcctcaatttgtcagcagaatgggattgtcccaatcgttgaaccggagatactccctgatggagaccacgatctcaagcgttgtcagtatgttaccgagaaggttttggccgccgtttataaagccctgtcagaccatcatatctatctcgagggaaccctgctcaaacccaacatggtgactccaggccatgcgtgcacacaaaagttctcccatgaggaaattgccatggcaaccgtcaccgccttaagaaggaccgtgccacccgccgtgaccggtatcacctttctgtcaggcggacaaagtgaagaggaggcaagtattaaccttaacgcgatcaacaagtgccctcttctgaagccttgggccctgacgttctcctatggccgcgctttacaggcgtccgccctcaaggcctggggcggtaaaaaggaaaacttgaaagctgcccaggaggaatatgtgaaacgcgcgcttgcaaactctttagcctgtcaaggaaagtacactccctctggtcaggccggcgccgcagcatcagagagtctgttcgtgtcaaaccacgcctat

SEQ ID NO: 258193 - DNA, 1092 bp, Artificial Sequence
  derived and/or modified sequence
atgccctaccagtaccccgcccttaccccagaacagaagaaggaactttccgatattgcccatcggattgtggcacccggaaaaggtattctggcggccgacgaatcaaccggctcgatcgcaaagcggctccaatccattggaactgaaaacacggaggaaaacagacgcttttaccggcagctgctccttaccgcggacgatagagtcaacccatgtattggaggagtgatcctctttcatgaaaccctgtaccaaaaagcagatgacggtcgcccttttccacaagtgataaagtcgaagggcggtgtggtggggatcaaggtggataagggcgtggtgcctctcgccggcactaacggagaaaccacgacgcagggtctggacggcctttcagagcgctgcgcacagtacaagaaggatggagcagatttcgctaagtggaggtgtgtgttgaagatcggagagcacacgccttccgcactggcaatcatggagaacgccaacgtgttggcgaggtacgcatcaatttgtcagcaaaatggaattgtgcctattgtggaaccggaaatcctgcccgatggcgatcatgatcttaagcgctgtcaatacgtgaccgaaaaagtccttgcagccgtgtacaaagcactcagcgatcatcatatctatcttgagggtaccctgctgaaacccaacatggtcaccccaggtcatgcatgtactcaaaagttttcgcacgaagagatcgcaatggcaactgtgactgcactgagaaggaccgtcccaccagcagtgactggtattacttttctttcaggaggtcaatcagaagaagaggcatcgattaaccttaacgccataaacaagtgtcctctccttaaaccctgggctcttacgttttcctacggaagagcactccaggcgtccgcactgaaagcatggggaggtaaaaaggaaaacctgaaggcagcccaagaagaatacgtgaaacgcgcgctggcaaactccctcgcatgccagggaaagtacactccttcgggccaagcgggtgcagcagcatcggaatccctctttgtgagcaaccacgcctac

SEQ ID NO: 258194 - DNA, 1092 bp, Artificial Sequence
  derived and/or modified sequence
atgccctatcagtatcctgccctgacaccagaacagaagaaggagctctccgacatcgcacatcggatagtggcccctgggaagggcatccttgccgcagatgagtccacagggtccatcgccaaacggctacagtcaatcggcactgaaaacactgaagaaaaccggcggttttacagacagctgctgctgaccgctgatgatcgcgtgaatccatgtataggtggcgtcatactcttccatgaaacactgtatcaaaaagccgacgatggccgaccctttccccaggtgattaagagtaagggcggtgttgtggggattaaagttgataagggagttgtcccactggcaggcaccaacggcgagacaacaacccagggcctagatggcctgtctgagaggtgtgctcaatataagaaggatggcgctgactttgcaaagtggaggtgtgtcttaaagattggagagcatacccccagcgccttagctattatggaaaacgctaatgtcctagcccgctacgctagcatatgtcaacagaatggaatagttccaattgttgaaccagagatcctgcccgacggcgatcatgacttaaaacgttgccaatacgtcactgagaaagtgctggctgccgtgtataaggctttatccgatcatcacatctacctggaaggcaccctgctaaagcctaacatggtgacaccgggacacgcctgcactcaaaaatttagccatgaggagattgctatggccacagttacagccctaagaaggaccgtgccccctgccgttactggcataacctttctgtccgggggacaatccgaagaggaggccagcatcaatctgaacgccattaacaagtgcccacttctgaaaccttgggcccttaccttttcctatggccgggccttgcaggcctccgcactgaaggcctggggaggcaagaaggagaacttaaaagctgcccaagaggaatatgtcaaaagggcccttgccaacagcctcgcttgccaaggaaaatatacccccagcggccaggctggcgcagctgccagtgagagcctctttgtctctaatcacgcatat

SEQ ID NO: 258195 - DNA, 1092 bp, Artificial Sequence
  derived and/or modified sequence
atgccctaccagtaccccgcactgacaccagagcagaaaaaagaacttagtgatattgcccatagaatcgtcgcaccaggaaagggtattttggctgcagatgagtcaaccgggtctattgctaaaaggttgcagtcaatcgggaccgagaatactgaagagaatagaaggttctacagacaattactcctgaccgcagatgacagagtcaatccatgtatcggcggtgtcatcctgttccacgaaaccctttaccagaaggctgacgatggaaggccctttccacaggtcataaaatctaagggcggggtggtagggatcaaagtggataagggggttgttcctctagcgggcaccaacggggagaccacgacccagggcctggatggactcagtgagcgctgtgcacagtataaaaaagacggcgctgacttcgccaaatggcggtgtgtgttgaaaataggagaacacacaccttccgcgctggctattatggagaatgccaacgtactggcaaggtatgcttccatctgccagcagaacgggatcgtcccaatagtggagcccgaaatcctgccagacggggaccacgaccttaaaaggtgccagtatgtaaccgaaaaggtgctcgctgcagtttataaggccctatccgaccaccacatttatctggagggaacgctgttgaaacccaatatggttacccctggccatgcatgtacacagaagttttcccacgaagagatcgcaatggccaccgtaacagctctgcggaggaccgtcccaccggcagtaacaggtatcacctttctgtcgggcggccagtccgaggaggaggccagcatcaatctgaatgcaattaataaatgccctctgctaaagccatgggccctaactttctcctacggacgagctctgcaggcaagcgctcttaaggcctggggagggaaaaaggagaatctgaaggcagcacaggaagagtacgtgaagagggccctcgcaaatagtttagcatgccagggcaaatacactccatccggccaggccggtgccgctgcatctgagtcactgttcgtgagcaaccatgcctat

SEQ ID NO: 258196 - DNA, 1092 bp, Artificial Sequence
  derived and/or modified sequence
atgccgtatcaatatccagcactgacccctgagcagaaaaaggagctaagtgatatcgcacacaggatcgtggcacctggtaaaggaattctagctgctgatgaatccactgggagtattgcgaaaagactgcagagcattgggactgaaaataccgaggagaaccgaaggttttatcgccaacttctcctgaccgccgacgatcgagtaaacccctgcatcggcggcgttatcctgttccacgagacgctctatcagaaagctgacgacggcagaccatttccgcaggtgatcaaatcaaaagggggggttgtgggaattaaggttgacaaaggtgttgtgccgttggcaggaactaacggggaaaccaccacgcaaggactggatgggctcagcgagcgatgcgcacagtacaaaaaggacggggctgatttcgctaagtggcgctgtgtactgaagatcggcgaacatacaccatctgctttggcaattatggagaatgcaaacgtgctggcccggtacgcgagcatctgccaacaaaacggcatcgttcccattgtggagccagaaatccttccagacggcgaccacgacctaaaacggtgccagtacgtcaccgaaaaggtactggcagccgtgtataaggcacttagtgaccaccacatttacttggaagggaccctactaaagcccaatatggtcactccaggccacgcatgtacgcagaagttctcccacgaagaaatagccatggccaccgttaccgcactgaggcggacggtccccccagccgttaccggtatcacgttcctgtctggcggacagtccgaagaagaagcttcaattaaccttaacgctatcaacaaatgtcccctgctgaaaccctgggccttaactttctcttacggcagagccctgcaggcctctgctctgaaggcttgggggggtaagaaggagaacttaaaagccgcacaggaggagtacgtaaagcgtgcactcgccaatagcctggcctgccaagggaaatacacaccttcaggccaggcaggagcggcagcttctgaatcactattcgtgagcaatcatgcatac

SEQ ID NO: 258197 - DNA, 1092 bp, Artificial Sequence
  derived and/or modified sequence
atgccctaccagtatccggccttaacccctgagcagaagaaggaactgtcggatattgcacaccgtattgtggctccagggaaggggattctggcagcagatgagtcaacaggatctattgccaagagactgcaatcaattgggaccgaaaataccgaggaaaaccgacggttttatcgccagctacttctcacagctgatgacagggtaaatccctgcattggaggtgtgatattgtttcacgagaccctgtaccagaaggccgatgacgggagacctttcccgcaagtcataaaatctaaaggtggcgtcgtcggaatcaaggtcgacaagggagtggtgcccctcgcaggaacaaacggagagactacaacacaagggctggacggcctcagcgagagatgcgcccaatataagaaagatggagctgatttcgcaaagtggcgctgcgtgctgaaaattggtgaacacacaccctccgccttagccatcatggagaacgcaaacgtgctggccagatatgcatctatttgtcagcagaatggcatcgtgccaatcgtcgagcccgaaatcctgcccgatggagatcatgacctcaagcggtgccagtatgtgacagagaaggtgctggcagcagtctataaagccctcagcgaccatcatatataccttgagggcaccttattgaaaccaaacatggttaccccaggccacgcctgcacgcagaagttctcgcacgaagagattgcgatggcgaccgttaccgcattacggcgcacagtacctccagccgtgactggtatcacctttctgtctggaggccagagcgaagaggaggcttcaattaatctgaatgctatcaacaagtgcccactcctgaaaccatgggcactaacatttagttacggccgagccctccaagcctccgctctcaaagcctggggtgggaaaaaggagaatctgaaggcagcccaggaggagtatgtcaagcgcgccctcgccaactcgctcgcctgccagggaaagtacaccccaagtggccaggccggagcagccgcctcagagtcactgttcgtgtctaaccacgcatac

SEQ ID NO: 258198 - DNA, 1092 bp, Artificial Sequence
  derived and/or modified sequence
atgccctaccaatatcctgcgttaacccccgaacaaaagaaggagctttcagatatagctcatcgaatagtagctcccggtaagggcatacttgcagccgacgagtcaacgggtagtatcgcgaaacgtttgcagagcatcggaactgaaaacaccgaagaaaaccgacgattttaccgacagctgctgctaactgccgacgacagagtgaatccttgtattggaggggtgatcttgtttcatgagaccctttatcaaaaggccgatgacggtaggccctttccccaggtgatcaagagcaagggcggcgtcgtaggcatcaaggtggacaagggagtagtgccactggctggcactaatggagaaacaactacgcagggacttgatggtttaagcgaacgatgcgcacagtacaaaaaagacggggctgactttgcgaaatggagatgtgtgttaaaaattggagagcacacaccttcagccctggctataatggagaacgccaatgtcctcgcgaggtacgcatcaatctgccagcagaatggaattgtgccaatcgtagagccagagatattgcccgacggtgaccacgatttaaaacgctgtcagtatgtcacagaaaaggtgctggccgctgtgtataaggccctgagtgaccaccatatctacctcgagggcacgctcctgaagcccaacatggtgacgcccgggcatgcgtgtacgcagaagttctctcatgaagaaatagccatggcaacagttacagcgctacgtcgaaccgtcccacctgctgtaaccggtatcacttttctgagcggaggtcagagtgaagaagaagcttctatcaaccttaacgccattaacaaatgccctttgctgaaaccctgggccctgaccttttcctacgggcgggcactccaagcctcagcattgaaggcctggggaggtaaaaaggagaatctgaaagctgcccaggaagaatacgtaaagagagctttggccaatagccttgcctgccaggggaagtatactcccagtggacaagccggcgccgctgcaagcgagtctctgtttgtgtctaaccatgcctat

SEQ ID NO: 258199 - DNA, 1092 bp, Artificial Sequence
  derived and/or modified sequence
atgccataccagtaccctgcacttactcccgagcagaaaaaggaactgagtgacattgcccacaggatcgttgcccctggtaagggcatattggcggctgacgaaagcacaggatcaattgcgaagagactgcagagcatcggtaccgaaaacactgaagagaacagacggttctaccgccagctgctgctgacagctgacgaccgcgtaaacccctgtatcggaggcgtgattctctttcacgagactctttatcagaaggccgatgacggccgtccattcccccaggttataaagtctaaaggcggcgtggtgggtatcaaggtggataaaggcgtggtgccgctggcaggcacaaacggggagaccacgacccaaggactcgacggactctctgaacgctgtgctcagtataagaaggatggggctgattttgcaaagtggcggtgcgtccttaagattggggagcacacgcccagtgctctcgccattatggagaacgcaaatgttctggccagatacgcctcaatctgtcaacaaaatgggatcgtccctattgtagagcccgaaattcttcctgatggcgaccacgatcttaagagatgtcagtatgttaccgaaaaggtcctagcagccgtgtacaaagcactgtccgaccaccacatctacttggaggggaccttacttaaaccaaatatggtgacgcccgggcatgcctgcacccagaaatttagccatgaggagatcgccatggccaccgtgaccgccctccgtaggaccgtgccacctgcagttacaggaattacattcttaagcggtgggcagtctgaggaggaggctagtattaacctcaacgctatcaacaagtgccctctcctaaaaccttgggccctcacttttagctacggaagagctctgcaggctagcgctctgaaagcatgggggggtaagaaggagaaccttaaggccgcccaagaggagtatgttaaacgggcgcttgcaaactccctcgcttgtcagggaaaatacaccccctctggacaggcaggtgccgcggcttccgaatctctattcgtatcaaatcacgcatat

SEQ ID NO: 258200 - DNA, 1092 bp, Artificial Sequence
  derived and/or modified sequence
atgccttaccagtacccagcactcactccggagcagaaaaaagagctttcggacatcgcccaccgcatcgtggcgccggggaaaggaatcttggcagcggacgaatcgacggggtcgatcgcgaagcggctgcagtcgatcggaacggagaataccgaagaaaatcgaaggttctacagacaactcctgctcaccgctgatgaccgcgtcaacccatgcatcgggggcgtcatcctctttcacgagactttgtaccagaaagcagacgatggacgcccgttcccccaagtcatcaagagcaagggaggggttgtgggaatcaaagtggataagggagtggtcccactggctggaactaacggagaaaccaccacccagggattggatggactgtccgagagatgtgcgcaatacaaaaaagacggagctgattttgcgaaatggaggtgtgtcttgaaaatcggagagcataccccatcagcccttgctatcatggaaaatgccaacgtactcgcgcgctatgcaagcatctgtcaacaaaatggcatcgtgccgattgtcgaaccggagatcctgccggacggtgatcacgaccttaaacgctgccagtacgtgactgagaaagtgctcgctgcggtgtacaaagctctgtcagatcaccatatctacctggaagggacccttcttaagcctaacatggtgactcccggacatgcttgcactcagaagttcagccacgaggaaatagctatggccactgtgaccgcactgcgccggaccgtgcctcccgccgttactggtatcactttcctctccggaggacaaagcgaggaggaagcgtccataaatctgaacgcaatcaacaagtgcccactgctcaagccttgggcccttaccttctcgtacggaagggcgctgcaagcctccgccttgaaggcctggggcggcaagaaggaaaatctgaaggccgcacaagaggaatacgtgaagcgagctctggcgaatagtctggcgtgccaaggcaagtacaccccgtcaggacaggcgggcgcggccgccagcgaatcactgttcgtgtcaaaccatgcttac

SEQ ID NO: 258201 - DNA, 1092 bp, Artificial Sequence
  derived and/or modified sequence
atgccgtatcagtacccagcattaacaccggaacagaaaaaagaactgagcgatatcgcacacagaatcgttgcaccaggcaaaggcatccttgcggcagatgaaagcaccggctcgatcgctaaacggctgcagagcattggaacagaaaatacggaggagaataggcggttttatcgtcaactcctgttaactgctgatgatcgcgttaacccttgtattggcggagtaatattgtttcacgaaacgttatatcagaaggccgatgacggcagaccttttccccaagttattaagtcaaagggaggggtagttggcatcaaggttgataagggtgttgttccgcttgccggaactaatggagaaacgacgacgcagggactggacggcctttcggaacgttgcgctcaatataagaaagatggtgcggacttcgcgaagtggcggtgcgtcctgaaaataggagaacacaccccttcagccctggcgatcatggaaaatgcaaatgtgctcgcaagatatgcatccatatgccaacagaacggcattgtgccgatcgtagaacctgagatcctgcctgatggagaccatgacctaaaaagatgccaatacgtgacggaaaaagttttggccgccgtatacaaagctctgtcggatcaccatatctacctcgagggtactttactcaaaccaaatatggtcactccgggacatgcatgtacgcaaaaattcagccatgaagaaatcgcgatggcaacagttactgcccttcgcaggacggtgccacctgctgtgacaggcattacgtttctttccggaggacaatcagaagaggaagcatcaatcaacctcaacgccattaataagtgcccgttgcttaaaccgtgggctcttacgttttcctacggcagggcattacaggcaagtgcgctcaaggcatggggcggcaaaaaggagaacctgaaggcggcacaagaggagtacgttaagagagccctagcaaacagcctggcatgtcagggtaagtacaccccgtctggacaggcgggcgccgctgcatcggaatcactatttgtaagtaatcatgcgtat

SEQ ID NO: 258202 - DNA, 1092 bp, Artificial Sequence
  derived and/or modified sequence
atgccataccagtaccccgcccttacacccgaacaaaagaaggaattgtccgatattgcccaccgtatcgtagcacccggcaagggaatcctggccgcagacgaaagcacaggctcaattgcgaagaggctgcagtccatcggtacagagaacactgaagaaaatcgtcgattctacaggcaattgctgctgaccgcggacgatagagtgaacccttgtatcggaggcgtcatacttttccatgaaaccctttatcagaaagccgatgatggccggccctttcctcaggtgattaaatcaaagggaggtgtcgtgggaatcaaagtcgacaaaggagtcgtgcccctagcgggtaccaacggcgagaccaccacacaagggctggatgggttaagtgaacggtgcgcccagtacaaaaaggatggggccgactttgcgaagtggcgctgtgtgctcaaaattggcgaacatacacctagcgctctggctatcatggagaatgcaaacgtcctggctcgttatgcctccatatgccagcagaatggcatcgtgcccattgttgaacctgagatactgccagatggcgaccacgatctgaagaggtgtcagtacgtgactgagaaagtgctggctgctgtgtacaaggcgctttccgatcaccatatttacctcgagggcacgttgctaaaaccgaatatggtaacaccagggcacgcatgtacgcagaaattctcacatgaggaaatcgccatggctacagtcacagcgctgaggcgaacagtcccccctgcagtgaccgggatcaccttcttgagtggcggacagagtgaagaagaggcatccataaacctcaatgcaatcaacaaatgtccattgctaaaaccatgggcactcacattcagctatgggcgcgcactgcaggctagtgcgttgaaagcctggggagggaagaaggagaacctgaaggccgcccaagaagagtacgtgaagagggccctcgccaattcgttggcatgccaggggaagtacactccctcgggccaggcaggagcagcagccagcgagtcactgtttgtgtccaatcacgcatac

SEQ ID NO: 258203 - DNA, 1092 bp, Artificial Sequence
  derived and/or modified sequence
atgccttaccaatacccagcactgactccagagcaaaagaaggagctgtcggatattgcgcatagaattgtggcgcctggaaaagggatccttgccgccgatgagtccaccggttcaatcgcaaagcgcctgcagtccatcggaactgagaatactgaggaaaatagaagattttaccgtcagttgttgctgaccgcagacgatagggtgaacccttgtattggaggagtcatactgttccacgagactctgtaccaaaaggcagatgatggccgcccgtttcctcaggtcatcaagtcaaaaggcggcgtggtgggaattaaggtggataagggtgtggtcccgctggcaggcaccaacggggagactacgactcaaggtcttgacggactgagcgaacgctgcgctcagtacaaaaaagacggcgctgatttcgcaaaatggcgctgtgtgctcaaaattggagaacatactcctagcgcacttgcgattatggaaaatgccaacgtgttggcgagatacgcttccatctgccaacaaaatgggattgtgccgattgtggaacctgagattttgcccgacggtgaccatgatctcaaaagatgccaatacgtcacggaaaaggtgctggcagcagtgtacaaggcactttcggatcatcatatctatttggagggaactctcctcaaacctaatatggttactcccggacacgcatgtacccaaaagtttagccatgaagagatagcaatggctaccgtcactgcccttcggagaactgtgccgccagccgtgacgggtatcacctttctctcaggaggtcaatccgaggaagaagcatccattaacctgaacgcgatcaacaagtgtccgctcctgaagccctgggccctgaccttttcctacggtcgagcgctccaagcatcggcactgaaggcatggggtggtaaaaaggaaaatcttaaagccgcccaggaagagtacgtgaagcgagcactggcaaactccttggcctgtcagggaaaatacacgcctagcggtcaggccggcgccgccgcctcggaatccttgtttgtttccaaccatgcatac

SEQ ID NO: 258204 - DNA, 1092 bp, Artificial Sequence
  derived and/or modified sequence
atgccctaccagtaccctgctcttactccagagcaaaaaaaggagctgagcgacatcgcccatcggatcgttgccccgggcaagggcattttggctgcagacgagtccacaggctccattgccaaacgcctgcagtctatcggaaccgagaacactgaagaaaatcggcgattctatcgccagctgttgctgaccgccgacgatagagttaatccgtgcataggtggagtgattctgttccatgagaccctgtatcaaaaggccgacgacggcaggccattcccacaggtcataaagagtaagggaggagtcgttggaatcaaggtggacaagggagttgtgccgctagcaggcacgaacggagaaaccacaacgcagggtctcgatggtctgtcggagcgatgcgcccagtacaagaaagacggagctgattttgctaaatggcgctgcgtcctgaaaattggcgaacatacaccctcagcgctcgcaatcatggagaacgccaatgttctggcacgctacgcctccatctgccaacagaacggtattgtgcccattgttgaaccggagattctgccggatggcgaccatgacctgaagcggtgccagtatgtaaccgagaaggttctggccgcagtgtacaaggccctgagtgaccaccatatttacctcgagggcacacttctgaagcccaacatggttacaccgggacatgcgtgcacgcagaaattctcgcacgaggagatcgctatggccactgtgacagcgctgaggcgaactgtaccacccgctgtgacgggcatcacgtttttgtcgggtggtcagtctgaggaagaagcctccatcaacctcaacgcaatcaataagtgcccgctgttgaaaccgtgggcacttaccttttcatacggccgggccctacaggcctcggccctgaaggcttggggaggaaagaaggagaatctgaaggccgctcaggaggagtacgtgaagcgcgcccttgccaattccctcgcctgccagggcaagtacacaccttccggccaggcaggcgcagctgcttcggaatcactgtttgtctcaaatcacgcctac

SEQ ID NO: 258205 - DNA, 1092 bp, Artificial Sequence
  derived and/or modified sequence
atgccttaccagtacccagctcttactccggaacagaagaaggagttgtccgatatcgcccacaggatcgtggcgcccggtaaagggatccttgcggccgacgagtcaaccggatctatagcgaagcgcctccaaagcatcggtaccgagaacacggaggagaaccgacgcttctacagacaactgctgctgaccgctgacgatcgcgtgaatccatgcatcgggggagtaatcctcttccacgaaactctgtaccagaaagcggacgacggacggccgttccctcaagtcatcaagtcgaagggcggcgtcgtggggatcaaggtcgacaaaggcgtcgtgccgctggccggtactaacggcgagacgaccacccaggggctcgatggactcagcgaacggtgtgcccaatacaagaaggacggtgccgatttcgccaagtggagatgcgttttgaaaatcggagagcacaccccctcagccctggccattatggaaaacgccaacgtgctggctcggtacgcctcaatttgccagcagaacggaatcgtgccgatcgtggagccagagatacttccggacggggatcacgacctgaagcggtgccagtacgtcactgaaaaggtgctggcggcggtgtacaaagcacttagcgaccaccatatctacttggaaggaactctcctcaagcctaatatggtcactccaggacatgcgtgcactcagaagttttcacacgaagaaattgccatggcgaccgtgaccgccttgcgccggaccgtgccgccagccgtgacgggtatcaccttcctctccggaggacagtcggaggaagaggcatcaatcaacctcaacgcaatcaacaagtgccctcttctcaagccatgggccctgaccttctcctatggcagggctttgcaagcatccgccctgaaggcgtggggaggaaaaaaggagaatttgaaggcggcccaggaagaatacgtgaagagggctctggcaaactcattggcgtgtcagggaaaatacactccgagcggacaagccggcgcagccgcgtcggaatcgctgttcgtgtcaaatcacgcctac

SEQ ID NO: 258206 - DNA, 1092 bp, Artificial Sequence
  derived and/or modified sequence
atgccctaccaataccctgcccttacgcccgagcagaagaaggagctcagcgacatcgcgcaccgtattgtcgctcccggcaagggaatcctcgccgctgacgaatccactggctctattgccaagcgcctgcaatctatcggtacagagaacaccgaagaaaaccgtcggttttaccgtcagctgctcctcactgcggatgatcgcgtgaacccttgtatcggtggcgtaatcctcttccacgagacactctatcagaaggccgacgacgggcgccctttcccccaggtcatcaagagcaagggaggtgttgtgggcattaaggtggacaagggagtcgttccactagctggcaccaacggtgagaccactacccaggggttagacggtctctccgagcgttgcgcgcagtacaagaaggacggagcggatttcgcgaagtggcgctgcgtcctcaagatcggcgaacataccccttcggctctggctattatggaaaacgccaacgtgctcgcccgttacgcctccatctgtcagcagaatggcatcgtcccgatcgtcgagcccgagatcctgccggacggtgaccatgacctaaagcggtgccagtacgtcaccgagaaggtcctcgccgcagtctataaggccctctccgaccaccatatttacctggagggaacactgctgaagcccaatatggtcacccccggtcacgcctgcacgcaaaagttctcccacgaggaaatcgccatggcgaccgtgaccgccctgagacgcaccgtcccgccggctgtcaccggtatcacgttcctgtctggaggtcagagtgaagaagaggccagcatcaatctaaacgccatcaacaagtgccctctactgaagccgtgggcattgacattctcgtatgggcgagcccttcaggcatctgccctcaaggcctggggtggtaagaaggaaaacttgaaggccgctcaggaggagtacgtgaagcgcgcactcgcgaactccttggcctgccagggaaagtataccccatccggccaggccggagccgccgctagcgaatccctctttgtttctaaccacgcgtat

SEQ ID NO: 258207 - DNA, 1092 bp, Artificial Sequence
  derived and/or modified sequence
atgccgtatcaatacccagctctgacaccagagcagaagaaggagttgtcagacatcgcccatagaatagtggcccctgggaaaggaattctcgctgcagatgagtcaactggaagcatagctaagaggcttcagtccattggaactgaaaacacagaagagaataggcgcttttacaggcagcttcttttaactgcggacgatagggtaaacccatgcattgggggtgttattcttttccatgagacattatatcaaaaggcagatgatggacgaccttttcctcaggttataaagagcaaagggggtgttgtgggtataaaggttgataagggagtggttccactggctgggaccaatggagaaacaactactcaagggctcgatggccttagcgaaaggtgtgcacagtataaaaaagatggagcggattttgctaaatggagatgtgtcttgaagatcggcgaacacaccccttctgctcttgccatcatggaaaacgctaacgttcttgcaaggtatgcttccatttgtcagcagaatggcatagtccctatcgtcgaaccagaaattctgcccgacggcgaccacgatctaaaacgatgccagtatgtcactgaaaaggtgttggcagccgtgtataaggccctgagtgatcatcatatttatcttgaaggcacgttattgaagccaaacatggttacacctggtcatgcttgcactcaaaaatttagtcacgaggaaattgctatggctaccgttactgctcttagacggacagtgccaccggccgtgactggcataactttcttgtcaggaggacagtctgaagaagaagcctcgattaaccttaatgctattaacaaatgccccttgcttaagccatgggcacttacattcagctatggaagagcattgcaagcgtctgctttgaaggcatggggtggaaaaaaggaaaacttgaaggctgcacaagaggagtacgtcaagcgggcgcttgcaaattcactcgcatgtcagggtaagtataccccaagcggtcaggcgggtgcagctgcatcagaatctcttttcgtgtctaaccatgcttac

SEQ ID NO: 258208 - DNA, 1092 bp, Artificial Sequence
  derived and/or modified sequence
atgccctatcagtatcccgcgctgaccccagaacaaaaaaaggagctgtccgatatcgcccaccgtatcgtggcaccgggaaaagggatcttagctgccgacgagtctactggctccatcgccaagaggctgcaatcgatcggtaccgagaatacagaggagaacagaaggttttatcggcagctcctgctgactgccgacgacagagtaaacccatgcattggtggagtgatcctgtttcacgaaacgctctaccagaaagcagacgatggcaggccttttcctcaggttatcaaatctaagggaggagtagttggtatcaaggtagacaaaggtgtggtacccctggcgggcaccaatggcgagactacaacccagggcttggacgggctctctgagaggtgcgcccagtacaagaaggacggcgcagacttcgcgaagtggcgctgtgttctaaagatcggcgaacatactcctagcgccctggccataatggagaatgctaacgtactagcacgatacgcgagtatttgtcagcagaacggtatagtccctatcgtggagcctgagatactgcccgacggagaccacgacttgaaacggtgtcagtacgtgaccgaaaaagtgcttgcagcagtctataaggcactgagcgaccaccacatttatttggaggggaccctgctgaaacctaacatggtgactcccggacacgcctgtacacagaaattttcccacgaggaaatagccatggccaccgtgaccgcacttcgcaggacagtacctccagcagtcactgggataacctttctgtcaggtgggcagagcgaggaggaagcaagcataaatctaaatgcgataaacaagtgtccactcttgaagccttgggcgttgactttttcctatgggcgggcgctacaggcctcagccttgaaggcatgggggggaaagaaagagaatctgaaagcagctcaggaggaatatgtgaagcgagccttggccaacagtctggcatgtcagggcaagtacacgccctcggggcaggccggtgccgcagccagcgagtcgctgttcgtgtctaaccacgcttac

SEQ ID NO: 258209 - DNA, 1092 bp, Artificial Sequence
  derived and/or modified sequence
atgccgtaccaataccccgcacttacccccgaacagaagaaggagctgtctgacattgcacatcgcattgttgcacccggaaaaggaatcctggcagcggatgagtccactggcagcatagcaaaacgcctgcaatccattggcaccgagaacactgaggaaaaccgccggttctaccgtcaactccttcttactgcagatgatcgggtgaacccatgtatcgggggagtgattttgttccatgaaacgctgtaccagaaggcggacgacggaaggcctttcccacaagtcatcaaatcgaaaggtggtgtggtcggaatcaaggtggataagggagtggtccctctcgcaggaactaacggggaaactaccacccaagggcttgatggtctgtcggaaagatgtgcacaatacaaaaaggatggcgcagattttgccaagtggaggtgtgtgcttaagattggagaacatacccccagcgctcttgcaataatggaaaacgccaacgtcctggccaggtacgcgtcgatttgccagcagaatggtattgtgccaattgtggaacctgaaatccttccagatggggaccatgatctgaagaggtgtcaatacgttaccgaaaaggtcctcgcagcagtgtacaaggcactgtccgatcatcacatctacctcgagggtactctcctgaagccaaacatggtgactcctggacacgcctgtacgcaaaagttttcgcatgaggaaatcgccatggcaacggtgaccgccctcagacgtaccgtgccccccgcagtgactggcattacctttctgtcgggtggacagtccgaagaagaagcaagcattaatctcaatgcaattaacaaatgtccactcctgaaaccatgggcccttaccttttcatacggcagagctcttcaggcctcggcactcaaggcatggggaggtaagaaggaaaaccttaaagcagcacaagaggagtatgtcaagcgagcacttgcaaattcgcttgcatgtcagggaaagtacacgccttcgggtcaagccggcgccgcagcctccgagtcgctgtttgtgtccaaccatgcatac

SEQ ID NO: 258210 - DNA, 1092 bp, Artificial Sequence
  derived and/or modified sequence
atgccatatcagtaccccgccctcacacctgaacagaagaaggaactctccgatatcgcccacagaattgtggcccctggaaaaggaattctcgccgccgacgaatctactggctccatcgccaagcgcctgcagagcattggcactgaaaatacggaggagaatcggcggttttatcgacagttgctcctgacagcagatgacagggtgaatccatgtatcggaggggtgatcctgtttcacgaaactctgtatcaaaaggcggatgacgggagaccctttccccaggtcatcaaatccaagggtggcgtggtcggcataaaagttgataagggggttgtgcctctcgctgggacaaacggcgaaacgaccacacagggcttggacggcctttctgagagatgcgctcagtataaaaaggacggggccgattttgccaagtggcgctgtgtcttgaagataggggaacacaccccatcagcgctggcaattatggagaacgccaatgtcctggctcgatatgctagtatctgccagcaaaatggtatagttccaatcgtggagcctgaaattttaccagacggcgaccatgatttgaagaggtgccagtacgttacagagaaagtgcttgcagcagtttataaggctctgtccgatcaccatatctatctggagggaacattactgaagcctaacatggtgactccgggacacgcttgtacacaaaagttctcccacgaagagattgccatggcaacagtgaccgccttgcggcgcacagtcccgcctgccgtcacaggcataaccttcctttcgggaggtcagtctgaagaagaggcgtccataaacctcaacgccattaacaaatgtccattgctgaaaccttgggcactgacatttagctacggcagagccttgcaggcctctgccttgaaggcatggggagggaagaaggagaacttgaaagcagcacaggaggagtacgtcaaacgtgcgctcgccaactctctggcctgtcaaggcaaatatacgcctagcggacaagcaggtgcagcagcgtccgagagtttgttcgtaagtaatcatgcgtac

SEQ ID NO: 258211 - DNA, 1092 bp, Artificial Sequence
  derived and/or modified sequence
atgccataccagtaccccgcactgacgccagaacagaagaaggaactttccgacatcgcacatagaattgtggcacccggaaaaggcatacttgcagcagatgaaagtactggatctattgccaagcggctgcaatcgattggaacggaaaatacggaggaaaacagaaggttctacagacaattgctgctgactgcagatgacagggtgaatccttgtattgggggagttattctctttcacgagactctgtaccagaaggcagatgatggacgccctttcccacaggtcatcaaatcaaaaggaggggtcgtgggtattaaggtggataagggggtggtgcctctcgccggtactaacggagaaaccactacccaagggctcgatgggctctcagaacggtgtgcacaatacaaaaaggacggagcggactttgcgaaatggaggtgcgtgctgaagatcggagagcacaccccttccgcacttgcaattatggaaaacgctaatgtgctggcgcgctacgcatccatctgtcaacaaaacgggattgtcccaatcgtagaaccagaaattctgccagatggcgatcatgatttgaagcgttgtcagtacgtgactgagaaagtcctcgccgccgtctacaaagcattgtcggaccaccatatctaccttgaaggaacgcttctgaagcctaatatggtgactccgggtcacgcatgcacccagaagttttcccatgaggagatcgctatggcgactgtgaccgccctccgcagaaccgtgccgcccgcggtaaccggcatcaccttcctgagcggtggtcagtctgaagaggaggcgtcaattaacctgaatgcgattaacaagtgcccactcctcaaaccgtgggcgttgactttttcatatggacgtgctcttcaagcaagcgcgctgaaggcatggggtggaaagaaggagaacctcaaggcagctcaggaggaatacgtgaaacgggcccttgcaaactccctcgcatgtcaaggaaagtacactccctcgggccaagccggtgctgccgcatcagagtcacttttcgtctcaaaccatgcttac

SEQ ID NO: 258212 - protein, 715 aa, Artificial Sequence
  derived and/or modified sequence
MYRALYAFRSAEPNALAFAAGETFLVLERSSAHWWLAARARSGETGYVPPAYLRRLQGLEQDVLQAIDRAIEAVHNTAMRDGGKYSLEQRGVLQKLIHHRKETLSRRGPSASSVAVMTSSTSDHHLDAAAARQPNGVCRAGFERQHSLPSSEHLGADGGLYQIPPQPRRAAPTTPPPPVKRRDREALMASGSGGHNTMPSGGNSVSSGSSVSSTSLDTLYTSSSPSEPGSSCSPTPPPVPRRGTHTTVSQVQPPPSKASAPEPPAEEEVATGTTSASDDLEALGTLSLGTTEEKAAAEAAVPRTIGAELMELVRRNTGLSHELCRVAIGIIVGHIQASVPASSPVMEQVLLSLVEGKDLSMALPSGQVCHDQQRLEVIFADLARRKDDAQQRSWALYEDEGVIRCYLEELLHILTDADPEVCKKMCKRNEFESVLALVAYYQMEHRASLRLLLLKCFGAMCSLDAAIISTLVSSVLPVELARDMQTDTQDHQKLCYSALILAMVFSMGEAVPYAHYEHLGTPFAQFLLNIVEDGLPLDTTEQLPDLCVNLLLALNLHLPAADQNVIMAALSKHANVKIFSEKLLLLLNRGDDPVRIFKHEPQPPHSVLKFLQDVFGSPATAAIFYHTDMMALIDITVRHIADLSPGDKLRMEYLSLMHAIVRTTPYLQHRHRLPDLQAILRRILNEEETSPQCQMDRMIVREMCKEFLVLGEAPS

SEQ ID NO: 258213 - DNA, 2148 bp, Artificial Sequence
  derived and/or modified sequence
atgtaccgggccttgtatgcgttcagatccgccgagccgaatgccctggcgttcgcagcgggcgagacctttttagtccttgagaggtcttccgcacattggtggttggccgcccgcgcgagatccggcgagacaggatacgtccctcctgcctatctgaggaggttgcagggtttggagcaggatgtgctgcaggctatcgaccgtgccattgaggcggtgcataatacagccatgcgggatggggggaagtactccctagagcagaggggagtcctgcaaaaactaatacaccatcggaaggaaactctctcaaggcgtgggccttccgcatctagcgtggccgtgatgacatcttctacatctgaccaccatctggacgccgccgccgctcgtcaacccaacggggtgtgtagggcgggctttgagcgccaacattctctccctagcagcgagcacctgggtgcagacggtggattgtaccagatccctccccaacctcgtcgcgccgcccccaccacgccccccccgcccgtgaagcgcagggacagagaggcactgatggcgtccggcagcggggggcataataccatgccatcgggtggaaacagtgtcagttcggggagctcagtcagctccaccagcctggacactttgtacacaagctccagcccatccgagccagggtcaagctgtagtcccacacctcctccagtgccgcggagagggacccacacaactgtcagccaggtacaaccccccccgtctaaggcctcggcacccgaaccacccgcagaagaagaggtagccacagggacaacatctgctagcgatgatctggaagccctcgggacactttctctcgggaccacggaggagaaggccgccgccgaggccgcggtgcctaggacgatcggcgcagagctgatggagctcgttcgtcgaaacactgggctcagtcatgaactctgcagggtggctatagggatcattgttgggcacattcaggctagtgtcccagcttccagtccagtcatggagcaagtcctgttgtcactcgtggaaggaaaggacctctctatggcactacctagtgggcaagtgtgccatgaccaacagaggctggaggtgatctttgccgacctggcaaggagaaaagacgacgcacagcaacgttcgtgggccctgtatgaggacgaaggtgtgatcagatgctaccttgaagagctgctccacatcctaacagacgctgacccagaagtgtgcaagaagatgtgtaagcgcaatgagtttgagagcgtactggcgttagtggcttattatcagatggagcaccgcgcttccttgcggctgttgctgttgaagtgttttggggcaatgtgcagcctcgacgcagccatcatcagcactctcgtgagctccgtcctgccagtggagctagcccgtgacatgcagaccgacactcaggaccatcagaaactatgttactctgcactgattctggctatggtgttctccatgggagaggcagtcccttatgcccactacgaacacctcgggacgcctttcgcacagttcttgctaaacatcgtggaggacggcctgccgctcgacactactgagcagttgccggatctttgcgtgaatctgctgctcgctcttaacctgcatctgcccgccgccgatcaaaatgtgattatggcggcactgtctaaacacgcgaacgtgaagatcttcagtgagaaactcctactgttgctgaatcggggagacgaccctgtgaggatcttcaagcatgaaccgcagccgcctcacagcgttctcaaatttttacaggacgttttcggatcacccgcgacggcggccatcttttaccataccgacatgatggcccttatcgatatcaccgtgcgtcacatcgctgatttgtcaccaggtgacaaactgcgtatggaatacctgagcctgatgcacgcaatcgtgaggaccaccccttatcttcaacaccgacaccggctgcccgatctgcaggccatcctgagacgtatattgaatgaagaggaaacttcgccccagtgtcagatggatcggatgattgtaagagaaatgtgcaaggagttcctggtcctgggagaagctcctagctag

SEQ ID NO: 258214 - DNA, 2148 bp, Artificial Sequence
  derived and/or modified sequence
atgtaccgggccctgtatgccttccgctctgctgagcccaatgccctggcctttgctgctggggagaccttcctggtgctggagaggagcagcgcccactggtggctggccgcccgggcccggagcggggagaccggctacgtgcccccagcctacctgcggcggctgcagggcctggagcaggatgtgctgcaggccatcgaccgggccattgaagctgtgcacaacacagccatgagagatggcggcaagtacagcctggagcagaggggcgtgctgcagaagctgatccaccacaggaaggagaccctgagccggcggggccccagcgccagctctgtggccgtgatgaccagcagcaccagtgaccaccacctggatgctgctgctgcccggcagcccaatggagtgtgccgggccggctttgagcggcagcacagcctgcccagcagcgagcacctgggcgcagatggcggcctgtaccagatccccccccagccccggcgggccgcccccaccaccccacctcctcctgtgaagagaagagaccgggaggccctgatggccagcggcagcggcggccacaacaccatgcccagcggcggcaacagcgtgagcagcggcagctctgtgagcagcaccagcctggacaccctgtacaccagcagcagccccagcgagcccggcagcagctgcagccccaccccacctcctgtgccccggcggggcacccacaccaccgtgtcccaggtgcagcccccacccagcaaggccagcgcccctgagcccccagctgaggaggaggtggccaccggcaccaccagcgccagtgatgacctggaggccctgggcaccctgagcctgggcaccacagaggagaaggctgctgctgaggccgctgtgcccaggaccatcggggctgagctgatggagctggtgagaagaaacacaggcctgagccatgagctgtgccgggtggccatcggcatcatcgtgggccacatccaggcctctgtgcctgccagcagccctgtgatggagcaggtgctgctgagcctggtggagggcaaggacctgtccatggccctgcccagcggccaggtgtgccacgaccagcagaggctggaggtgatctttgctgacctggcccggaggaaggatgatgcccagcagaggtcctgggccctgtatgaagatgaaggagtcatccgctgctacctggaggagctgctgcacatcctgacagatgctgaccctgaggtgtgcaagaagatgtgcaagagaaatgaatttgaatctgtgctggccctggtggcctactaccagatggagcaccgggccagcctgcggctgctgctgctgaagtgctttggagccatgtgcagcctggatgctgccatcatcagcaccctggtgtcctctgtgctgcctgtggagctggcccgggacatgcagacagacacccaggaccaccagaagctgtgctacagcgccctgatcctggccatggtgttctccatgggagaggccgtgccctatgcccactatgagcacctgggcaccccatttgcccagttcctgctgaacatcgtggaggatggcctgcccctggacaccacagagcagctgcctgacctgtgtgtgaacctgctgctggccctgaacctgcacctgcctgctgctgaccagaatgtcatcatggccgccctgagcaagcacgccaacgtgaagatcttcagcgagaagctgctgctgctgctgaacagaggagatgatcctgtgcgcatcttcaagcatgagccccagcccccccacagcgtgctgaagttcctgcaggatgtgtttggcagccctgccacagctgccatcttctaccacacagacatgatggccctgattgacatcaccgtgcgccacatcgctgacctgagccctggggacaagctgaggatggagtacctgagcctgatgcacgccatcgtgaggaccaccccctacctgcagcaccgccaccggctgcctgacctgcaggccatcctgcggcgcatcctgaatgaggaggagaccagcccccagtgccagatggacaggatgattgtgcgggagatgtgcaaggagttcctggtgctgggggaggcccccagctag

SEQ ID NO: 258215 - DNA, 2925 bp, Artificial Sequence
  derived and/or modified sequence
gcggctcggcgctcccggcctggcgttgtggcgccgcagcccttgccaccttccctgcacctgccctgcccggcctcatgtaccgcgcgctgtacgcgttccgctcggcggagcccaacgcgctggcgttcgccgcgggcgagaccttcctggtgctagagcgaagcagcgcgcactggtggctggccgcgcgggcgcgcagtggtgagacgggctacgtgccgccagcctacctgcgccgcctgcagggcctggagcaggatgtcctccaggccattgaccgggccatcgaggctgtacacaacacagccatgcgggatggtggcaagtacagcctggaacagcgtggagtcctccagaagctgatccaccaccggaaagagaccctgtcacgcagaggcccttcagcctccagtgttgcagttatgacctcatcaaccagtgaccaccacttggatgctgctgcagccaggcagcccaatggggtgtgtcgagctgggttcgagcggcagcacagcctacccagttctgagcatcttggggcagatggaggcctctaccagatcccaccacagcctcgccgagcagcacccaccacaccgcccccaccagtgaagcgccgagaccgcgaggccctgatggcctctgggagtggtggccacaacaccatgccctccgggggtaactctgtgtccagcggctcctcagtcagcagcacctccctggacacgctctataccagctccagcccatctgaaccaggctccagctgctcacccacacccccacctgtgccccgccgaggcacccacaccaccgtgtcccaagtccagccccctccctccaaggcatcagcacctgaaccccctgcagaagaagaagtggcaactggtacaacctcagcctctgatgacctggaagccctgggtacactgagcctggggaccacagaggagaaggcagcagctgaggcggctgtgcccaggaccattggggccgagctgatggagctggtgcggagaaacactggcctgagccacgaattatgccgggtggccatcggcatcatagtgggtcacatccaggcctcggtgccggccagctcaccagtcatggagcaggtcctcctctcactcgtagagggcaaggacctcagcatggccctgccctcagggcaggtctgccacgaccagcagaggctggaggtgatctttgcagacctggctcgccggaaggacgacgcccagcagcgcagttgggcactatatgaggatgagggtgtcatccgctgctacctagaggagctgctgcatattctgactgatgcagaccctgaagtttgcaagaaaatgtgcaagagaaacgagttcgagtctgtcctggccttggtggcctattaccaaatggaacaccgagcatcactgcggctgctgctcctcaagtgctttggcgccatgtgcagcctggatgcagccatcatctccacgcttgtgtcatccgtgctgcctgtagagctggcgagggacatgcagacagacacgcaggaccaccagaaactctgttactctgccctcatcctggccatggtcttctccatgggagaggcagtgccctatgcacactatgagcacctgggcacgcctttcgcccagttcctactgaacatcgtcgaggatgggctgcccttggacaccacagagcagctgccggacctctgcgtgaacctgcttctggctctcaacctgcacctgccagctgctgaccagaatgtcatcatggctgccctgagcaaacacgccaatgtcaagatcttctccgagaagctgttgttgctcctgaacagaggggatgaccctgtgcgcatcttcaaacatgagccacagccaccacactctgtcctcaagttcctgcaggacgtgtttggcagcccggccacagctgccatcttctaccacacagacatgatggctctcattgacatcactgtgcggcacatcgcagacctgtcaccaggagacaagctgcgcatggagtacctctccctgatgcatgctatagtccgcaccacaccctacctgcagcaccgccaccggctacccgacctgcaggccatactgcgacgcatcctgaatgaggaggagacctcaccccagtgccagatggaccgcatgattgtccgagagatgtgcaaggaattcctggtgctgggggaggctcccagctagcaccttgctgtcctcccttccctgcagctccagtcagtgtgcaggggactcaggggcttggccctaagaatgttttgcactgacagtgggaggggataaggtggcagaaggaacctgagcaggacccccacctgaagtagaacttaagagaggggccaagtgtaggattggggaccatggtctgggagctgttctggggcagggggaatatgcaagctaaagcccctctataccctggtaggcttcctcttcagcatgcccccctcttcaccccacacccatgtgtacactcagagtcctgctgccgctccaggctggaccagacccccatccccacccctcctggtctgtatcctgggcctcagcaagccatgcccctggggtgaggggaggcatctcccaccagctctattctttgccttagctttgcagtgagtgctgctcatgtcctcccctccacccgcacatgggggtcgctgcccttcactcctacccccagaggccttggccaagctgctgctttgaaagcgggatcttggagacaggccatccatcctggagcctcatggaacaggatgatggcactgagaaagccaatgaccgaatctcttttctctgtaaaaatgtagactgaaaagccatgtgtattttcctatgtgctgtagctctcctttggaaataaatcacaggcatctggaaa

SEQ ID NO: 258216 - DNA, 2148 bp, Artificial Sequence
  derived and/or modified sequence
atgtaccgggccctgtacgccttccggagcgccgagcccaacgccctcgcctttgcggctggcgagacttttctggtgttggagcggtcatctgctcactggtggctggccgcccgggcccgcagcggcgaaacaggctacgtgccacccgcatatctgagaaggcttcagggccttgagcaggatgtcctgcaagcgattgaccgcgccatcgaagctgtccataatacagcaatgagagatggggggaaatactccttggagcagcgaggagtactgcaaaaactaatacatcatcgaaaggagacactgtcacggcgcgggccttctgcttcttctgttgcagtgatgacatcatccacctcagaccatcatctggacgccgccgccgcccgccaacccaatggagtgtgtagggcaggctttgagagacaacattcactgccatctagcgaacacttgggcgccgatggtggcctataccagattcctccgcagccccggagagcagcgccaaccactcctccacccccagtgaagagaagagatagggaggcactaatggcctccggcagcggcggtcacaacactatgcccagtgggggaaattcagtctcatctggatcatccgtgagctctacaagcctggacacactgtatactagctccagcccaagcgagccaggatcctcctgcagccctaccccacctcctgttccaagacgtggaactcacaccacagtttcacaagtacagcctcccccatcaaaagccagcgccccggagcctccagcagaagaggaagtggccacaggcactacatccgcctccgacgatctggaagcactgggcacattgagcctgggtaccaccgaggagaaagccgctgccgaagccgccgtgccccgaaccatcggtgctgagcttatggagctggtccgccggaacacgggtctatcccacgaattgtgccgagtagctatcggcattatcgtcggccacatccaggccagtgtgccagcgagctcaccggtgatggagcaggtcctgctgtcgctagtggaaggaaaggatttgtcgatggcgttacccagcggacaggtctgccacgaccagcagagactcgaggtgatattcgccgatttggccagaagaaaggacgacgcccaacagagaagctgggcactctatgaagacgagggggtaatccggtgctacctggaggagctcctacacattcttaccgatgccgacccggaagtgtgcaagaagatgtgtaagagaaatgagtttgagtccgtgctggcactggtggcatactatcagatggagcacagagcatcattgaggctacttctgctcaagtgttttggagcgatgtgctctttagacgccgccataattagtacgctggttagttcagttctgcccgtggagttagccagggacatgcagactgacacacaggaccatcagaagctttgttattcagccctgatactggcgatggttttttccatgggcgaggctgtaccatatgctcactatgagcatctcggcactccgtttgcccaatttctcctgaatattgtggaggatggtctacctctcgatactactgaacaacttccagatctctgcgttaatcttctcttggccttgaacctgcacttaccggcagcagaccagaatgtcattatggccgccctgagtaaacatgctaatgtcaagatcttctctgagaagctgctcttactgttgaatcgtggagatgacccggtgcggatatttaaacatgagccgcaacccccacacagcgtgcttaagtttttacaggacgtgttcgggagtcccgcgaccgcagcaattttctaccataccgatatgatggccctgatcgacattacagtcagacatatagctgacctatctcctggcgacaaacttagaatggagtatctttctttaatgcacgctatagtgaggaccacaccctacttgcagcacaggcaccggctgcccgacctccaggccattctgaggagaatcctgaacgaggaggaaaccagtccgcagtgccagatggatcgtatgatcgtgcgggagatgtgtaaggaattcctggttttaggggaggctccaagttag

SEQ ID NO: 258217 - DNA, 2148 bp, Artificial Sequence
  derived and/or modified sequence
atgtaccgtgccctgtacgcgttcaggtccgctgagccgaatgccttagcctttgcagccggtgagacctttctggtgctggaaagatcatccgcccactggtggctagctgccagagctcgctccggcgagactgggtacgttccacctgcatatttgcgtcgtttgcaagggttggagcaggatgtgctacaggcgatcgaccgggcaatcgaagccgtgcacaacaccgccatgagagatgggggaaagtacagcctggaacaacgcggtgtcctgcagaagttaattcatcataggaaagagaccctgagtcgtcggggtccatccgcctccagcgttgccgttatgacttcatctacctcggatcaccatctcgatgctgccgcagccaggcaaccgaatggcgtatgtagagccggttttgaaaggcaacacagcctgccaagctccgaacacttgggagccgacggcggattgtaccagatcccccctcagccccgtcgtgctgcccctacgacacccccacctccggtcaagcgacgagatcgtgaggcacttatggcctctgggagcggcggacataacaccatgccgtccgggggtaatagcgttagctccggtagcagtgtttcctcaacctctcttgacaccttatacacaagttcgtcccctagtgaacccggttccagttgcagccccactcctcctcctgtaccgagaagaggaacccacactaccgtgagccaggtacagccacctccttctaaggcatccgcacccgagcctcctgccgaagaagaggtagccaccggaactacatccgcatccgacgatctcgaggctctcggcacgctctcgctggggactacggaagagaaagccgctgccgaagctgccgtgccgagaaccatcggcgctgagctaatggagttggtcagacgaaataccggactttcccacgaactgtgtcgcgtggccataggtataatcgtgggccatatacaggccagcgtgcctgcctcctctcctgtgatggagcaggttcttctttctctggtggaggggaaagatctgtctatggccctcccctccggacaggtctgccatgatcagcaaagacttgaagttatattcgctgaccttgctcgccgaaaagacgacgcacagcagaggagttgggcactgtatgaggacgagggagtcatcagatgctacttagaggaactgctacacatcctcacagatgccgacccagaggtttgtaagaagatgtgcaaaaggaatgagtttgaatccgtactggccctagtagcctactaccaaatggagcaccgagcgagcctgcgactcctgctgctcaagtgctttggagctatgtgttcgctggacgcggctattatatcaactctggtgtctagcgttctgcctgtggagctggcgagagatatgcaaaccgacactcaagaccatcagaaactttgctactccgccctcatcttagcaatggtctttagcatgggcgaggccgtgccctacgctcattatgagcatcttggcaccccattcgcacaattcctgctcaatatcgtcgaggacggcctcccattggacactacagaacagctgcctgatctttgtgtgaaccttctgctcgctctaaatttacatctccctgcagctgatcagaacgtgataatggccgctcttagcaaacatgctaacgtcaagattttctccgagaagctgctcttactgctgaaccgaggggacgatcctgtgcgtattttcaaacatgaacctcaaccaccccactctgtgttaaagtttctacaggacgtttttggaagcccagctacagcggcaattttttaccacaccgacatgatggcattgatcgatatcaccgtgagacacattgcagacttaagccccggagataaactgaggatggagtatctttctctcatgcacgccatcgtgcgaacaaccccttatttgcagcatcgacaccgccttccagatctccaggcaattctgagaagaattctgaacgaagaggagacctccccccagtgtcagatggatcgaatgatagtgcgggagatgtgcaaagaattcctggtattaggcgaggccccttcctag

SEQ ID NO: 258218 - DNA, 2148 bp, Artificial Sequence
  derived and/or modified sequence
atgtacagagccctgtacgccttcagaagcgccgagcccaacgccctggccttcgccgccggcgagaccttcctggtgctggagagaagcagcgcccactggtggctggccgccagagccagaagcggcgagaccggctacgtgccccccgcctacctgagaagactgcagggcctggagcaggacgtgctgcaggccatcgacagagccatcgaggccgtgcacaacaccgccatgagagacggcggcaagtacagcctggagcagagaggcgtgctgcagaagctgatccaccacagaaaggagaccctgagcagaagaggccccagcgccagcagcgtggccgtgatgaccagcagcaccagcgaccaccacctggacgccgccgccgccagacagcccaacggcgtgtgcagagccggcttcgagagacagcacagcctgcccagcagcgagcacctgggcgccgacggcggcctgtaccagatccccccccagcccagaagagccgcccccaccaccccccccccccccgtgaagagaagagacagagaggccctgatggccagcggcagcggcggccacaacaccatgcccagcggcggcaacagcgtgagcagcggcagcagcgtgagcagcaccagcctggacaccctgtacaccagcagcagccccagcgagcccggcagcagctgcagccccacccccccccccgtgcccagaagaggcacccacaccaccgtgagccaggtgcagcccccccccagcaaggccagcgcccccgagccccccgccgaggaggaggtggccaccggcaccaccagcgccagcgacgacctggaggccctgggcaccctgagcctgggcaccaccgaggagaaggccgccgccgaggccgccgtgcccagaaccatcggcgccgagctgatggagctggtgagaagaaacaccggcctgagccacgagctgtgcagagtggccatcggcatcatcgtgggccacatccaggccagcgtgcccgccagcagccccgtgatggagcaggtgctgctgagcctggtggagggcaaggacctgagcatggccctgcccagcggccaggtgtgccacgaccagcagagactggaggtgatcttcgccgacctggccagaagaaaggacgacgcccagcagagaagctgggccctgtacgaggacgagggcgtgatcagatgctacctggaggagctgctgcacatcctgaccgacgccgaccccgaggtgtgcaagaagatgtgcaagagaaacgagttcgagagcgtgctggccctggtggcctactaccagatggagcacagagccagcctgagactgctgctgctgaagtgcttcggcgccatgtgcagcctggacgccgccatcatcagcaccctggtgagcagcgtgctgcccgtggagctggccagagacatgcagaccgacacccaggaccaccagaagctgtgctacagcgccctgatcctggccatggtgttcagcatgggcgaggccgtgccctacgcccactacgagcacctgggcacccccttcgcccagttcctgctgaacatcgtggaggacggcctgcccctggacaccaccgagcagctgcccgacctgtgcgtgaacctgctgctggccctgaacctgcacctgcccgccgccgaccagaacgtgatcatggccgccctgagcaagcacgccaacgtgaagatcttcagcgagaagctgctgctgctgctgaacagaggcgacgaccccgtgagaatcttcaagcacgagccccagcccccccacagcgtgctgaagttcctgcaggacgtgttcggcagccccgccaccgccgccatcttctaccacaccgacatgatggccctgatcgacatcaccgtgagacacatcgccgacctgagccccggcgacaagctgagaatggagtacctgagcctgatgcacgccatcgtgagaaccaccccctacctgcagcacagacacagactgcccgacctgcaggccatcctgagaagaatcctgaacgaggaggagaccagcccccagtgccagatggacagaatgatcgtgagagagatgtgcaaggagttcctggtgctgggcgaggcccccagctag

SEQ ID NO: 258219 - protein, 530 aa, Artificial Sequence
  derived and/or modified sequence
MADDIDIEAMLEAPYKKDENKLSSANGHEERSKKRKKSKSRSRSHERKRSKSKERKRSRDRERKKSKSRERKRSRSKERRRSRSRSRDRRFRGRYRSPYSGPKFNSAIRGKIGLPHSIKLSRRRSRSKSPFRKDKSPVREPIDNLTPEERDARTVFCMQLAARIRPRDLEEFFSTVGKVRDVRMISDRNSRRSKGIAYVEFVDVSSVPLAIGLTGQRVLGVPIIVQASQAEKNRAAAMANNLQKGSAGPMRLYVGSLHFNITEDMLRGIFEPFGRIESIQLMMDSETGRSKGYGFITFSDSECAKKALEQLNGFELAGRPMKVGHVTERTDASSASSFLDSDELERTGIDLGTTGRLQLMARLAEGTGLQIPPAAQQALQMSGSLAFGAVAEFSFVIDLQTRLSQQTEASALAAAASVQPLATQCFQLSNMFNPQTEEEVGWDTEIKDDVIEECNKHGGVIHIYVDKNSAQGNVYVKCPSIAAAIAAVNALHGRWFAGKMITAAYVPLPTYHNLFPDSMTATQLLVPSRR

SEQ ID NO: 258220 - protein, 193 aa, Artificial Sequence
  derived and/or modified sequence
MADDIDIEAMLEAPYKKDENKLSSANGHEERSKKRKKSKSRSRSHERKRSKSKERKRSRDRERKKSKSRERKRSRSKERRRSRSRSRDRRFRGRYRSPYSGPKFNSAIRGKIGLPHSIKLSRRRSRSKSPFRKDKSPVREPIDNLTPEERDARTVFCMQLAARIRPRDLEEFFSTVGKVRDVRMISDRNSRRS

SEQ ID NO: 258221 - protein, 337 aa, Artificial Sequence
  derived and/or modified sequence
  misc_feature (1)..(1): Xaa can be any naturally occurring amino acid
XSPFRKDKSPVREPIDNLTPEERDARTVFCMQLAARIRPRDLEEFFSTVGKVRDVRMISDRNSRRSKGIAYVEFVDVSSVPLAIGLTGQRVLGVPIIVQASQAEKNRAAAMANNLQKGSAGPMRLYVGSLHFNITEDMLRGIFEPFGRFSDSECAKKALEQLNGFELAGRPMKVGHVTERTDASSASSFLDSDELERTGIDLGTTGRLQLMARLAEGTGLQIPPAAQQALQMSGSLAFGAVAEFSFVIDLQTRLSQQTEASALAAAASVQPLATQCFQLSNMFNPQTEEEVGWDTEIKDDVIEECNKHGGVIHIYVDKNSAQGNVYVKCPSIAAAIA

SEQ ID NO: 258222 - DNA, 1593 bp, Artificial Sequence
  derived and/or modified sequence
atggccgacgacatcgacatcgaggccatgctggaggccccctacaagaaggacgagaacaagctgagcagcgccaacggccacgaggagagaagcaagaagagaaagaagagcaagagcagaagcagaagccacgagagaaagagaagcaagagcaaggagagaaagagaagcagagacagagagagaaagaagagcaagagcagagagagaaagagaagcagaagcaaggagagaagaagaagcagaagcagaagcagagacagaagattcagaggcagatacagaagcccctacagcggccccaagttcaacagcgccatcagaggcaagatcggcctgccccacagcatcaagctgagcagaagaagaagcagaagcaagagccccttcagaaaggacaagagccccgtgagagagcccatcgacaacctgacccccgaggagagagacgccagaaccgtgttctgcatgcagctggccgccagaatcagacccagagacctggaggagttcttcagcaccgtgggcaaggtgagagacgtgagaatgatcagcgacagaaacagcagaagaagcaagggcatcgcctacgtggagttcgtggacgtgagcagcgtgcccctggccatcggcctgaccggccagagagtgctgggcgtgcccatcatcgtgcaggccagccaggccgagaagaacagagccgccgccatggccaacaacctgcagaagggcagcgccggccccatgagactgtacgtgggcagcctgcacttcaacatcaccgaggacatgctgagaggcatcttcgagcccttcggcagaatcgagagcatccagctgatgatggacagcgagaccggcagaagcaagggctacggcttcatcaccttcagcgacagcgagtgcgccaagaaggccctggagcagctgaacggcttcgagctggccggcagacccatgaaggtgggccacgtgaccgagagaaccgacgccagcagcgccagcagcttcctggacagcgacgagctggagagaaccggcatcgacctgggcaccaccggcagactgcagctgatggccagactggccgagggcaccggcctgcagatcccccccgccgcccagcaggccctgcagatgagcggcagcctggccttcggcgccgtggccgagttcagcttcgtgatcgacctgcagaccagactgagccagcagaccgaggccagcgccctggccgccgccgccagcgtgcagcccctggccacccagtgcttccagctgagcaacatgttcaacccccagaccgaggaggaggtgggctgggacaccgagatcaaggacgacgtgatcgaggagtgcaacaagcacggcggcgtgatccacatctacgtggacaagaacagcgcccagggcaacgtgtacgtgaagtgccccagcatcgccgccgccatcgccgccgtgaacgccctgcacggcagatggttcgccggcaagatgatcaccgccgcctacgtgcccctgcccacctaccacaacctgttccccgacagcatgaccgccacccagctgctggtgcccagcagaagatag

SEQ ID NO: 258223 - DNA, 1593 bp, Artificial Sequence
  derived and/or modified sequence
atggcagacgacatcgatatcgaagccatgctggaggccccctacaagaaagatgagaataaattgagcagcgcgaatgggcacgaggagagatcaaagaagcgtaagaagtccaagagtagatcccgctcgcatgagcggaaacggagcaaatcaaaagaacggaaacgatcccgggaccgtgaaaggaagaaatctaagtcgcgggagcgtaagaggtccagatctaaagaaaggcgtaggtccagatccagaagtagagacagacggttccgaggtcggtatagatccccctattcgggacctaagttcaactccgccattcgtgggaagataggactcccacactcaatcaaactgagcagaagacggagtcgatcaaagagccctttccggaaggacaaatctcccgttcgagagcccatcgataacctgacgcccgaagaaagagacgcccgaacggttttttgtatgcagttagctgctcgcattcggcctcgcgatctcgaagagtttttctcaacagtgggtaaggtgagggatgtcagaatgatctctgacaggaattctaggcgtagtaagggtatagcttatgttgagttcgtggatgtgtccagtgtgcccctcgctataggcctcacagggcaacgggtgcttggggtgcccatcattgtacaggcctctcaggccgagaaaaatagggcagccgcaatggcgaacaacttacagaaaggatctgccggacccatgcggctatacgtcggcagcctgcatttcaatatcacggaagatatgctaaggggaatcttcgaacccttcgggcgaattgagtcgatccagttaatgatggatagtgagactggacggagtaaagggtacgggttcatcacattctctgattcggaatgcgctaagaaagctttggaacagctgaatgggtttgaattagctggcaggcctatgaaggttggacacgtcactgaacgtaccgatgcctcgagcgcctcgagttttctggacagtgacgaattggagaggaccgggattgatttgggtactactgggaggctgcaactgatggctagactcgccgaaggcacgggcctacagattccacccgctgcccagcaggccttgcagatgagcgggtctttggcttttggggctgttgctgagttcagctttgtgattgacctacaaacaagattatctcagcagacggaagccagtgccctggctgccgcagcatcagtccagccattagcaactcagtgctttcagttgtctaacatgttcaatccccagacagaagaggaggttggttgggatacagaaatcaaggatgatgttatagaagaatgtaacaaacacggaggtgtaattcatatttatgtggacaagaacagcgcccagggtaatgtgtacgtcaagtgccccagcattgctgcagccattgctgccgtgaacgcacttcacggaagatggtttgccgggaagatgatcacggcagcatatgttccgctgcccacttatcataacctgtttccagacagcatgacggcaacccagctgctcgttccctcccgtagatag

SEQ ID NO: 258224 - DNA, 1593 bp, Artificial Sequence
  derived and/or modified sequence
atggctgatgacattgatattgaggccatgctggaggccccctacaagaaggatgagaacaagctgagcagcgccaacggccacgaggagaggagcaagaagaggaagaagagcaagagccgcagccgcagccatgagaggaagaggagcaagagcaaggagaggaagaggagccgggaccgggagaggaagaagagcaagagccgggagaggaagaggagccgcagcaaggagcggcggcgcagccgcagccgcagccgggaccggcgcttccggggccgctaccgcagcccctacagcggccccaagttcaacagcgccatccggggcaagattggcctgccccacagcatcaagctgagcagaagaagaagccgcagcaagagccccttcaggaaggacaagagccctgtgcgggagcccatcgacaacctgaccccagaggagagagatgccaggacagtgttctgcatgcagctggccgcccgcatccggccccgggacctggaggagttcttcagcacagtgggcaaggtgagagatgtgaggatgatcagtgacaggaacagcagaagaagcaagggcatcgcctacgtggagtttgtggatgtgtcctctgtgcccctggccatcggcctgaccggccagagggtgctgggcgtgcccatcatcgtgcaggccagccaggccgagaagaacagagctgctgccatggccaacaacctgcagaagggcagcgctggccccatgaggctgtatgtgggcagcctgcacttcaacatcacagaggacatgctgcggggcatctttgagcccttcggccgcatcgagagcatccagctgatgatggattctgaaacaggccgcagcaagggctacggcttcatcaccttcagtgacagtgaatgtgccaagaaggccctggagcagctgaatggatttgagctggccggccggcccatgaaggtgggccacgtgacagagaggacagatgccagcagcgccagcagcttcctggacagtgatgagctggagaggactggaattgacctgggcaccaccggccgcctgcagctgatggcccggctggccgagggcaccggcctgcagatccccccagctgcccagcaggccctgcagatgagcggcagcctggcctttggagctgtggccgagttctcctttgtgattgacctgcagacccggctgagccagcagacagaggccagcgccctggccgctgctgcctctgtgcagcccctggccacccagtgcttccagctgagcaacatgttcaacccccagacagaggaggaggtgggctgggacacagagatcaaggatgatgtgattgaggagtgcaacaagcatggaggagtcatccacatctacgtggacaagaacagcgcccagggcaatgtgtatgtgaagtgccccagcattgctgctgccatcgctgctgtgaatgccctgcacggccgctggtttgctgggaagatgatcacagctgcctacgtgcccctgcccacctaccacaacctcttcccagacagcatgacagccacccagctgctggtgcccagcagaagatag

SEQ ID NO: 258225 - DNA, 1593 bp, Artificial Sequence
  derived and/or modified sequence
atggccgacgacatcgacatcgaggccatgctggaggccccctacaaaaaagacgagaataagctgagttctgccaatggccatgaggaacggtctaaaaagaggaagaaaagtaaatctcgatcgcgttcccatgagagaaagcggtccaaaagcaaggagcgcaaaaggagcagagatcgggagagaaagaaatcaaagtccagggagagaaagcgctctaggtccaaggagcggaggcggtccaggtccaggtctagagaccggaggttccgcggacgatatagaagcccctattctggcccaaagttcaactcagccattcgtggcaagatcggattgccacactccataaagctgtcaaggcgcaggagcaggtctaaaagccctttcaggaaggacaaaagtcccgtgagagagccaattgataatctgaccccagaggaaagggacgctaggactgtgttctgtatgcaactggcggcacggattcgccctcgcgatctggaggagttcttttcaacagtcggtaaggttcgggacgtgcggatgatcagcgatcgaaatagtcgccgaagtaaaggaatcgcatatgttgaatttgtcgatgtgagctcggttcctttggccattggtctcaccgggcagcgggtgttaggcgtgccaatcatcgtccaggccagccaggccgagaagaatcgggcagcggctatggctaataacctgcagaagggatccgcagggcctatgagattgtatgtcggcagcttacacttcaacatcacagaggatatgctgaggggtatattcgagcccttcggtaggattgagtccattcaattgatgatggacagcgaaaccggacggagcaaaggctacggattcattaccttctccgactccgaatgcgcgaagaaagcactggagcagcttaacggattcgaacttgcaggtagacccatgaaggtgggacacgtgacggaaaggacagatgcctcttcagcctcctctttcctggactccgatgaacttgaacgaaccggtatcgacttgggcacgactggcagactgcagctcatggccaggttagcggaagggaccggccttcagatacccccggcagcccagcaggcccttcaaatgtctggcagcttggcctttggagcagttgctgagttcagtttcgttattgatcttcagacacgcctgtctcaacagacagaggcaagcgcactggccgcagccgcctcagtgcaacctctggccacccagtgctttcagcttagcaatatgttcaacccccagacagaagaggaagtgggttgggacactgaaatcaaagatgacgtgatcgaagaatgcaacaaacatggcggcgtcatccatatttatgtggacaaaaatagtgcgcagggaaatgtttacgtcaaatgcccatccatcgcagctgcgatagccgcagtgaacgcactgcacggccggtggttcgctggaaagatgatcacggccgcatacgtgcctttgcccacttaccacaacctatttccagatagcatgacggcaacacagctgctggtaccctcaaggcggtag

SEQ ID NO: 258226 - DNA, 1593 bp, Artificial Sequence
  derived and/or modified sequence
atggctgacgatattgatatcgaagcaatgctggaggctccttacaagaaagacgagaacaaactatctagcgccaacgggcatgaggagaggtctaaaaagcgcaagaaatcaaaatcccgtagcaggagccatgagagaaaaaggagtaaatccaaggagcggaagagaagccgggatcgagaaaggaagaagtcaaaatcacgtgaacgaaaacgcagcaggtcgaaggaaaggcggaggagcagatctaggagtcgggataggcgatttaggggcagatataggagcccctatagtggtcctaagttcaattccgctattaggggtaagataggactcccccacagtattaagctgagcagaagaagatcaagatcaaaatcaccattcaggaaggacaagagcccagtcagagaacccattgataatctaaccccagaagaaagggatgctcgtacagtgttctgtatgcagctggcagcccgaattcggcctagggacctggaggaattcttctctaccgtgggtaaagtacgggacgtgcgtatgatctcggatcgcaattccagaaggtcgaaaggaatcgcctacgtagaattcgtggatgtgtcctccgtccctctcgccatagggctgacggggcaacgcgtgctgggagtaccaatcattgtacaggcttcacaggctgagaagaatcgcgcagctgctatggctaacaacctgcagaagggttccgccggaccaatgaggctgtacgtcgggagcctgcattttaatatcaccgaagacatgcttcgcggaattttcgagcccttcgggaggatcgagtctattcagctcatgatggacagcgaaaccgggagatctaagggatatggcttcatcacattctctgactccgaatgcgccaaaaaagccctggaacaactgaatggtttcgaactggcgggaaggcccatgaaggtgggccacgttaccgaacggactgatgccagtagcgcgtcttcgttcctcgactctgatgagctagaaagaaccgggatcgatttgggaactaccgggaggttgcaactgatggccaggttagcagaaggaacaggcttgcagatccctccagccgcacagcaggctctgcagatgtccggatctctggcctttggcgcagtggcagagttcagtttcgttatcgacctgcagactcggttgtcccagcagacagaggcctcagccctggccgctgccgctagcgtgcaacctcttgctacgcagtgcttccagctaagtaatatgtttaatcctcagacagaggaagaggtcggctgggacactgaaattaaagatgatgtgattgaagagtgtaataaacatggaggagtgatccatatttatgtagataagaattctgctcagggtaatgtgtacgtgaagtgtccttctattgctgctgccatcgctgcagtcaatgccctccatggccgatggtttgccggaaagatgataaccgctgcatatgtcccattgcccacctaccataacttatttcccgacagcatgactgccactcaactgctggtcccctcacgcaggtag

SEQ ID NO: 258227 - DNA, 2488 bp, Artificial Sequence
  derived and/or modified sequence
ggccggaacaggcgtttagagaaaatggcagacgatattgatattgaagcaatgcttgaggctccttacaagaaggatgagaacaagttgagcagtgccaacggccatgaagaacgtagcaaaaagaggaaaaaaagcaagagcagaagtcgtagtcatgaacgaaagagaagcaaaagtaaggaacggaagcgaagtagagacagagaaaggaaaaagagcaaaagccgtgaaagaaagcgaagtagaagcaaagagaggcgacggagccgctcaagaagtcgagatcgaagatttagaggccgctacagaagtccttactccggaccaaaatttaacagtgccatccgaggaaagattgggttgcctcatagcatcaaattaagcagacgacgttcccgaagcaaaagtccattcagaaaagacaagagccctgtgagagaacctattgataatttaactcctgaggaaagagatgcaaggacagtcttctgtatgcagctggcggcaagaattcgaccaagggatttggaagagtttttctctacagtaggaaaggttcgagatgtgaggatgatttctgacagaaattcaagacgttccaaaggaattgcttatgtggagttcgtcgatgttagctcagtgcctctagcaataggattaactggccaacgagttttaggcgtgccaatcatagtacaggcatcacaggcagaaaaaaacagagctgcagcaatggcaaacaatttacaaaagggaagtgctggacctatgaggctttatgtgggctcattacacttcaacataactgaagatatgcttcgtgggatctttgagccttttggaagaattgaaagtatccagctgatgatggacagtgaaactggtcgatccaagggatatggatttattacattttctgactcagaatgtgccaaaaaggctttggaacaacttaatggatttgaactagcaggaagaccaatgaaagttggtcatgttactgaacgtactgatgcttcgagtgctagttcatttttggacagtgatgaactggaaaggactggaattgatttgggaacaactggtcgtcttcagttaatggcaagacttgcagagggtacaggtttgcagattccgccagcagcacagcaagctctacagatgagtggctctttggcatttggtgctgtggcagaattctcttttgttatagatttgcaaacaagactttcccagcagactgaagcttcagctttagctgcagctgcctctgttcagccacttgcaacacaatgtttccaactctctaacatgtttaaccctcaaacagaagaagaagttggatgggataccgagattaaggatgatgtgattgaagaatgtaataaacatggaggagttattcatatttatgttgacaaaaattcagctcagggcaatgtgtatgtgaagtgcccatcaattgctgcagctattgctgctgtcaatgcattgcatggcaggtggtttgctggtaaaatgataacagcagcatatgtacctcttccaacttaccacaacctgtttcctgattctatgacagcaacacagctactggttccaagtagacgatgaaggaagatatagtcccttatgtatatagctttttttctttcttgagaattcatcttgagttatcttttatttagataaaaataaagaggcaaggatctactgtcatttgtatgcaatttcctgttaccttgaaaaaataaaaatgttaacaggaatgcagtgtgctcattctccctaaatagtaaatcccactgtatacaaaactgttctcttgttctgccttttaaaatgttcatgtagaaaattaatgaactataggaatagctctaggagaacaaatgtgctttctgtaaaaaggcagaccagggatgtaatgtttttaatgtttcagaagcctaactttttacacagtggttacatttcacatttcactaatgttgatatttggctgatggttgagcagtttctgaaatacacatttagtgtatggaaatacaagacagctaaagggctgtttggttagcatctcatcttgcattctgatcaattggcaagaaagggagatttcaaaattatatttcttgatggtatcttttcaattaatgtatctgtaaaagtttctttgtaaatactatgtgttctggtgtgtcttaaaattccaaacaaaatgatccctgcatttcctgaagatgtttaaacgtgagagtctggtaggcaaagcagtctgagaaagaaataggaaatgcagaaataggttttgtctggttgcatataatctttgctctttttaagctctgtgagctctgaaatatatttttgggttacttcagtgtgtttgacaagacagcttgatatttctatcaaacaaatgactttcatattgcaacaatctttgtaagaaccactcaaataaaagtctcttaaaaaggcc

SEQ ID NO: 258228 - DNA, 2147 bp, Artificial Sequence
  derived and/or modified sequence
gtgctggtgaatgtgagtacagggaagcagcggccgccatttcagggagcttgtcgacgctgtcgcaggggtggatcctgagctgccgaagccgccgtcctgctctcccgcgtgggcttctctaattccattgttttttttagattctctcgggcctagccgtccttggaacccgatattcgggctgggcggttccgcggcctgggcctaggggcttaacagtagcaacagaagcggcggcggcggcagcagcagcagcagcagcagcaatctcttcccgaacacgagcaccacaggcgcccgaaggccggaacaggcgtttagagaaaatggcagacgatattgatattgaagcaatgcttgaggctccttacaagaaggatgagaacaagttgagcagtgccaacggccatgaagaacgtagcaaaaaacaaactttctgcctccttggaaagctctacatctccttgtgattggagtgtgggtttcaagattccagaaggaggaaaaaaagcaagagcagaagtcgtagtcatgaacgaaagagaagcaaaagtaaggaacggaagcgaagtagagacagagaaaggaaaaagagcaaaagccgtgaaagaaagcgaagtagaagcaaagagaggcgacggagccgctcaagaagtcgagatcgaagatttagaggccgctacagaagtccttactccggaccaaaatttaacagtgccatccgaggaaagattgggttgcctcatagcatcaaattaagcagacgacgttcccgaagcaaaagtccattcagaaaagacaagagccctgtgagagaacctattgataatttaactcctgaggaaagagatgcaaggacagtcttctgtatgcagctggcggcaagaattcgaccaagggatttggaagagtttttctctacagtaggaaaggttcgagatgtgaggatgatttctgacagaaattcaagacgttccaaaggaattgcttatgtggagttcgtcgatgttagctcagtgcctctagcaataggattaactggccaacgagttttaggcgtgccaatcatagtacaggcatcacaggcagaaaaaaacagagctgcagcaatggcaaacaatttacaaaagggaagtgctggacctatgaggctttatgtgggctcattacacttcaacataactgaagatatgcttcgtgggatctttgagccttttggaagaattgaaagtatccagctgatgatggacagtgaaactggtcgatccaagggatatggatttattacattttctgactcagaatgtgccaaaaaggctttggaacaacttaatggatttgaactagcaggaagaccaatgaaagttggtcatgttactgaacgtactgatgcttcgagtgctagttcatttttggacagtgatgaactggaaaggactggaattgatttgggaacaactggtcgtcttcagttaatggcaagacttgcagagggtacaggtttgcagattccgccagcagcacagcaagctctacagatgagtggctctttggcatttggtgctgtggcagaattctcttttgttatagatttgcaaacaagactttcccagcagactgaagcttcagctttagctgcagctgcctctgttcagccacttgcaacacaatgtttccaactctctaacatgtttaaccctcaaacagaagaagaagttggatgggataccgagattaaggatgatgtgattgaagaatgtaataaacatggaggagttattcatatttatgttgacaaaaattcagctcagggcaatgtgtatgtgaagtgcccatcaattgctgcagctattgctgctgtcaatgcattgcatggcaggtggtttgctggtaaaatgataacagcagcatatgtacctcttccaacttaccacaacctgtttcctgattctatgacagcaacacagctactggttccaagtagacgatgaaggaagatatagtcccttatgtatatagctttttttctttcttgagaattcatcttgagttatcttttatttagataaaaataaagaggcaaggatctactgtcatttgtatgcaatttcctgttaccttgaaaaaataaaaatgttaacagg

SEQ ID NO: 258229 - protein, 520 aa, Artificial Sequence
  derived and/or modified sequence
MEVLESGEQGVLQWDRKLSELSEPGDGEALMYHTHFSELLDEFSQNVLGQLLNDPFLSEKSVSMEVEPSPTSPAPLIQAEHSYSLCEEPRAQSPFTHITTSDSFNDDEVESEKWYLSTDFPSTSIKTEPVTDEPPPGLVPSVTLTITAISTPLEKEEPPLEMNTGVDSSCQTIIPKIKLEPHEVDQFLNFSPKEAPVDHLHLPPTPPSSHGSDSEGSLSPNPRLHPFSLPQTHSPSRAAPRAPSALSSSPLLTAPHKLQGSGPLVLTEEEKRTLIAEGYPIPTKLPLSKSEEKALKKIRRKIKNKISAQESRRKKKEYMDSLEKKVESCSTENLELRKKVEVLENTNRTLLQQLQKLQTLVMGKVSRTCKLAGTQTGTCLMVVVLCFAVAFGSFFQGYGPYPSATKMALPSQHSLQEPYTASVVRSRNLLIYEEHSPPEESSSPGSAGELGGWDRGSSLLRVSGLESRPDVDLPHFIISNETSLEKSVLLELQQHLVSAKLEGNETLKVVELDRRVNTTF

SEQ ID NO: 258230 - protein, 175 aa, Artificial Sequence [sequence omitted]

SEQ ID NO: 258231 - protein, 460 aa, Artificial Sequence
  derived and/or modified sequence
MEVLESGEQGVLQWDRKLSELSEPGDGEALMYHTHFSELLDEFSQNVLGQLLNDPFLSEKSVSMEVEPSPTSPAPLIQAEHSYSLCEEPRAQSPFTHITTSDSFNDDEVESEKWYLSTDFPSTSIKTEPVTDEPPPGLVPSVTLTITAISTPLEKEEPPLEMNTGVDSSCQTIIPKIKLEPHEVDQFLNFSPKEAPVDHLHLPPTPPSSHGSDSEGSLSPNPRLHPFSLPQTHSPSRAAPRAPSALSSSPLLTAPHKLQGSGPLVLTEEEKRTLIAEGYPIPTKLPLSKSEEKALKKIRRKIKNKISAQESRRKKKEYMDSLEKKVESCSTENLELRKKVEVLENTNRTLLQQLQKLQTLVMGKVSRTCKLAGTQTGTCLMVVVLCFAVAFGSFFQGYGPYPSATKMALPSQHSLQEPYTASVGKTACGKLGRVLFYFPRAGFLSLPKGIFCESPMFKKW

SEQ ID NO: 258232 - protein, 150 aa, Artificial Sequence
  derived and/or modified sequence
MEVLESGEQGVLQWDRKLSELSEPGDGEALMYHTHFSELLDEFSQNVLGQLLNDPFLSEKSVSMEVEPSPTSPAPLIQAEHSYSLCEEPRAQSPFTHITTSDSFNDDEVESEKWYLSTDFPSTSICHSDHHSHLHPVGKGGTSSGNEHWG

SEQ ID NO: 258233 - DNA, 7455 bp, Artificial Sequence
  derived and/or modified sequence
ctgggtcctggagcagagccgaggagccctggggtccctcaaagtttgtgtctggagccgtagcggcaagtgggcttgcggctaagggattttcctgggatgagagcgggtcttctgccttcattttggatgcacatcccgctttagccccggcagcctttggtccggctcgtgtccctggggattctcggatctccgaggacaccggacgggagcgcttggccatcctctctccggcagaggagcagacgtttgctttccaagtgcaaaactacagacacgcgcgcgcacacacgcaagcacacgcggagagagaggaaccttgccggtccgaggcagctctgcgcgtcccctcctgcgcttagcatcctcggcccagcgcggcccgcaccgccatggaggtgctggagagcggggagcagggcgtgctgcagtgggaccgcaagctgagcgagctgtcagagcccggggacggcgaggccctcatgtaccacacgcacttctcagaacttctggatgagttttcccagaacgtcttgggtcagctcctgaatgatcctttcctctcagagaagagtgtgtcaatggaggtggaaccttccccgacgtccccggcgcctctcatccaggctgagcacagctactccctgtgcgaggagcctcgggcccagtcgcccttcacccacattaccaccagtgacagcttcaatgacgatgaggtggaaagtgagaaatggtacctgtctacagacttcccttcaacatccatcaagacagagccagttacagacgaaccacccccaggactcgttccgtctgtcactctgaccatcacagccatctccaccccgttggaaaaggaggaacctcctctggaaatgaacactggggttgattcctcgtgccagaccattattcctaaaattaagctggagcctcatgaagtggatcagtttctaaacttctctcctaaagaagccccagtggaccacctgcatttgccgcccacccctccgagcagtcacggcagtgactcagagggcagcctgagtcccaacccacgcctgcaccccttcagcctgcctcagacccacagcccctccagagctgcaccccgggccccctccgccctctccagctcccctctcctcacggctcctcataaactgcagggatcaggccctctggtcctgacagaggaggagaagaggaccctgatcgctgagggctatcccatccccaccaaattgcccctgtcaaaatcagaggagaaggccctgaagaaaattcggaggaagatcaagaataagatttctgctcaggaaagtaggagaaagaagaaagaatacatggacagcctggagaaaaaagtggagtcttgttcaactgagaacttggagcttcggaagaaggtagaggttctagagaacactaataggactctccttcagcaactccagaagcttcagactttggtgatgggcaaggtttctcgaacctgcaagttagctggcacgcagactggcacctgcctcatggttgtggtgctgtgctttgccgttgcattcggcagcttctttcaaggctacgggccctatccttctgccaccaagatggctctgcccagccagcattccctgcaggagccctacacagcctccgtggtgagatccagaaacctgctgatctacgaggaacattctcccccagaggagtcatccagcccgggctcggctggggagctggggggctgggatagaggttcctccctgctcagggtgtcagggctggagtccaggccggatgtggatcttccccatttcattatctcgaatgagaccagcctggagaagtcagtgcttttggagctgcagcagcacctggtcagcgccaaactggaggggaatgaaacactaaaagttgtagaactcgacagaagagtgaacaccactttctaaagaggctgcctgcaccccctccctttcccttaactctacttttacatccccaaaccacctttgtcatcagcttttcctctttgccactggatcttcatggagacatgggcaagcattagtggcttcagattggagaccagcctgggacttccctgcagtgagagagcatctccccctggtccatgcccctcctgtgcagaagggagcctgcatccctcccttcctttctcttactgccataggaaattattttaggggttggaggtgggacaagcaggcttgtttccaccaatagtgccaaaaagatattgcctaatgtgcacctgtgaggtgtaaccccccgctttggagacgagatggctcttgttcagtcaagaccccagactctggccacaaaaatgccataatgcctgttggtatttggcaaagcactgacccgtgtcctccgttgctcgcactggggtctctggtgtgaacacccccgacagcagccctccgcccactctgccccctgggagccctcgctggatcgtctcgtctcctgcagcagcactggcaggcgagggctctcgttcatattctcaggccgcaagtgcaatgcctgaggggatcaggcttttctactccaggcaaacctgccccatcttgtcgcttttaggacctcccacaacctggttccccacacatccatagttctgcctccccagcttctcctccccagttgtaaatagtatttattagcttgccgaggcttcctgctagcaaccacactgaagagatcgatgcctcctttcaagctagccaagttttctgcgagccttcagagctaggagggcaccctaggctctgggatcccgtgtctttccagacaatgttttgtttcctttcctttgttttttcttttaactggaataattaccattgaaaaagaagttcctttgagcatgtatgtgtctgcctctaggatgagctcagagcgagagatgacacaatgcctcactcaggccccgggctccctggccacaagctttttctatcctgttttcatgacagagaaggggaagccctgttctgacaacagacatttcagacaaccttgctggctttccacacctgcctggccccctcctccctccacacttccactttgtcctcctcgtcccctacctcaacaaagcagggtggggtaggtgacatttgtgtatccacattcttacctttggtagtcaggtttggctactttgcagctcgcccaaagagatacaacctaatccccaacctacttttagtttttttgttttttttttatggttaaaagtaacttttgtagtttaaaaaaatctttcctctttcatataaataagaagtggaaattgcctttttattgtgtaatgtagaaaaccctcaagtgttttttccgagcttgggaaagattttgtgtaggaaatgtgcatagagtttgtattttatttttattagcagctgaaatgcctttggttttggcttctctctctccctctctctctctgtctctccttctctctctccccccaccacccacccccacacacgtcatctgcattgttattggagcctgtacttagagggattaagcccacaccctggcttccattccatatcaggtacaggatttgatgttattaacatttgtcgtcatacctcataagtcggtccctgccttgtctgtctaggcccatttggggctccctgtgagtgattcccctctctctgctatgctggagacggttccagcctggaaagcggccaagttcatcttctcactgtgagtggaagctggatcgggcccccgtagtcctggcagccctgttgtctggagggttcttgttgtccctcccattagccagggcggagactgtctgagctgtgcaggaggagggttgctagtaggttctgcttctgcttctctctgctccactgtctgcagcccagatcctgttgggcctggctggtgtctggtaaccatgggcctccactgacccatccctctcttttaaactgtcaggtcattatcaggcataggcagcctatagggcccaaagaaggcaaaaagataagatttactcaagtagcatttgggcaatgaggaaggaaaggtttcaaatttaggggcagaagtgagagaatgagccaacccatgtacctgctgcaactgaaccagactgggttttcaaggctcccagacgtagagtaggaaacgtgctcttctaaatgaggagggagaagataaaggaaacttctagcccctgtccttagtgctttgaggattttattttctcccttactacgcttgcttgacgtcactctctctcgacctccaaacagcaggactctttctctgggaaaccatccttccaaaacggaatctatgtagacaatgggacgttaggcagagagctcagatggcccttttaagggggctccaagaaccaacatcactgctcttttagataaacctctgccctccactccttgcttgagtgggttaaaggaactaacagttgtccctttaggaggacaaaatggggtcaagaggacacagaagagttgtatagcaccagattggttccaaatagttaatggatgtgtgcacattttctgttcagggattaagaccagaatatcagtggatttgttttccccaccaagtggcctcttagactagtcattaacttatgattagctctaaagatttcaaatagtggcagacagtgtcttctgaatgtaagttttgagaaatacgagtctgtcagagcggccataagccataaagagtcaatctcttaattatatttttcatcatgtaaacaagtttcccatttccctttcttagattgcaccagtgaaggagatgttttgcaaagattcagagaactaatttttcactggataagacctgagtaacccagaccccccaccgtggttcttttcacagccctcgactttgcacttaaaaagggatattgtaaatgaaaggctgcagtgccagttttaagaaagaatttctgtgaagtgtgaggactctggagtctagctcacataaagagagtgttatataaaaatccgacagctgaactaggttgctcttttttggcagggagtggggatgagatttgacaccaatatgggcaaaattagataaccttttggttaatataaatgattttgatttggaggcctaatttgtagattgtgaaagcagcttttagtttaacttattcacagaccccttataattaccatgtttttttttttcttcctaaatctcttggttcagcttgtgaatcttacgtgcccgtaaagttgggatgttgaattggctcttctttgttctggcagtgagtcaagtgtccagcattttttcataagtgttttttaaaattgttctccagcattttatggctcctccctcccatgtcctcagacccagcaaaagcgtagaggcagaattagaggcctctccaggccagctcctctgcccacatgtcatacaaggtgtgaatttgagcacagtccagaaatggagacatcccacccccagttgaataatggcccattcatgccaaccttgccaacacggagagggcagagatgcactagaagaccttcatcctccccttcctctgccccaagtcactacagttggttctattgaagccagtctttaagaaacctgggttaaagacaccagcacttctgcttgctgggctggctggacctgtgaagccatgggcaggtagtgccctcttgagagtcattttatttggccaccttcaggtgagactatccatagacacatgctaggataggccccgctgggagggcagttacaggagagagtaggtggtggtgacgtgagggctgtgaaggatccagagacaagacttagatgtttcgttcattcactcactcattcagttactcctaagacttttcagtttcataaggaagagtgttgcctgaggccctagggaatattggggaatagaagggattgaggaaacattaataatagttattcaaaagacccaaatgcttatacttctctctcccttcttctctctctgacacacacacacacacacacacacacacacacacacacgtgcacattcctcccttacatgctcatttgtgccttaaatgtgccttataggtaaatccaggatgactgaggaatccctcgtcactgggagattttgtatatattcttttattattagattgagttgggtgtggggaaaaatttttttctgaaggctcaaaagtggtttcctaaaagtgagccactatcagatttgcacatcaggagaaaagaaatagggttacgtccattaggaaaatcccagtttgcaggagtgcaatcacatcaaaaaaacaaccagccaggattaaaggtattataaatcctcatagcggaacatttctcagggcaaaggaacctggctcatttgaagattaatgttccatgcctttgtggtcaaagggtcagcacttaacacaggaaaaaactaggtgttgttttgttttgttattttggacaacataaaattcaggaatgttttatttagccttggtttctagaaggaagggaaataatatttcttgagcatttactagggtgttgcgtgctgtgctaagtaaattttaagtctttcagttttatagatacggaaaacaagggtgactctttaccacaggatgaataaagaactaagtaatatgggaaatgcagcaatttctggactagctgagccgattccttcctgtgagcacactgtaagctttcaagttctctgggcaggaattacagcacctgtcccctgcaatggccctgctgtgtgatgctcatcgcttcccttcgtgctggagcagtcccccaggtgtccatctcctatctttttgttccaatcttctgtgagttccagctagcaggctttacatctggggaaaggaaaaccaggggttttagctctgttctctgctcccatccttcgctcaccagctgagtgagaacatgaactttttgcaccatgtacccatggcttacactacttagaaaatcaccttttcagataaaacagtttatgagttcatagagaacaccagcactctttgacaaaactgtgagtgaccctttttaaacaatgctgagcaggccctgagctataatcaacggtgagctttaatgtctatgctgacagttaggttttgctctcttttgtaacaggttacgtagaccagcagtgtttaaatctaaatacgttgtgagtctgttatctgtcctatcgcgttttttaaatgactttttattctttatcatagctaagtaaataccaaaaaaaaaaaaaagctttgtaggacacttgtacttagtttgggaaaaaaaaataaattgaaattgttatgcttttgtatttccatttcttgcaaataaatattttttcttaaatagtaa

SEQ ID NO: 258234 - DNA, 1563 bp, Artificial Sequence
  derived and/or modified sequence
atggaggtgctggagagcggcgagcagggcgtgctgcagtgggacagaaagctgagcgagctgagcgagcccggcgacggcgaggccctgatgtaccacacccacttcagcgagctgctggacgagttcagccagaacgtgctgggccagctgctgaacgaccccttcctgagcgagaagagcgtgagcatggaggtggagcccagccccaccagccccgcccccctgatccaggccgagcacagctacagcctgtgcgaggagcccagagcccagagccccttcacccacatcaccaccagcgacagcttcaacgacgacgaggtggagagcgagaagtggtacctgagcaccgacttccccagcaccagcatcaagaccgagcccgtgaccgacgagcccccccccggcctggtgcccagcgtgaccctgaccatcaccgccatcagcacccccctggagaaggaggagccccccctggagatgaacaccggcgtggacagcagctgccagaccatcatccccaagatcaagctggagccccacgaggtggaccagttcctgaacttcagccccaaggaggcccccgtggaccacctgcacctgccccccaccccccccagcagccacggcagcgacagcgagggcagcctgagccccaaccccagactgcaccccttcagcctgccccagacccacagccccagcagagccgcccccagagcccccagcgccctgagcagcagccccctgctgaccgccccccacaagctgcagggcagcggccccctggtgctgaccgaggaggagaagagaaccctgatcgccgagggctaccccatccccaccaagctgcccctgagcaagagcgaggagaaggccctgaagaagatcagaagaaagatcaagaacaagatcagcgcccaggagagcagaagaaagaagaaggagtacatggacagcctggagaagaaggtggagagctgcagcaccgagaacctggagctgagaaagaaggtggaggtgctggagaacaccaacagaaccctgctgcagcagctgcagaagctgcagaccctggtgatgggcaaggtgagcagaacctgcaagctggccggcacccagaccggcacctgcctgatggtggtggtgctgtgcttcgccgtggccttcggcagcttcttccagggctacggcccctaccccagcgccaccaagatggccctgcccagccagcacagcctgcaggagccctacaccgccagcgtggtgagaagcagaaacctgctgatctacgaggagcacagcccccccgaggagagcagcagccccggcagcgccggcgagctgggcggctgggacagaggcagcagcctgctgagagtgagcggcctggagagcagacccgacgtggacctgccccacttcatcatcagcaacgagaccagcctggagaagagcgtgctgctggagctgcagcagcacctggtgagcgccaagctggagggcaacgagaccctgaaggtggtggagctggacagaagagtgaacaccaccttctag

SEQ ID NO: 258235 - DNA, 1383 bp, Artificial Sequence
  derived and/or modified sequence
atggaggtgctggagagcggcgagcagggcgtgctgcagtgggacagaaagctgagcgagctgagcgagcccggcgacggcgaggccctgatgtaccacacccacttcagcgagctgctggacgagttcagccagaacgtgctgggccagctgctgaacgaccccttcctgagcgagaagagcgtgagcatggaggtggagcccagccccaccagccccgcccccctgatccaggccgagcacagctacagcctgtgcgaggagcccagagcccagagccccttcacccacatcaccaccagcgacagcttcaacgacgacgaggtggagagcgagaagtggtacctgagcaccgacttccccagcaccagcatcaagaccgagcccgtgaccgacgagcccccccccggcctggtgcccagcgtgaccctgaccatcaccgccatcagcacccccctggagaaggaggagccccccctggagatgaacaccggcgtggacagcagctgccagaccatcatccccaagatcaagctggagccccacgaggtggaccagttcctgaacttcagccccaaggaggcccccgtggaccacctgcacctgccccccaccccccccagcagccacggcagcgacagcgagggcagcctgagccccaaccccagactgcaccccttcagcctgccccagacccacagccccagcagagccgcccccagagcccccagcgccctgagcagcagccccctgctgaccgccccccacaagctgcagggcagcggccccctggtgctgaccgaggaggagaagagaaccctgatcgccgagggctaccccatccccaccaagctgcccctgagcaagagcgaggagaaggccctgaagaagatcagaagaaagatcaagaacaagatcagcgcccaggagagcagaagaaagaagaaggagtacatggacagcctggagaagaaggtggagagctgcagcaccgagaacctggagctgagaaagaaggtggaggtgctggagaacaccaacagaaccctgctgcagcagctgcagaagctgcagaccctggtgatgggcaaggtgagcagaacctgcaagctggccggcacccagaccggcacctgcctgatggtggtggtgctgtgcttcgccgtggccttcggcagcttcttccagggctacggcccctaccccagcgccaccaagatggccctgcccagccagcacagcctgcaggagccctacaccgccagcgtgggcaagaccgcctgcggcaagctgggcagagtgctgttctacttccccagagccggcttcctgagcctgcccaagggcatcttctgcgagagccccatgttcaagaagtggtag

SEQ ID NO: 258236 - DNA, 1563 bp, Artificial Sequence
  derived and/or modified sequence
atggaagttcttgagagcggtgagcagggggttctgcagtgggacagaaagctcagcgaactcagcgaacctggagacggagaagctctgatgtaccatacccacttctcagaacttctcgacgaattctcacagaacgttcttggccaactgctcaatgatcccttcctaagtgaaaaatccgtaagcatggaggtggagccatcgccaactagcccagcgccgcttattcaggctgagcactcctatagtctgtgtgaggagccacgcgcacagtcaccctttacacacatcactacatctgattccttcaatgacgatgaggtggagtccgagaagtggtatctgtccacggactttccaagcacttccataaaaactgagccggtgacagacgagccacccccaggtttggtgccaagcgtcacactgacaattactgccattagtaccccactggagaaggaggaacccccgctcgaaatgaatactggcgtcgacagctcctgtcagacaatcattccgaaaataaagcttgaacctcacgaagttgaccaattcctaaatttttcccctaaggaggctcccgttgaccacctgcacctgccacccacaccgccttccagccacgggtccgatagtgaagggagtcttagtcctaaccctaggctccacccgttcagccttccccaaactcatagcccttctagagctgccccaagagctccctcagctctcagctcctcacccttactgacagccccacacaaattgcagggctccgggccgctggtactcacagaagaagagaagcgcactctcattgccgagggctacccaatcccaaccaagctgcctctgagcaagagtgaagagaaggccctgaaaaagatcaggcggaaaattaagaataaaataagcgctcaggagagccgccgcaagaagaaagaatatatggactcactggagaaaaaagtggaatcttgcagtaccgagaacttggaactgagaaagaaagtcgaagtcctggagaacaccaaccggaccctccttcaacagctccagaaactgcagaccctcgtaatgggaaaggtgtctaggacctgtaagcttgcgggtacgcagaccggtacctgtctgatggtggtggtcctctgctttgcggtagccttcgggagcttttttcaggggtacgggccttacccatctgcgacaaagatggctctgccgtcacagcattccctgcaggagccctatactgcgagtgtggtgcgatctaggaacttactgatctatgaagagcattctccacccgaagagtcctcatctcctgggtcagcaggcgaactgggtgggtgggatcggggcagctccctgctgcgagtgtcagggctcgaaagcaggcccgatgtggaccttccacacttcattattagtaatgagaccagtctcgaaaaaagcgtgctcctggaattacagcagcatctggtgagtgctaagttggagggcaatgagacgcttaaggtcgtggagttggacaggcgcgtgaacacgacattctag

SEQ ID NO: 258237 - DNA, 1383 bp, Artificial Sequence
  derived and/or modified sequence
atggaggttctagaatcaggcgaacagggtgtcctacagtgggataggaagctgagtgagctttctgaaccgggggacggagaagctctcatgtatcatacccatttctccgagctactcgacgagttctcgcagaacgtgctcggtcagctgctgaacgatcccttcctgagcgagaaatccgtcagcatggaggttgaacctagtcccacgagccccgcgccattgatacaggctgagcatagctattctctgtgtgaggaaccccgagcccagagccctttcacacacatcacaacatccgattcatttaacgacgacgaggtggagtccgaaaagtggtatctaagcaccgatttcccgagcacctctattaagacggaacccgtgacagacgagcccccccctggcttagtgccttccgtgaccctcactataactgcgattagcacacccctcgagaaggaagaacctccgttggagatgaacaccggggtggatagctcctgccagaccataattcctaagatcaagctcgagcctcatgaggtagaccaattcctcaacttctctccaaaagaggcccctgtagaccatttgcaccttccgccaactcccccctcatctcatggttctgactcagagggctcactgtcacccaatccccggctccacccattcagtctcccacagactcattccccatctagggctgctccacgggcgccaagcgccctcagcagctcccctctgttgacagccccgcacaaactccaagggagtggacctctcgtgctgacagaagaagagaagcggacactaatcgccgagggctaccctatcccaaccaaactgccgttatcaaagtccgaggaaaaagccttgaagaaaatacgccgtaaaattaaaaacaaaatttccgcccaggagtctaggaggaagaagaaggagtacatggattctctggaaaagaaggtggagagctgcagcacagaaaacctggagctgcggaagaaagtcgaagtattggagaatactaatcgtaccttgctgcagcagctacaaaagttgcagacactggtcatgggcaaagtgtccaggacttgcaagctggccgggactcaaacaggaacgtgtctaatggtggttgtcctatgcttcgctgtcgctttcggatcattcttccagggttacggaccctacccaagtgcaacgaagatggccctcccttctcagcattccttgcaagagccttacaccgccagcgtggggaaaaccgcttgtggaaagctcgggcgtgtgctgttctatttccccagagctggatttctctccctgcctaagggcatattctgcgaatctcctatgttcaaaaagtggtag

SEQ ID NO: 258238 - DNA, 1563 bp, Artificial Sequence
  derived and/or modified sequence
atggaggtgctggagagcggggagcagggcgtgctgcagtgggacaggaagctgtctgagctgtctgagcctggagatggagaggccctgatgtaccacacccacttcagcgagctgctggatgagttcagccagaatgtgctgggccagctgctgaatgaccccttcctgtctgagaagtctgtgtccatggaggtggagcccagccccaccagccctgcccccctcatccaggccgagcacagctacagcctgtgtgaggagccccgggcccagagccccttcacccacatcaccaccagtgacagcttcaatgatgatgaggtggagagcgagaagtggtacctgagcacagacttccccagcaccagcatcaagacagagcctgtgacagatgagcccccacctggcctggtgcccagcgtgaccctgaccatcacagccatcagcacccccctggagaaggaggagccccccctggagatgaacacaggagtggacagcagctgccagaccatcatccccaagatcaagctggagccccatgaggtggaccagttcctgaacttcagccccaaggaggcccctgtggaccacctgcacctgccccccaccccacccagcagccacggcagtgacagcgagggcagcctgagccccaacccccggctgcaccccttcagcctgccccagacccacagccccagccgggccgccccccgggcccccagcgccctgagcagcagccccctgctgacagccccccacaagctgcagggcagcggccccctggtgctgacagaggaggagaagaggaccctgattgctgagggctaccccatccccaccaagctgcccctgagcaagtctgaggagaaggccctgaagaagatccggaggaagatcaagaacaagatcagcgcccaggagagcaggaggaagaagaaggagtacatggacagcctggagaagaaggtggagagctgcagcacagagaacctggagctgaggaagaaggtggaggtgctggagaacaccaacagaaccctgctgcagcagctgcagaagctgcagaccctggtgatgggcaaggtgtccaggacctgcaagctggccggcacccagacaggcacctgcctgatggtggtggtgctgtgctttgctgtggccttcggcagcttcttccagggctacggcccctaccccagcgccaccaagatggccctgcccagccagcacagcctgcaggagccctacacagcctctgtggtgcgcagcaggaacctgctgatctatgaggagcacagccccccagaggagagcagcagccctggcagcgctggggagctgggcggctgggaccggggcagcagcctgctgcgggtgtctggcctggagagcaggccagatgtggacctgccccacttcatcatcagcaatgagaccagcctggagaagtctgtgctgctggagctgcagcagcacctggtgtctgccaagctggagggcaatgagaccctgaaggtggtggagctggaccggcgggtgaacaccaccttctag

SEQ ID NO: 258239 - DNA, 1383 bp, Artificial Sequence
  derived and/or modified sequence
atggaggtgctggagagcggggagcagggcgtgctgcagtgggacaggaagctgtctgagctgtctgagcctggagatggagaggccctgatgtaccacacccacttcagcgagctgctggatgagttcagccagaatgtgctgggccagctgctgaatgaccccttcctgtctgagaagtctgtgtccatggaggtggagcccagccccaccagccctgcccccctcatccaggccgagcacagctacagcctgtgtgaggagccccgggcccagagccccttcacccacatcaccaccagtgacagcttcaatgatgatgaggtggagagcgagaagtggtacctgagcacagacttccccagcaccagcatcaagacagagcctgtgacagatgagcccccacctggcctggtgcccagcgtgaccctgaccatcacagccatcagcacccccctggagaaggaggagccccccctggagatgaacacaggagtggacagcagctgccagaccatcatccccaagatcaagctggagccccatgaggtggaccagttcctgaacttcagccccaaggaggcccctgtggaccacctgcacctgccccccaccccacccagcagccacggcagtgacagcgagggcagcctgagccccaacccccggctgcaccccttcagcctgccccagacccacagccccagccgggccgccccccgggcccccagcgccctgagcagcagccccctgctgacagccccccacaagctgcagggcagcggccccctggtgctgacagaggaggagaagaggaccctgattgctgagggctaccccatccccaccaagctgcccctgagcaagtctgaggagaaggccctgaagaagatccggaggaagatcaagaacaagatcagcgcccaggagagcaggaggaagaagaaggagtacatggacagcctggagaagaaggtggagagctgcagcacagagaacctggagctgaggaagaaggtggaggtgctggagaacaccaacagaaccctgctgcagcagctgcagaagctgcagaccctggtgatgggcaaggtgtccaggacctgcaagctggccggcacccagacaggcacctgcctgatggtggtggtgctgtgctttgctgtggccttcggcagcttcttccagggctacggcccctaccccagcgccaccaagatggccctgcccagccagcacagcctgcaggagccctacacagcctctgtgggcaagacagcctgtgggaagctgggccgggtgctcttctacttccccagggctggcttcctgagcctgcccaagggcatcttctgtgagagccccatgttcaagaagtggtag

SEQ ID NO: 258240 - DNA, 1563 bp, Artificial Sequence
  derived and/or modified sequence
atggaggtgctggagagcggcgagcagggcgtgctgcagtgggacagaaagctcagtgagctgtctgaaccaggggatggggaggctctaatgtatcatacccacttcagcgaactgcttgatgaattttcccagaacgtgttgggacagttactgaacgacccttttttgtctgaaaaatccgtttccatggaagtagaacctagtccgacatctccagcacccctaatccaggccgaacatagctactccctgtgcgaagagcccagagcgcagagtccgttcactcatatcacaacatcagattcattcaacgacgacgaggtcgagtcagaaaagtggtatctgtccaccgactttccctctacttctattaaaacagagcctgtgaccgacgagcccccccccggactagtgccctcagtgacgcttacgatcacggcaataagtactccgctcgaaaaggaagaacctccgctggagatgaacacaggagtcgatagctcctgccagactatcatcccgaaaattaaattggaaccacatgaagtggaccagttccttaatttcagccctaaggaggctccagtggatcacctccacctgcctccgacccctccgtcttcccatggctctgacagtgaagggagcctttccccaaaccctagactccatccattttcactgccccaaactcattccccctcaagggccgctccacgagctccgtcagcgctcagctcatctccgctgctgaccgctccccacaaactccaaggatcgggacctctggtgctgactgaggaggaaaaacggactctgatagctgaaggctatcccatccctacaaaactcccacttagcaaatcagaggagaaggccctgaaaaaaattcgaaggaagattaagaacaaaatctctgcacaagagtccaggcggaagaagaaggagtatatggactctcttgagaagaaagtggaaagttgctccaccgagaacctagagctgcggaaaaaagtcgaagtgttggaaaataccaataggacactgttgcagcagctgcaaaagctccaaacactagtaatgggcaaggtgtccaggacctgcaagttggccggtacccagaccggcacatgtctgatggtggtggtgctgtgcttcgccgtcgcattcgggagtttctttcaaggctacgggccatacccaagtgcaacaaaaatggcactgcccagccagcactccctacaggagccctacaccgccagcgtggtgcggtcccgcaatctgcttatctacgaggagcactcacccccagaagagtcttcttctccagggtccgcaggggagcttggtgggtgggacagggggtcaagcctgttgcgggtctccggtctggaaagtcgaccagatgtagacctgccacacttcatcatttcaaatgaaacaagtttggaaaaatccgtattgctggaactgcagcaacatctcgtctcagctaagctggaagggaatgagaccctgaaggttgtcgaacttgatcgaagagtgaatactaccttctag

SEQ ID NO: 258241 - DNA, 1383 bp, Artificial Sequence
  derived and/or modified sequence
atggaggtgctggagagcggcgagcagggcgtgctgcagtgggacaggaaactgtcagagcttagcgagcctggggacggggaggctctcatgtaccacacccacttctcagaacttttagatgagttctcgcagaacgtgctcggccagctgctgaatgatcccttcctcagcgagaagagcgtgagcatggaagttgaaccaagcccaactagtcccgcgcctttgatccaggcggaacattcctactccttgtgtgaggagcctcgcgcacagtccccatttactcatatcactacatctgactcatttaacgacgatgaggtcgaatctgagaaatggtatctttccactgattttccttctacttccatcaagacagagcccgttacagatgagcctccccctggactcgtgcccagcgtcacacttacgataacagccatttctaccccactagagaaggaagaaccccccttagaaatgaacactggggttgacagttcctgtcaaactatcatccccaagattaagctggagccccacgaggtggatcagtttctcaacttttcacccaaggaggcccctgtggatcatcttcacctgccgccaactccaccgtcttcgcacggtagcgacagcgaaggttccctgtcccctaatcccagactgcaccctttctcacttccacaaactcattcacctagtcgcgccgccccacgcgccccgtccgcgctgtcttcctccccactattgactgcccctcataaattgcaaggctcggggcctcttgtgcttaccgaggaagagaagaggacgctgatcgcagaaggctatccaattccgactaagctaccgttgtctaaatcagaggaaaaagctctcaagaaaatccgacgcaaaattaagaacaagataagcgcccaagagtctagaagaaagaagaaggaatacatggattctctggaaaagaaggtggagtcttgttccaccgagaacctagagctccggaaaaaggtggaagtgctggagaatacaaatcgtacgctgctgcagcagttgcagaaactccaaacccttgtgatgggaaaggtaagtcggacctgtaagctggcggggacgcaaaccggcacatgtctgatggtagttgtgctctgctttgcggttgcatttgggtcttttttccaggggtacggtccatacccttctgccacaaagatggccctcccatcacagcacagcctccaggaaccctatactgccagtgtcggaaaaactgcttgcggaaagctaggaagagtgctgttttacttcccacgggcaggttttctgtctctccccaagggcattttttgcgagagtccaatgtttaagaagtggtag

SEQ ID NO: 258242 - DNA, 1563 bp, Artificial Sequence
  derived and/or modified sequence
atggaggtgttggaatccggggagcagggcgtgctgcagtgggacagaaagctgtctgagctgagcgaaccaggcgatggtgaagctctgatgtaccacacccacttcagcgagctgctggatgagttcagtcagaatgtgcttggccaacttctgaacgaccctttcctgtctgagaaatcggtgagcatggaagtcgagcctagccccacgtcaccagcaccactcattcaagctgagcactcatattccctgtgcgaggagcccagagcccagtcaccattcacacacataaccacaagtgacagcttcaatgacgacgaggtggaatctgagaaatggtacttgtccactgacttccctagtacttctataaagacagagccggtgactgacgagccaccccctggtctggtcccctcagttaccctgactattacagccatttcgacaccgcttgaaaaagaggagccacctctggaaatgaatacgggggtggactcatcttgccagactataatccctaaaatcaagctcgaaccccacgaggttgatcagtttctcaacttcagtccaaaagaggctccagtggaccatcttcatttacctcctaccccacctagctctcacggcagcgactccgagggaagtctcagcccaaatccccgtttgcaccctttctccttgcctcagacccatagcccttcgcgggctgctccccgtgcaccctctgccctctccagctcacccttactcacggcccctcacaagctgcaggggtccgggcctctagtgctgaccgaggaggagaagaggacgctaattgccgaaggataccctattccgacaaaattgcccctttccaagagcgaggagaaggcgttgaagaaaatcagaaggaaaataaagaacaagatcagcgcccaggagtccagacgtaaaaagaaagaatacatggactcattggaaaagaaagtcgagtcatgctctacagagaatttggagctccgaaaaaaagtcgaagtgctcgaaaacacaaacaggacgcttctccaacagttacagaagttgcaaacattggtcatgggcaaagtatcacggacctgcaagctggccggtacacagaccggcacatgtctcatggtggtcgttctgtgttttgctgtcgccttcgggtcctttttccagggctacggtccgtatccctcggccaccaagatggctctgccatctcagcattccctgcaagagccctacacagcatcagtggtgcgcagtcggaatctcttaatctatgaggagcatagtcctcccgaggaaagttcttctcctggctccgcgggagaacttggcggatgggacagaggatcttctctgttgcgggtctccggcctggagagtagaccagatgtcgatcttccacacttcatcatcagcaacgagacctcccttgagaagtctgtgttgcttgagctccagcaacacctagtctcagccaagctcgaaggtaatgagactctcaaggttgtcgaactagatagacgcgtcaatacaaccttttag

SEQ ID NO: 258243 - DNA, 1383 bp, Artificial Sequence
  derived and/or modified sequence
atggaggtgctggaaagtggcgagcagggtgtgctgcaatgggaccggaaattgtctgagttatccgagcctggcgacggtgaagccctgatgtatcacacccacttcagtgagctgctagacgaatttagccaaaatgtccttggccaacttcttaacgatccttttctgtccgaaaagagtgtgtctatggaagtggaacctagtcccacttctcccgctccactcattcaggccgagcacagctattctttgtgtgaggagccccgagcacagtctccttttacacacatcactactagtgacagctttaacgatgatgaagtggagtctgagaagtggtacttgtcgaccgattttccctccactagcataaagaccgagccagtcaccgacgaaccacccccagggcttgtgcctagtgtgaccctgacaataaccgccatttcaacaccgctcgaaaaagaggaaccaccactggaaatgaacaccggagtcgattcttcctgtcaaacgatcattccgaagataaagcttgaaccccacgaagttgatcagtttctaaatttttccccgaaggaggcccctgtcgatcacctgcacctcccgccaacaccaccttccagccacggatcagatagcgagggttccctgtctcctaacccgcgtctgcatccctttagcttacctcagacccacagcccctctcgggcagcacctagggctccttccgcacttagttcttccccacttctgacagcccctcacaagctgcagggaagcggccctctcgttctgacagaggaggaaaaaagaactctgatcgctgaaggctatcctattccgacaaagttgcctctgagcaagtccgaagaaaaagccttgaaaaagatccggagaaagatcaaaaataagatttctgctcaggaaagccgcagaaaaaagaaagagtacatggactcactcgagaagaaggtggaatcctgttccactgaaaacctggagttacgcaaaaaagtcgaggtgttggaaaatactaatagaaccttactgcaacagctccaaaagctgcagacactcgtcatgggcaaggtgagccgaacttgcaagttggcaggaacacaaactggaacatgcctgatggtggttgtgctgtgcttcgctgtcgctttcggttcttttttccagggatatgggccatatccttccgctactaagatggcactgccatcgcagcatagtcttcaggagccatatacagcttcagtgggcaagacggcttgtggcaagctggggagagtgcttttctacttccctcgcgctggctttctctccctccccaagggcattttctgtgagtctccgatgttcaaaaaatggtag

SEQ ID NO: 258244 - DNA, 7412 bp, Artificial Sequence
  derived and/or modified sequence
gtttgtgtctggagccgtagcggcaagtgggcttgcggctaagggattttcctgggatgagagcgggtcttctgccttcattttggatgcacatcccgctttagccccggcagcctttggtccggctcgtgtccctggggattctcggatctccgaggacaccggacgggagcgcttggccatcctctctccggcagaggagcagacgtttgctttccaagtgcaaaactacagacacgcgcgcgcacacacgcaagcacacgcggagagagaggaaccttgccggtccgaggcagctctgcgcgtcccctcctgcgcttagcatcctcggcccagcgcggcccgcaccgccatggaggtgctggagagcggggagcagggcgtgctgcagtgggaccgcaagctgagcgagctgtcagagcccggggacggcgaggccctcatgtaccacacgcacttctcagaacttctggatgagttttcccagaacgtcttgggtcagctcctgaatgatcctttcctctcagagaagagtgtgtcaatggaggtggaaccttccccgacgtccccggcgcctctcatccaggctgagcacagctactccctgtgcgaggagcctcgggcccagtcgcccttcacccacattaccaccagtgacagcttcaatgacgatgaggtggaaagtgagaaatggtacctgtctacagacttcccttcaacatccatcaagacagagccagttacagacgaaccacccccaggactcgttccgtctgtcactctgaccatcacagccatctccaccccgttggaaaaggaggaacctcctctggaaatgaacactggggttgattcctcgtgccagaccattattcctaaaattaagctggagcctcatgaagtggatcagtttctaaacttctctcctaaagaagccccagtggaccacctgcatttgccgcccacccctccgagcagtcacggcagtgactcagagggcagcctgagtcccaacccacgcctgcaccccttcagcctgcctcagacccacagcccctccagagctgcaccccgggccccctccgccctctccagctcccctctcctcacggctcctcataaactgcagggatcaggccctctggtcctgacagaggaggagaagaggaccctgatcgctgagggctatcccatccccaccaaattgcccctgtcaaaatcagaggagaaggccctgaagaaaattcggaggaagatcaagaataagatttctgctcaggaaagtaggagaaagaagaaagaatacatggacagcctggagaaaaaagtggagtcttgttcaactgagaacttggagcttcggaagaaggtagaggttctagagaacactaataggactctccttcagcaactccagaagcttcagactttggtgatgggcaaggtttctcgaacctgcaagttagctggcacgcagactggcacctgcctcatggttgtggtgctgtgctttgccgttgcattcggcagcttctttcaaggctacgggccctatccttctgccaccaagatggctctgcccagccagcattccctgcaggagccctacacagcctccgtggtgagatccagaaacctgctgatctacgaggaacattctcccccagaggagtcatccagcccgggctcggctggggagctggggggctgggatagaggttcctccctgctcagggtgtcagggctggagtccaggccggatgtggatcttccccatttcattatctcgaatgagaccagcctggagaagtcagtgcttttggagctgcagcagcacctggtcagcgccaaactggaggggaatgaaacactaaaagttgtagaactcgacagaagagtgaacaccactttctaaagaggctgcctgcaccccctccctttcccttaactctacttttacatccccaaaccacctttgtcatcagcttttcctctttgccactggatcttcatggagacatgggcaagcattagtggcttcagattggagaccagcctgggacttccctgcagtgagagagcatctccccctggtccatgcccctcctgtgcagaagggagcctgcatccctcccttcctttctcttactgccataggaaattattttaggggttggaggtgggacaagcaggcttgtttccaccaatagtgccaaaaagatattgcctaatgtgcacctgtgaggtgtaaccccccgctttggagacgagatggctcttgttcagtcaagaccccagactctggccacaaaaatgccataatgcctgttggtatttggcaaagcactgacccgtgtcctccgttgctcgcactggggtctctggtgtgaacacccccgacagcagccctccgcccactctgccccctgggagccctcgctggatcgtctcgtctcctgcagcagcactggcaggcgagggctctcgttcatattctcaggccgcaagtgcaatgcctgaggggatcaggcttttctactccaggcaaacctgccccatcttgtcgcttttaggacctcccacaacctggttccccacacatccatagttctgcctccccagcttctcctccccagttgtaaatagtatttattagcttgccgaggcttcctgctagcaaccacactgaagagatcgatgcctcctttcaagctagccaagttttctgcgagccttcagagctaggagggcaccctaggctctgggatcccgtgtctttccagacaatgttttgtttcctttcctttgttttttcttttaactggaataattaccattgaaaaagaagttcctttgagcatgtatgtgtctgcctctaggatgagctcagagcgagagatgacacaatgcctcactcaggccccgggctccctggccacaagctttttctatcctgttttcatgacagagaaggggaagccctgttctgacaacagacatttcagacaaccttgctggctttccacacctgcctggccccctcctccctccacacttccactttgtcctcctcgtcccctacctcaacaaagcagggtggggtaggtgacatttgtgtatccacattcttacctttggtagtcaggtttggctactttgcagctcgcccaaagagatacaacctaatccccaacctacttttagtttttttgttttttttttatggttaaaagtaacttttgtagtttaaaaaaatctttcctctttcatataaataagaagtggaaattgcctttttattgtgtaatgtagaaaaccctcaagtgttttttccgagcttgggaaagattttgtgtaggaaatgtgcatagagtttgtattttatttttattagcagctgaaatgcctttggttttggcttctctctctccctctctctctctgtctctccttctctctctccccccaccacccacccccacacacgtcatctgcattgttattggagcctgtacttagagggattaagcccacaccctggcttccattccatatcaggtacaggatttgatgttattaacatttgtcgtcatacctcataagtcggtccctgccttgtctgtctaggcccatttggggctccctgtgagtgattcccctctctctgctatgctggagacggttccagcctggaaagcggccaagttcatcttctcactgtgagtggaagctggatcgggcccccgtagtcctggcagccctgttgtctggagggttcttgttgtccctcccattagccagggcggagactgtctgagctgtgcaggaggagggttgctagtaggttctgcttctgcttctctctgctccactgtctgcagcccagatcctgttgggcctggctggtgtctggtaaccatgggcctccactgacccatccctctcttttaaactgtcaggtcattatcaggcataggcagcctatagggcccaaagaaggcaaaaagataagatttactcaagtagcatttgggcaatgaggaaggaaaggtttcaaatttaggggcagaagtgagagaatgagccaacccatgtacctgctgcaactgaaccagactgggttttcaaggctcccagacgtagagtaggaaacgtgctcttctaaatgaggagggagaagataaaggaaacttctagcccctgtccttagtgctttgaggattttattttctcccttactacgcttgcttgacgtcactctctctcgacctccaaacagcaggactctttctctgggaaaccatccttccaaaacggaatctatgtagacaatgggacgttaggcagagagctcagatggcccttttaagggggctccaagaaccaacatcactgctcttttagataaacctctgccctccactccttgcttgagtgggttaaaggaactaacagttgtccctttaggaggacaaaatggggtcaagaggacacagaagagttgtatagcaccagattggttccaaatagttaatggatgtgtgcacattttctgttcagggattaagaccagaatatcagtggatttgttttccccaccaagtggcctcttagactagtcattaacttatgattagctctaaagatttcaaatagtggcagacagtgtcttctgaatgtaagttttgagaaatacgagtctgtcagagcggccataagccataaagagtcaatctcttaattatatttttcatcatgtaaacaagtttcccatttccctttcttagattgcaccagtgaaggagatgttttgcaaagattcagagaactaatttttcactggataagacctgagtaacccagaccccccaccgtggttcttttcacagccctcgactttgcacttaaaaagggatattgtaaatgaaaggctgcagtgccagttttaagaaagaatttctgtgaagtgtgaggactctggagtctagctcacataaagagagtgttatataaaaatccgacagctgaactaggttgctcttttttggcagggagtggggatgagatttgacaccaatatgggcaaaattagataaccttttggttaatataaatgattttgatttggaggcctaatttgtagattgtgaaagcagcttttagtttaacttattcacagaccccttataattaccatgtttttttttttcttcctaaatctcttggttcagcttgtgaatcttacgtgcccgtaaagttgggatgttgaattggctcttctttgttctggcagtgagtcaagtgtccagcattttttcataagtgttttttaaaattgttctccagcattttatggctcctccctcccatgtcctcagacccagcaaaagcgtagaggcagaattagaggcctctccaggccagctcctctgcccacatgtcatacaaggtgtgaatttgagcacagtccagaaatggagacatcccacccccagttgaataatggcccattcatgccaaccttgccaacacggagagggcagagatgcactagaagaccttcatcctccccttcctctgccccaagtcactacagttggttctattgaagccagtctttaagaaacctgggttaaagacaccagcacttctgcttgctgggctggctggacctgtgaagccatgggcaggtagtgccctcttgagagtcattttatttggccaccttcaggtgagactatccatagacacatgctaggataggccccgctgggagggcagttacaggagagagtaggtggtggtgacgtgagggctgtgaaggatccagagacaagacttagatgtttcgttcattcactcactcattcagttactcctaagacttttcagtttcataaggaagagtgttgcctgaggccctagggaatattggggaatagaagggattgaggaaacattaataatagttattcaaaagacccaaatgcttatacttctctctcccttcttctctctctgacacacacacacacacacacacacacacacacacacacgtgcacattcctcccttacatgctcatttgtgccttaaatgtgccttataggtaaatccaggatgactgaggaatccctcgtcactgggagattttgtatatattcttttattattagattgagttgggtgtggggaaaaatttttttctgaaggctcaaaagtggtttcctaaaagtgagccactatcagatttgcacatcaggagaaaagaaatagggttacgtccattaggaaaatcccagtttgcaggagtgcaatcacatcaaaaaaacaaccagccaggattaaaggtattataaatcctcatagcggaacatttctcagggcaaaggaacctggctcatttgaagattaatgttccatgcctttgtggtcaaagggtcagcacttaacacaggaaaaaactaggtgttgttttgttttgttattttggacaacataaaattcaggaatgttttatttagccttggtttctagaaggaagggaaataatatttcttgagcatttactagggtgttgcgtgctgtgctaagtaaattttaagtctttcagttttatagatacggaaaacaagggtgactctttaccacaggatgaataaagaactaagtaatatgggaaatgcagcaatttctggactagctgagccgattccttcctgtgagcacactgtaagctttcaagttctctgggcaggaattacagcacctgtcccctgcaatggccctgctgtgtgatgctcatcgcttcccttcgtgctggagcagtcccccaggtgtccatctcctatctttttgttccaatcttctgtgagttccagctagcaggctttacatctggggaaaggaaaaccaggggttttagctctgttctctgctcccatccttcgctcaccagctgagtgagaacatgaactttttgcaccatgtacccatggcttacactacttagaaaatcaccttttcagataaaacagtttatgagttcatagagaacaccagcactctttgacaaaactgtgagtgaccctttttaaacaatgctgagcaggccctgagctataatcaacggtgagctttaatgtctatgctgacagttaggttttgctctcttttgtaacaggttacgtagaccagcagtgtttaaatctaaatacgttgtgagtctgttatctgtcctatcgcgttttttaaatgactttttattctttatcatagctaagtaaataccaaaaaaaaaaaaaagctttgtaggacacttgtacttagtttgggaaaaaaaaataaattgaaattgttatgcttttgtatttccatttcttgcaaataaatattttttcttaaatagtaa

SEQ ID NO: 258245 - DNA, 2360 bp, Artificial Sequence
  derived and/or modified sequence
gtccctcaaagtttgtgtctggagccgtagcggcaagtgggcttgcggctaagggattttcctgggatgagagcgggtcttctgccttcattttggatgcacatcccgctttagccccggcagcctttggtccggctcgtgtccctggggattctcggatctccgaggacaccggacgggagcgcttggccatcctctctccggcagaggagcagacgtttgctttccaagtgcaaaactacagacacgcgcgcgcacacacgcaagcacacgcggagagagaggaaccttgccggtccgaggcagctctgcgcgtcccctcctgcgcttagcatcctcggcccagcgcggcccgcaccgccatggaggtgctggagagcggggagcagggcgtgctgcagtgggaccgcaagctgagcgagctgtcagagcccggggacggcgaggccctcatgtaccacacgcacttctcagaacttctggatgagttttcccagaacgtcttgggtcagctcctgaatgatcctttcctctcagagaagagtgtgtcaatggaggtggaaccttccccgacgtccccggcgcctctcatccaggctgagcacagctactccctgtgcgaggagcctcgggcccagtcgcccttcacccacattaccaccagtgacagcttcaatgacgatgaggtggaaagtgagaaatggtacctgtctacagacttcccttcaacatccatcaagacagagccagttacagacgaaccacccccaggactcgttccgtctgtcactctgaccatcacagccatctccaccccgttggaaaaggaggaacctcctctggaaatgaacactggggttgattcctcgtgccagaccattattcctaaaattaagctggagcctcatgaagtggatcagtttctaaacttctctcctaaagaagccccagtggaccacctgcatttgccgcccacccctccgagcagtcacggcagtgactcagagggcagcctgagtcccaacccacgcctgcaccccttcagcctgcctcagacccacagcccctccagagctgcaccccgggccccctccgccctctccagctcccctctcctcacggctcctcataaactgcagggatcaggccctctggtcctgacagaggaggagaagaggaccctgatcgctgagggctatcccatccccaccaaattgcccctgtcaaaatcagaggagaaggccctgaagaaaattcggaggaagatcaagaataagatttctgctcaggaaagtaggagaaagaagaaagaatacatggacagcctggagaaaaaagtggagtcttgttcaactgagaacttggagcttcggaagaaggtagaggttctagagaacactaataggactctccttcagcaactccagaagcttcagactttggtgatgggcaaggtttctcgaacctgcaagttagctggcacgcagactggcacctgcctcatggttgtggtgctgtgctttgccgttgcattcggcagcttctttcaaggctacgggccctatccttctgccaccaagatggctctgcccagccagcattccctgcaggagccctacacagcctccgtgggtaagacagcatgtggcaagttgggcagggtcttgttttatttccctagagctgggtttctcagtcttccaaaaggaatcttctgtgaaagtccaatgtttaaaaagtggtaaaagtggagcttctccctttgaagaggcaagtgggggttcccctggggcccctcatccactggactgcggcatcactgggaattctccagagcttgacagagcacagtttgcaaactgctgttctagactgtgttccctgatccattctgacatctaatttttgagttctgataagggagagggaagcagatgagggaaagagtctgtcgctttctgtgacgttttaagagaactgctgtgtttctgcctccactgagtggaattgtatgagtaatgtaatgcaatgtatatagtaagggcttgtaaagtgaaattaaataaacagcaaggtcagggccgggcgtggtggctcacgcctgtaaccccagcactttgggaggccgaggcgggcagatcacgaggtcaggagattgagactatcctggctaacactgtgaaaccccatcgccactaaaaaatacaaaaaaattagccgggcgtggtggcaggtacctgtagtcccagctactggggaggctgaggcaggagaatattgtgaacctgggaggcggagtttgcagtgagccgagatcgcaccactgcactccagcctagacgacagagcgagactccatc

SEQ ID NO: 258246 - DNA, 7133 bp, Artificial Sequence
  derived and/or modified sequence
acagacacgcgcgcgcacacacgcaagcacacgcggagagagaggaaccttgccggtccgaggcagctctgcgcgtcccctcctgcgcttagcatcctcggcccagcgcggcccgcaccgccatggaggtgctggagagcggggagcagggcgtgctgcagtgggaccgcaagctgagcgagctgtcagagcccggggacggcgaggccctcatgtaccacacgcacttctcagaacttctggatgagttttcccagaacgtcttgggtcagctcctgaatgatcctttcctctcagagaagagtgtgtcaatggaggtggaaccttccccgacgtccccggcgcctctcatccaggctgagcacagctactccctgtgcgaggagcctcgggcccagtcgcccttcacccacattaccaccagtgacagcttcaatgacgatgaggtggaaagtgagaaatggtacctgtctacagacttcccttcaacatccatctgtcactctgaccatcacagccatctccaccccgttggaaaaggaggaacctcctctggaaatgaacactggggttgattcctcgtgccagaccattattcctaaaattaagctggagcctcatgaagtggatcagtttctaaacttctctcctaaagaagccccagtggaccacctgcatttgccgcccacccctccgagcagtcacggcagtgactcagagggcagcctgagtcccaacccacgcctgcaccccttcagcctgcctcagacccacagcccctccagagctgcaccccgggccccctccgccctctccagctcccctctcctcacggctcctcataaactgcagggatcaggccctctggtcctgacagaggaggagaagaggaccctgatcgctgagggctatcccatccccaccaaattgcccctgtcaaaatcagaggagaaggccctgaagaaaattcggaggaagatcaagaataagatttctgctcaggaaagtaggagaaagaagaaagaatacatggacagcctggagaaaaaagtggagtcttgttcaactgagaacttggagcttcggaagaaggtagaggttctagagaacactaataggactctccttcagcaactccagaagcttcagactttggtgatgggcaaggtttctcgaacctgcaagttagctggcacgcagactggcacctgcctcatggttgtggtgctgtgctttgccgttgcattcggcagcttctttcaaggctacgggccctatccttctgccaccaagatggctctgcccagccagcattccctgcaggagccctacacagcctccgtggtgagatccagaaacctgctgatctacgaggaacattctcccccagaggagtcatccagcccgggctcggctggggagctggggggctgggatagaggttcctccctgctcagggtgtcagggctggagtccaggccggatgtggatcttccccatttcattatctcgaatgagaccagcctggagaagtcagtgcttttggagctgcagcagcacctggtcagcgccaaactggaggggaatgaaacactaaaagttgtagaactcgacagaagagtgaacaccactttctaaagaggctgcctgcaccccctccctttcccttaactctacttttacatccccaaaccacctttgtcatcagcttttcctctttgccactggatcttcatggagacatgggcaagcattagtggcttcagattggagaccagcctgggacttccctgcagtgagagagcatctccccctggtccatgcccctcctgtgcagaagggagcctgcatccctcccttcctttctcttactgccataggaaattattttaggggttggaggtgggacaagcaggcttgtttccaccaatagtgccaaaaagatattgcctaatgtgcacctgtgaggtgtaaccccccgctttggagacgagatggctcttgttcagtcaagaccccagactctggccacaaaaatgccataatgcctgttggtatttggcaaagcactgacccgtgtcctccgttgctcgcactggggtctctggtgtgaacacccccgacagcagccctccgcccactctgccccctgggagccctcgctggatcgtctcgtctcctgcagcagcactggcaggcgagggctctcgttcatattctcaggccgcaagtgcaatgcctgaggggatcaggcttttctactccaggcaaacctgccccatcttgtcgcttttaggacctcccacaacctggttccccacacatccatagttctgcctccccagcttctcctccccagttgtaaatagtatttattagcttgccgaggcttcctgctagcaaccacactgaagagatcgatgcctcctttcaagctagccaagttttctgcgagccttcagagctaggagggcaccctaggctctgggatcccgtgtctttccagacaatgttttgtttcctttcctttgttttttcttttaactggaataattaccattgaaaaagaagttcctttgagcatgtatgtgtctgcctctaggatgagctcagagcgagagatgacacaatgcctcactcaggccccgggctccctggccacaagctttttctatcctgttttcatgacagagaaggggaagccctgttctgacaacagacatttcagacaaccttgctggctttccacacctgcctggccccctcctccctccacacttccactttgtcctcctcgtcccctacctcaacaaagcagggtggggtaggtgacatttgtgtatccacattcttacctttggtagtcaggtttggctactttgcagctcgcccaaagagatacaacctaatccccaacctacttttagtttttttgttttttttttatggttaaaagtaacttttgtagtttaaaaaaatctttcctctttcatataaataagaagtggaaattgcctttttattgtgtaatgtagaaaaccctcaagtgttttttccgagcttgggaaagattttgtgtaggaaatgtgcatagagtttgtattttatttttattagcagctgaaatgcctttggttttggcttctctctctccctctctctctctgtctctccttctctctctccccccaccacccacccccacacacgtcatctgcattgttattggagcctgtacttagagggattaagcccacaccctggcttccattccatatcaggtacaggatttgatgttattaacatttgtcgtcatacctcataagtcggtccctgccttgtctgtctaggcccatttggggctccctgtgagtgattcccctctctctgctatgctggagacggttccagcctggaaagcggccaagttcatcttctcactgtgagtggaagctggatcgggcccccgtagtcctggcagccctgttgtctggagggttcttgttgtccctcccattagccagggcggagactgtctgagctgtgcaggaggagggttgctagtaggttctgcttctgcttctctctgctccactgtctgcagcccagatcctgttgggcctggctggtgtctggtaaccatgggcctccactgacccatccctctcttttaaactgtcaggtcattatcaggcataggcagcctatagggcccaaagaaggcaaaaagataagatttactcaagtagcatttgggcaatgaggaaggaaaggtttcaaatttaggggcagaagtgagagaatgagccaacccatgtacctgctgcaactgaaccagactgggttttcaaggctcccagacgtagagtaggaaacgtgctcttctaaatgaggagggagaagataaaggaaacttctagcccctgtccttagtgctttgaggattttattttctcccttactacgcttgcttgacgtcactctctctcgacctccaaacagcaggactctttctctgggaaaccatccttccaaaacggaatctatgtagacaatgggacgttaggcagagagctcagatggcccttttaagggggctccaagaaccaacatcactgctcttttagataaacctctgccctccactccttgcttgagtgggttaaaggaactaacagttgtccctttaggaggacaaaatggggtcaagaggacacagaagagttgtatagcaccagattggttccaaatagttaatggatgtgtgcacattttctgttcagggattaagaccagaatatcagtggatttgttttccccaccaagtggcctcttagactagtcattaacttatgattagctctaaagatttcaaatagtggcagacagtgtcttctgaatgtaagttttgagaaatacgagtctgtcagagcggccataagccataaagagtcaatctcttaattatatttttcatcatgtaaacaagtttcccatttccctttcttagattgcaccagtgaaggagatgttttgcaaagattcagagaactaatttttcactggataagacctgagtaacccagaccccccaccgtggttcttttcacagccctcgactttgcacttaaaaagggatattgtaaatgaaaggctgcagtgccagttttaagaaagaatttctgtgaagtgtgaggactctggagtctagctcacataaagagagtgttatataaaaatccgacagctgaactaggttgctcttttttggcagggagtggggatgagatttgacaccaatatgggcaaaattagataaccttttggttaatataaatgattttgatttggaggcctaatttgtagattgtgaaagcagcttttagtttaacttattcacagaccccttataattaccatgtttttttttttcttcctaaatctcttggttcagcttgtgaatcttacgtgcccgtaaagttgggatgttgaattggctcttctttgttctggcagtgagtcaagtgtccagcattttttcataagtgttttttaaaattgttctccagcattttatggctcctccctcccatgtcctcagacccagcaaaagcgtagaggcagaattagaggcctctccaggccagctcctctgcccacatgtcatacaaggtgtgaatttgagcacagtccagaaatggagacatcccacccccagttgaataatggcccattcatgccaaccttgccaacacggagagggcagagatgcactagaagaccttcatcctccccttcctctgccccaagtcactacagttggttctattgaagccagtctttaagaaacctgggttaaagacaccagcacttctgcttgctgggctggctggacctgtgaagccatgggcaggtagtgccctcttgagagtcattttatttggccaccttcaggtgagactatccatagacacatgctaggataggccccgctgggagggcagttacaggagagagtaggtggtggtgacgtgagggctgtgaaggatccagagacaagacttagatgtttcgttcattcactcactcattcagttactcctaagacttttcagtttcataaggaagagtgttgcctgaggccctagggaatattggggaatagaagggattgaggaaacattaataatagttattcaaaagacccaaatgcttatacttctctctcccttcttctctctctgacacacacacacacacacacacacacacacacacacacgtgcacattcctcccttacatgctcatttgtgccttaaatgtgccttataggtaaatccaggatgactgaggaatccctcgtcactgggagattttgtatatattcttttattattagattgagttgggtgtggggaaaaatttttttctgaaggctcaaaagtggtttcctaaaagtgagccactatcagatttgcacatcaggagaaaagaaatagggttacgtccattaggaaaatcccagtttgcaggagtgcaatcacatcaaaaaaacaaccagccaggattaaaggtattataaatcctcatagcggaacatttctcagggcaaaggaacctggctcatttgaagattaatgttccatgcctttgtggtcaaagggtcagcacttaacacaggaaaaaactaggtgttgttttgttttgttattttggacaacataaaattcaggaatgttttatttagccttggtttctagaaggaagggaaataatatttcttgagcatttactagggtgttgcgtgctgtgctaagtaaattttaagtctttcagttttatagatacggaaaacaagggtgactctttaccacaggatgaataaagaactaagtaatatgggaaatgcagcaatttctggactagctgagccgattccttcctgtgagcacactgtaagctttcaagttctctgggcaggaattacagcacctgtcccctgcaatggccctgctgtgtgatgctcatcgcttcccttcgtgctggagcagtcccccaggtgtccatctcctatctttttgttccaatcttctgtgagttccagctagcaggctttacatctggggaaaggaaaaccaggggttttagctctgttctctgctcccatccttcgctcaccagctgagtgagaacatgaactttttgcaccatgtacccatggcttacactacttagaaaatcaccttttcagataaaacagtttatgagttcatagagaacaccagcactctttgacaaaactgtgagtgaccctttttaaacaatgctgagcaggccctgagctataatcaacggtgagctttaatgtctatgctgacagttaggttttgctctcttttgtaacaggttacgtagaccagcagtgtttaaatctaaatacgttgtgagtctgttatctgtcctatcgcgttttttaaatgactttttattctttatcatagctaagtaaataccaaaaaaaaaaaaaagctttgtaggacacttgtacttagtttgggaaaaaaaaataaattgaaattgttatgcttttgtatttccatttcttgcaaataaatattttttcttaaatagt

SEQ ID NO: 258247 - protein, 1997 aa, Artificial Sequence
  derived and/or modified sequence
MALLIHLKTVSELRGRGDRIAKVTFRGQSFYSRVLENCEDVADFDETFRWPVASSIDRNEMLEIQVFNYSKVFSNKLIGTFRMVLQKVVEESHVEVTDTLIDDNNAIIKTSLCVEVRYQATDGTVGSWDDGDFLGDESLQEEEKDSQETDGLLPGSRPSSRPPGEKSFRRAGRSVFSAMKLGKNRSHKEEPQRPDEPAVLEMEDLDHLAIRLGDGLDPDSVSLASVTALTTNVSNKRSKPDIKMEPSAGRPMDYQVSITVIEARQLVGLNMDPVVCVEVGDDKKYTSMKESTNCPYYNEYFVFDFHVSPDVMFDKIIKISVIHSKNLLRSGTLVGSFKMDVGTVYSQPEHQFHHKWAILSDPDDISSGLKGYVKCDVAVVGKGDNIKTPHKANETDEDDIEGNLLLPEGVPPERQWARFYVKIYRAEGLPRMNTSLMANVKKAFIGENKDLVDPYVQVFFAGQKGKTSVQKSSYEPLWNEQVVFTDLFPPLCKRMKVQIRDSDKVNDVAIGTHFIDLRKISNDGDKGFLPTLGPAWVNMYGSTRNYTLLDEHQDLNEGLGEGVSFRARLLLGLAVEIVDTSNPELTSSTEVQVEQATPISESCAGKMEEFFLFGAFLEASMIDRRNGDKPITFEVTIGNYGNEVDGLSRPQRPRPRKEPGDEEEVDLIQNASDDEAGDAGDLASVSSTPPMRPQVTDRNYFHLPYLERKPCIYIKSWWPDQRRRLYNANIMDHIADKLEEGLNDIQEMIKTEKSYPERRLRGVLEELSCGCCRFLSLADKDQGHSSRTRLDRERLKSCMRELENMGQQARMLRAQVKRHTVRDKLRLCQNFLQKLRFLADEPQHSIPDIFIWMMSNNKRVAYARVPSKDLLFSIVEEETGKDCAKVKTLFLKLPGKRGFGSAGWTVQAKVELYLWLGLSKQRKEFLCGLPCGFQEVKAAQGLGLHAFPPVSLVYTKKQAFQLRAHMYQARSLFAADSSGLSDPFARVFFINQSQCTEVLNETLCPTWDQMLVFDNLELYGEAHELRDDPPIIVIEIYDQDSMGKADFMGRTFAKPLVKMADEAYCPPRFPPQLEYYQIYRGNATAGDLLAAFELLQIGPAGKADLPPINGPVDVDRGPIMPVPMGIRPVLSKYRVEVLFWGLRDLKRVNLAQVDRPRVDIECAGKGVQSSLIHNYKKNPNFNTLVKWFEVDLPENELLHPPLNIRVVDCRAFGRYTLVGSHAVSSLRRFIYRPPDRSAPSWNTTVRLLRRCRVLCNGGSSSHSTGEVVVTMEPEVPIKKLETMVKLDATSEAVVKVDVAEEEKEKKKKKKGTAEEPEEEEPDESMLDWWSKYFASIDTMKEQLRQQEPSGIDLEEKEEVDNTEGLKGSMKGKEKARAAKEEKKKKTQSSGSGQGSEAPEKKKPKIDELKVYPKELESEFDNFEDWLHTFNLLRGKTGDDEDGSTEEERIVGRFKGSLCVYKVPLPEDVSREAGYDSTYGMFQGIPSNDPINVLVRVYVVRATDLHPADINGKADPYIAIRLGKTDIRDKENYISKQLNPVFGKSFDIEASFPMESMLTVAVYDWDLVGTDDLIGETKIDLENRFYSKHRATCGIAQTYSTHGYNIWRDPMKPSQILTRLCKDGKVDGPHFGPPGRVKVANRVFTGPSEIEDENGQRKPTDEHVALLALRHWEDIPRAGCRLVPEHVETRPLLNPDKPGIEQGRLELWVDMFPMDMPAPGTPLDISPRKPKKYELRVIIWNTDEVVLEDDDFFTGEKSSDIFVRGWLKGQQEDKQDTDVHYHSLTGEGNFNWRYLFPFDYLAAEEKIVISKKESMFSWDETEYKIPARLTLQIWDADHFSADDFLGAIELDLNRFPRGAKTAKQCTMEMATGEVDVPLVSIFKQKRVKGWWPLLARNENDEFELTGKVEAELHLLTAEEAEKNPVGLARNEPDPLEKPNRPDTSFIWFLNPLKSARYFLWHTYRWLLLKLLLLLLLLLLLALFLYSVPGYLVKKILGA

SEQ ID NO: 258248 - DNA, 5994 bp, Artificial Sequence
  derived and/or modified sequence
atggcactactgatacacctgaaaaccgtctccgagctgcggggccgcggtgataggattgctaaagtgactttcagaggccagtcattttattcccgagtgttggagaattgtgaggacgttgcagattttgacgagacgttccgatggcccgtagccagtagcatagataggaacgaaatgcttgagattcaagtgttcaattactctaaggtgttttccaataagctgattggcactttcagaatggttctgcagaaagtggtggaggaatcccacgtagaggttacagacacactcattgacgataacaacgctataataaaaacctccttgtgtgtggaagtcaggtatcaggccaccgacggaacagtgggtagctgggatgatggcgattttctcggggacgagtctctgcaggaagaggagaaagactctcaagaaacagacggattgctaccaggttctcgacctagcagccgcccaccaggcgaaaaaagcttccgcagagcggggaggtccgtgttttccgcgatgaaactgggcaaaaaccggagtcataaggaagagccccagcgacccgatgagcctgccgtcttggagatggaggacttggatcatctggccatcaggctcggcgatgggttggatcccgacagtgtctcattggcctccgtgactgctttaaccactaacgtctcaaacaaacggagtaagcctgacataaagatggagcctagtgccggccggccgatggactaccaggtttccataacagtcattgaggcgcggcagctggttggcttaaacatggacccggtggtttgcgtagaagtgggcgacgacaagaaatataccagcatgaaggaatccacgaactgtccctattacaatgaatatttcgtgttcgacttccacgtgtctccagatgtgatgtttgacaaaatcataaaaatttctgtcatccactccaaaaacctactacgatccggaactctggtgggaagttttaagatggacgtaggaactgtttatagtcaacccgaacaccagtttcaccataagtgggcaattctgagcgaccctgacgatatttcatctgggctcaagggctacgtgaagtgcgacgtggcagttgtggggaagggcgataacatcaaaacgccccacaaggccaacgagacggatgaggacgacatcgagggcaacttgctgctacccgagggtgtgccccccgagaggcagtgggcccgcttctacgtcaaaatctaccgggccgaagggcttcctcgaatgaatacctccctaatggccaatgtgaagaaggcttttatcggggagaataaagacctggtcgatccctacgttcaggtttttttcgctggacaaaaaggtaaaacctcagtgcagaaatcaagctatgagccactgtggaacgagcaggtcgtgttcactgacttattcccccccctgtgtaaaagaatgaaggtgcaaataagagattctgataaggtgaatgacgtcgctattggtacccattttatagacctgagaaaaattagcaatgacggagataagggcttcctgcctacattgggccctgcctgggtcaatatgtacgggtccacaagaaattatacacttttagacgaacaccaggacctgaatgagggccttggtgaaggcgtgtctttccgagcaagactactccttggcctggcagttgagatcgttgacacaagtaaccctgagctgacaagtagtaccgaagtgcaggtcgaacaagctactcccataagtgaaagttgtgctgggaaaatggaggagttttttctgtttggagcattcctagaggccagcatgattgatcgacggaatggggataaacctatcaccttcgaagtcactatcggaaactacggaaacgaagttgacggcctctcccggccgcagaggccccgcccacgcaaagagccaggtgatgaggaagaagtcgacctcatccagaatgcctcagacgatgaagccggtgacgcaggcgatctcgcttccgtgagctcgaccccacccatgcgccctcaggttaccgaccggaactactttcatctcccgtacctagagaggaagccttgtatatacatcaagtcttggtggccagatcagcgacgacgactgtataacgcaaacatcatggatcatatcgccgacaagttggaagaaggcttgaatgatatccaggagatgattaaaacagaaaagtcctatcctgagcggaggctacgtggcgtactggaagagctctcctgcgggtgttgccgcttcctgtccctggcagacaaagaccaaggccactccagccgtacaagattggacagagagcggcttaagtcttgtatgcgggaactagaaaatatgggacagcaagcccgtatgctgcgggctcaagttaagcggcacacggtcagggacaaactcagactctgccagaattttctccaaaagttgaggtttcttgcagatgagccccagcactctattcctgacatttttatatggatgatgtctaacaacaaacgggtggcatatgccagagttcctagcaaagatctgctgttttctattgtggaagaggagaccggaaaggattgtgccaaggtgaagaccctattccttaaattacccggcaaacgtggatttggctccgcaggctggactgtacaggctaaggttgaattatacctatggctcggtcttagcaagcagagaaaggagttcctgtgcggcttaccgtgtggatttcaggaggttaaggccgcacagggactgggtctgcacgctttccccccagtatcactcgtttatacgaaaaaacaagcctttcaacttagggcgcatatgtaccaggcccgcagtctatttgcagccgactcaagtggactttccgatccctttgcccgtgtcttcttcatcaatcaatcccagtgtactgaggtgctgaatgaaaccttgtgccctacctgggatcagatgttagtgtttgataatctggagctttacggcgaggcccatgagctgcgcgacgacccacccatcatagtcatcgaaatatacgaccaggactctatgggtaaggccgattttatgggtcgcacattcgcaaaacccctggtcaagatggctgatgaggcatactgtccacccagattccctcctcagttagaatattaccagatctatagaggaaacgcgacagctggtgatcttttggcagcgttcgagctgctccagataggtcctgccggcaaggctgacttgccccccattaatggcccagttgacgtagacaggggccctatcatgcccgtgccaatgggcatacggcccgtcttgtcaaagtaccgcgtggaagttctcttttgggggctcagagaccttaagcgagtgaaccttgcccaggtggaccgccctcgcgttgacatcgaatgcgccggaaagggggtgcagtcctctttgatccacaactacaaaaaaaatccaaacttcaataccctggtgaaatggtttgaggtggacctgccggagaatgaactcctccaccctcctctaaatatcagagtggttgactgtcgcgcgtttggccggtatactctggtgggatcccatgccgtttcaagccttcggcgcttcatttatcgtcccccagaccggtctgccccttcatggaacacaaccgtgcgcctgctacgccgatgtcgggtgctgtgtaatggcggcagctccagtcactccaccggagaggttgtagtgacgatggaacccgaggttcctatcaagaagcttgagacaatggtcaagttggacgccacttccgaagcagtggtgaaagtggatgtggccgaggaagagaaggaaaagaagaagaaaaaaaaggggactgctgaggagcccgaggaggaagaacctgacgagtccatgctggactggtggtcaaagtacttcgcatctattgacacaatgaaagagcaactgagacagcaggaaccttccgggatagaccttgaggagaaggaagaggtggataatactgagggacttaagggctctatgaaaggaaaggagaaggcccgggctgcaaaagaagagaaaaaaaaaaaaactcaatccagtggttccggtcagggttccgaagcacccgagaaaaagaaaccgaaaattgacgaactgaaggtctacccaaaagaactcgaatccgagtttgataatttcgaagactggctgcacacattcaatctgctgagggggaaaactggggacgatgaggacggcagcacggaagaagagcgtattgttggcaggtttaagggatctctctgtgtctataaggtccctctacccgaggacgtcagcagagaagctggatatgacagtacatatggaatgttccagggcatcccctccaacgacccaataaatgtgcttgtgagagtgtacgtcgtgagggccactgatctgcacccagcggacattaacggtaaggcggatccctatatcgctataagactgggtaaaacagatatacgggacaaagagaattatatttccaaacagcttaatcccgtcttcggaaagtccttcgatattgaggccagctttcctatggaatcaatgcttactgtagccgtttatgattgggacttggtgggtacagatgatctgataggagaaacaaagattgatttagagaacagattctattcaaaacaccgggccacctgtggtatagcacagacctacagtacgcatggctataacatctggcgagatcctatgaagccaagccagattttgactcgcctgtgtaaggatgggaaggttgatggccctcactttgggcctccgggccgggtcaaagtggcaaaccgcgtgtttacaggaccctctgagatcgaggacgagaatggacagcgcaagcctacagatgagcacgtggcactattagccctcaggcattgggaagatatccctagggctgggtgtaggctggttccagaacatgtggagacacggcccctgttaaaccctgataaacctgggatcgaacagggtcgtctggagctttgggtcgatatgttccccatggacatgcccgctccgggcaccccactggatatttctccaagaaagcccaagaagtacgaacttcgggtgatcatctggaacaccgacgaagttgtcttagaggatgacgatttttttactggcgagaaaagcagcgatatcttcgtgagagggtggttgaaggggcagcaagaagacaaacaggatactgatgtgcactatcactcattgactggagaaggcaactttaattggaggtacttgttcccattcgactatctcgccgcagaggagaaaatagtaatttctaaaaaagagagcatgttctcatgggacgagaccgagtataaaatccccgcacggctcactctgcaaatctgggatgccgaccacttttcagccgatgacttcctgggcgccattgagctggatttgaatcggtttccgagaggcgccaagaccgcaaaacagtgtacaatggaaatggctacaggggaagtggatgttccactggtgtccatatttaagcagaagcgagtgaagggctggtggccactgctggccaggaacgaaaacgatgaatttgaactcactggaaaggtggaggcagagctgcacctcctcacagccgaggaagcagaaaagaatcctgttggactggcacggaacgagcctgatcccctggaaaagcctaacaggcccgacactagctttatctggttcttgaaccctctgaagtcggcccgttatttcctgtggcatacttatagatggcttctcttgaagctgctcttactcctactgctactgcttctgcttgccttatttctgtattccgttccaggctacctcgtcaagaagatcctgggagcgtag

SEQ ID NO: 258249 - DNA, 5994 bp, Artificial Sequence
  derived and/or modified sequence
atggccctgctgatccacctgaagacagtgtctgagctgcggggccgcggggaccgcatcgccaaggtgaccttccggggccagagcttctacagccgggtgctggagaactgtgaagatgtggccgactttgatgagaccttccgctggcctgtggccagcagcattgacagaaatgagatgctggagatccaggtgttcaactacagcaaggtgttcagcaacaagctgattggcaccttcaggatggtgctgcagaaggtggtggaggagagccacgtggaggtgacagacaccctgattgatgacaacaatgccatcatcaagaccagcctgtgtgtggaggtgcgctaccaggccacagatggcaccgtgggctcctgggatgatggagacttcctgggagatgagagcctgcaggaggaggagaaggacagccaggagacagatggcctgctgcccggcagccggcccagcagccggcccccaggagagaagagcttcagaagagctggccgcagcgtcttcagcgccatgaagctgggcaagaacagaagccacaaggaggagccccagaggccagatgagcctgctgtgctggagatggaggacctggaccacctggccatccggctgggagatggcctggaccctgacagcgtgtccctggcctctgtgacagccctgaccaccaacgtgagcaacaagaggagcaagccagacatcaagatggagcccagcgctggccggcccatggactaccaggtgtccatcaccgtgattgaggcccggcagctggtgggcctgaacatggaccctgtggtgtgtgtggaggtgggagatgacaagaagtacacctccatgaaggagagcaccaactgcccctactacaatgagtactttgtgtttgacttccacgtgtccccagatgtgatgtttgacaagatcatcaagatcagcgtcatccacagcaagaacctgctgcggagcggcaccctggtgggcagcttcaagatggatgtgggcaccgtgtacagccagcctgagcaccagttccaccacaagtgggccatcctgagtgaccctgatgacatcagcagcggcctgaagggctacgtgaagtgtgatgtggccgtggtgggcaagggggacaacatcaagaccccccacaaggccaatgaaacagatgaagatgacatcgagggcaacctgctgctgcctgagggcgtgcccccagagcggcagtgggcccgcttctacgtgaagatctacagagctgagggcctgcccaggatgaacaccagcctgatggccaacgtgaagaaggccttcatcggggagaacaaggacctggtggacccctacgtgcaggtgttctttgctggccagaagggcaagacctctgtgcagaagagcagctatgagcccctgtggaatgagcaggtggtgttcacagacctcttcccccccctgtgcaagaggatgaaggtgcagatccgggacagcgacaaggtgaatgatgtggccatcggcacccacttcatcgacctgaggaagatcagcaatgatggagacaagggcttcctgcccaccctgggccctgcctgggtgaacatgtatggcagcaccaggaactacaccctgctggatgagcaccaggacctgaatgaaggcctgggggagggcgtgtccttccgggcccggctgctgctgggcctggccgtggagatcgtggacaccagcaaccctgagctgaccagcagcacagaggtgcaggtggagcaggccacccccatcagcgagagctgtgccggcaagatggaggagttcttcctgtttggagccttcctggaggcctccatgattgacagaagaaatggagacaagcccatcacctttgaggtgaccatcggcaactatggaaatgaggtggatggcctgagccggccccagaggccccggcccaggaaggagcctggagatgaggaggaggtggacctgatccagaatgccagtgatgatgaggccggagatgctggggacctggcctctgtgagcagcaccccacccatgaggccccaggtgacagacaggaactacttccacctgccctacctggagaggaagccctgcatctacatcaagtcctggtggccagaccagaggagaagactctacaatgccaacatcatggaccacatcgctgacaagctggaggagggcctgaatgacatccaggagatgatcaagacagagaagagctacccagagcggcggctgcggggcgtgctggaggagctgagctgtggctgctgccgcttcctgagcctggccgacaaggaccagggccacagcagcaggacccggctggaccgggagcggctgaagagctgcatgagggagctggagaacatgggccagcaggccaggatgctgcgggcccaggtgaagaggcacacagtgcgggacaagctgcggctgtgccagaacttcctgcagaagctgcgcttcctggctgatgagccccagcacagcatcccagacatcttcatctggatgatgagcaacaacaagagggtggcctatgcccgggtgcccagcaaggacctgctcttcagcatcgtggaggaggagaccgggaaggactgtgccaaggtgaagaccctcttcctgaagctgcccgggaagaggggctttggatctgctggctggacagtgcaggccaaggtggagctgtacctgtggctgggcctgagcaagcagaggaaggagttcctgtgtggcctgccctgtggcttccaggaggtgaaggccgcccagggcctgggcctgcacgccttcccccctgtgtccctggtgtacaccaagaagcaggccttccagctgcgggcccacatgtaccaggcccggagcctgtttgctgctgacagcagcggcctgagtgacccctttgcccgggtcttcttcatcaaccagagccagtgcacagaggtgctgaatgagaccctgtgccccacctgggaccagatgctggtgtttgacaacctggagctgtatggagaggcccacgagctgagagatgatcctcccatcatcgtcatcgagatctatgaccaggacagcatgggcaaggctgacttcatgggccgcacctttgccaagcccctggtgaagatggctgatgaggcctactgccccccacgcttccccccccagctggagtactaccagatctacagaggaaatgccacagctggggacctgctggccgcctttgagctgctgcagatcggccctgctgggaaggctgacctgccccccatcaatggacctgtggatgtggaccggggccccatcatgcctgtgcccatgggcatccggcctgtgctgagcaagtacagagtggaggtgctcttctggggcctgcgggacctgaagagggtgaacctggcccaggtggaccggccccgggtggacattgaatgtgccgggaaaggagtgcagagcagcctcatccacaactacaagaagaaccccaacttcaacaccctggtgaagtggtttgaggtggacctgcctgaaaatgagctgctgcacccccccctgaacatccgggtggtggactgccgggccttcggccgctacaccctggtgggcagccatgctgtgagcagcctgcggcgcttcatctacagacctccagacagaagtgcccccagctggaacaccaccgtgcggctgctgcggcgctgccgggtgctgtgcaatggaggcagcagcagccacagcactggagaggtggtggtgaccatggagcctgaggtgcccatcaagaagctggagaccatggtgaagctggatgccaccagcgaggccgtggtgaaggtggatgtggccgaggaggagaaggagaagaagaagaagaagaagggcacagctgaggagcctgaggaggaggagccagatgagagcatgctggactggtggagcaagtactttgccagcattgacaccatgaaggagcagctgcggcagcaggagcccagcggcatcgacctggaggagaaggaggaggtggacaacacagagggcctgaagggctccatgaagggcaaggagaaggcccgggccgccaaggaggagaagaagaagaagacccagagcagcggcagcggccagggcagcgaggcccctgagaagaagaagcccaagattgatgagctgaaggtgtaccccaaggagctggagagcgagtttgacaactttgaggactggctgcacaccttcaacctgctgcggggcaagacaggagatgatgaagatggcagcacagaggaggagagaattgtgggccgcttcaagggcagcctgtgtgtgtacaaggtgcccctgcctgaagatgtgtcccgggaggccggctatgacagcacctacggcatgttccagggcatccccagcaatgaccccatcaacgtgctggtgcgggtgtatgtggtgcgggccacagacctgcaccctgctgacatcaacgggaaggctgacccctacatcgccatccggctgggcaagacagacatccgggacaaggagaactacatcagcaagcagctgaaccctgtgtttgggaagagctttgatattgaggccagcttccccatggagagcatgctgactgtggccgtgtatgactgggacctggtgggcacagatgacctgattggagagaccaagattgacctggagaaccgcttctacagcaagcaccgggccacctgtggcatcgcccagacctacagcacccacggctacaacatctggagggaccccatgaagcccagccagatcctgacccggctgtgcaaggatggcaaggtggatggcccccacttcggccccccaggccgggtgaaggtggccaacagagtcttcaccggccccagcgagattgaagatgaaaatggccagaggaagcccacagatgagcacgtggccctgctggccctgcggcactgggaggacatccccagggctggctgccgcctggtgcctgagcacgtggagacccggcccctgctgaacccagacaagccaggcatcgagcagggccgcctggagctgtgggtggacatgttccccatggacatgcctgcccctggcacccccctggacatcagccccaggaagcccaagaagtatgagctgcgggtcatcatctggaacacagatgaggtggtgctggaggatgatgacttcttcaccggggagaagagcagtgacatctttgtgcggggctggctgaagggccagcaggaggacaagcaggacacagatgtgcactaccacagcctgaccggggagggcaacttcaactggagatacctgttcccctttgactacctggccgctgaggagaagatcgtcatcagcaagaaggagagcatgttctcctgggatgaaacagagtacaagatcccagcccggctgaccctgcagatctgggatgctgaccacttcagcgcagatgacttcctgggcgccatcgagctggacctgaaccgcttccccaggggggccaagacagccaagcagtgcaccatggagatggccaccggggaggtggatgtgcccctggtgtccatcttcaagcagaagagggtgaagggctggtggcccctgctggccagaaatgaaaatgatgaatttgagctgaccgggaaggtggaggccgagctgcacctgctgacagctgaggaggccgagaagaaccctgtgggcctggccagaaatgaaccagaccccctggagaagcccaacagaccagacaccagcttcatctggttcctgaaccccctgaagagcgcccgctacttcctgtggcacacctaccgctggctgctgctgaagctgctgctgctgctgctgctgctgctgctgctggccctcttcctgtacagcgtgcccggctacctggtgaagaagatcctgggcgcctag

SEQ ID NO: 258250 - DNA, 5994 bp, Artificial Sequence
  derived and/or modified sequence
atggccctgctgatccacctgaagaccgtgagcgagctgcggggccggggtgacaggattgccaaagtgacgttccgaggtcagtctttttactcccgggtattggagaattgtgaagacgtcgccgacttcgatgagacttttcggtggcccgttgccagctctattgacaggaacgaaatgttagagattcaagtatttaactattcaaaagttttctcaaacaagttaatagggacattcaggatggtgctgcagaaggtagtcgaagagagccacgtagaagttacggatactctcattgacgataataacgctattataaagacatccctctgtgtcgaggtccgctaccaggcgacagacggcacggtggggagctgggatgacggcgatttcttgggcgatgaaagcctccaggaagaagaaaaagattcacaggaaacggatggcctcctgcccggttcaaggccctcctcacgaccaccgggtgaaaagtccttccgtcgcgcaggccgaagtgtgttcagtgccatgaagctaggaaagaataggagccacaaagaagaaccacagagaccagacgaacccgccgtactagagatggaggacctggatcacctggctatcagactgggcgatgggttggaccctgatagtgtgagcctcgcctccgttacagcgttgaccacaaatgtatcaaacaaaaggtctaaaccggacattaaaatggagccctccgcagggcgtcccatggactatcaggtgtcaatcacagtcatcgaggccagacagctcgtcgggttgaatatggatcccgtagtttgtgtggaagtaggagacgataagaaatatacatctatgaaggaaagtactaactgtccatattataatgaatactttgtgttcgactttcatgtaagccctgatgttatgttcgacaagataatcaagatttcggtgatccatagcaaaaaccttctaaggtccggtactctggtgggatccttcaaaatggacgtgggtacggtgtattcacagcctgagcatcagttccaccacaagtgggcgatcctgtccgacccagacgacattagtagcggtcttaaaggatatgtaaagtgcgacgtcgctgtagtcggaaagggcgacaacatcaagaccccccataaggctaacgagacagatgaggatgatatcgagggaaatctgctgttaccagaaggcgttccaccagaacggcagtgggctagattctacgtcaaaatttacagagcagagggtctgccgcgcatgaatactagtcttatggccaatgtgaaaaaggcatttattggcgaaaacaaagacctcgttgacccttatgtccaggtattcttcgccgggcaaaaagggaagacgtccgtgcagaagtcgagctacgaacccctgtggaacgagcaagtggtgtttaccgatttattcccaccactgtgcaagcgaatgaaagtgcagattcgggactccgataaagtgaacgacgtggccatcgggacacatttcatcgatctgagaaaaattagtaacgacggagacaaggggttcttaccaactctgggtccagcatgggtcaacatgtatggctccaccaggaattacaccttgctagacgagcaccaggacttgaacgaagggttgggggagggcgttagctttcgggctcgtttactgttaggtctggccgttgagatagtggacacgtccaatccagagctgaccagcagcacagaggttcaggtggagcaagctactccaatttcagaaagctgtgccggtaagatggaagagttttttctttttggagccttccttgaagcctccatgattgatagacgaaacggcgataagccaattacattcgaggttactatcggcaactatggcaatgaagtagacggcctatcccggccacagaggcctagaccacggaaagaacccggagatgaggaagaggttgacctcattcagaatgcatccgatgacgaagccggcgatgccggagatctggcgtccgtgtcatctaccccccctatgcggccacaggtgaccgatcgaaattacttccacctaccgtacctcgagcggaaaccctgtatttacataaaatcctggtggcccgaccaaagaaggcgactgtacaacgcgaatatcatggatcatatcgcagacaagctggaagaggggcttaacgacatccaggagatgatcaagacagaaaagtcctaccccgaaagaagattgagaggtgtgctggaagaactatcatgcgggtgttgtcgcttcctgtcactggcagacaaggatcagggccacagctcacgaaccagactggacagggaaagactgaagtcatgcatgagggagttagaaaatatgggccagcaagccagaatgctcagggcccaggtcaagagacacaccgtgcgggacaaacttcggttgtgtcagaacttccttcagaagctcagattcttggccgatgagccacagcattctatcccagacatatttatatggatgatgtcaaacaacaagagggtcgcctacgctagagttccctccaaggatctgctgtttagcatcgtggaggaggagaccggaaaagactgtgccaaggtgaagaccttgttcttgaagctgcccggcaagagaggcttcggaagcgcaggatggacggttcaggccaaggtggaactttacctttggttgggactgtctaagcagcgtaaggagtttctgtgcggtctgccttgcgggtttcaggaagtcaaggccgcacaggggttgggactgcacgccttccccccagtctccctcgtttatacaaagaaacaggcttttcagctccgggcacacatgtatcaggccaggagcctgtttgcggccgattccagtgggctttctgacccttttgccagggtgttcttcataaaccagagccagtgtaccgaggttctcaacgagaccctatgccccacctgggaccaaatgctcgtgttcgacaatttggagctgtacggtgaagcacacgagttgagagatgacccacctatcatcgtaatcgaaatctatgatcaggactcaatggggaaggctgactttatgggacggaccttcgccaagcctctcgtcaagatggcagacgaggcatactgcccccctagattcccccctcagctggagtattatcagatctatcgcggaaacgccactgcaggcgacctcctcgcggctttcgaactgctgcagatcggcccagccggcaaagcggatcttccccctattaacggtcccgtggacgtcgaccgtggtcctataatgcccgtgcctatgggtatcagacctgtccttagcaagtatcgggtggaggtgctcttttgggggctcagggacctcaagcgcgtaaatctggctcaggttgaccggccgcgagtggacattgagtgcgcaggtaagggtgtccagtcatcactcattcacaattacaagaaaaaccctaatttcaacaccctagtaaaatggttcgaagtggatcttcctgaaaacgagcttctccaccccccattgaacatccgagtggtcgattgtagagcctttgggaggtataccctggtagggagtcacgccgtcagctctctcaggcggttcatttaccgacctcccgaccggagcgcccctagctggaacaccacagtgagattactacgtagatgccgagtactgtgtaacgggggctccagctctcactccaccggcgaagtcgttgtaacaatggagccggaagttcccatcaagaaactcgagacgatggtaaagctcgatgccaccagcgaagcagttgtgaaagtagatgttgccgaggaagaaaaagagaaaaagaagaagaaaaaaggtacagctgaagaacctgaagaagaggaacccgacgaatccatgttagactggtggtcaaagtatttcgcttcgatcgacactatgaaagagcagctaaggcagcaggagccttcggggattgatctggaagagaaagaagaggtggacaacaccgaaggattgaagggcagcatgaaaggaaaggaaaaagctcgcgcagccaaagaggaaaaaaagaaaaagacacagtcttctggatccgggcaaggctctgaggcccccgagaagaagaagccaaagattgatgagctgaaggtctaccccaaagagctcgaatccgagtttgacaatttcgaagattggctgcacactttcaatctccttcggggaaagaccggcgacgatgaagacggatccactgaggaagaaagaatagttggcagattcaaagggtctttatgtgtgtataaggttcctctgcctgaggatgtctctcgtgaagccggctacgattccacctatggcatgttccagggaattccgtcgaacgatccgataaatgtgctggtgagggtttacgtggtgcgagccacggatctgcatcctgcggatattaacggaaaggctgacccctacatcgctattcgactcgggaagacagatattcgagataaggagaactatatctcaaagcaactcaaccccgtgtttggcaagtccttcgacatcgaagcctcattccccatggaatccatgctaacggtggccgtgtatgactgggacctggtcgggacagatgacctgatcggcgagaccaaaattgacttagaaaaccgcttctattcaaagcaccgagccacatgtggcattgcacagacctactcgacacacgggtataatatttggagagaccctatgaagccaagtcagattttgacgagattatgcaaggatgggaaggttgacggcccccactttgggcctcctggtcgcgtgaaagtggcgaaccgcgttttcacaggtccttccgaaatagaagatgaaaacgggcagagaaagccaacagacgaacacgtagctctcctggccctcagacactgggaagatattccgagagcaggctgccggctcgtacctgaacacgtagaaacccgtcccctgctaaaccctgacaagcctgggatcgaacagggccggcttgagttgtgggttgacatgtttccaatggatatgcccgcccccggcacccccctggatatctcaccacggaaaccgaagaagtacgaactgagggtgataatttggaatactgatgaagtggtgctcgaggacgatgatttcttcacgggggaaaagagcagtgatatctttgttcgcggttggctgaagggacaacaagaggacaagcaggacaccgacgtgcactatcacagtctgacgggcgaaggtaacttcaattggagatacttgtttcctttcgactacctggctgccgaagagaagattgtgatcagtaagaaggagtccatgttttcctgggatgagactgagtataaaatccctgctaggctcactctccagatctgggacgccgatcattttagcgcggacgatttcctgggcgcaatcgagcttgatcttaaccgatttccgcggggggcaaagacagccaagcaatgtacaatggagatggctaccggcgaagtcgatgtgcctctggtgagcatcttcaagcagaagcgagtcaagggctggtggccccttctggccagaaatgagaatgatgaatttgaactcactggcaaggtggaagctgagctgcacctcttaacggctgaggaagctgagaagaatccggtgggactggcccgcaacgaacccgaccctctggagaaacctaaccggcccgacacttcattcatctggttcctgaatccattgaagtccgcgcggtatttcctttggcacacctacagatggctgctgctgaaactgctgctacttctgttgctgctgcttctactcgctctattcctgtactctgtgcccggttatctggtgaagaaaatcctgggcgcatag

SEQ ID NO: 258251 - DNA, 7156 bp, Artificial Sequence
  derived and/or modified sequence
atcggaggggggtcgggaggaggaggaggaggcagcggcagagaagagagaggcgtgtgagccgtgctccaccggctagctccttcccgctgctcctgcctggcagtgccaggcagcccacaccagcatggccttgctcatccacctcaagacagtctcggagctgcggggcaggggcgaccggatcgccaaagtgactttccgagggcaatccttctactctcgggtcctggagaactgtgaggatgtggctgactttgatgagacatttcggtggccggtggccagcagcatcgacagaaatgagatgctggagattcaggttttcaactacagcaaagtcttcagcaacaagctcatcgggaccttccgcatggtgctgcagaaggtggtagaggagagccatgtggaggtgactgacacgctgattgatgacaacaatgctatcatcaagaccagcctgtgcgtggaggtccggtatcaggccactgacggcacagtgggctcctgggacgatggggacttcctgggagatgagtctcttcaagaggaagagaaggacagccaagagacggatggactgctcccaggctcccggcccagctcccggcccccaggagagaagagcttccggagagccgggaggagcgtgttctccgccatgaagctcggcaaaaaccggtctcacaaggaggagccccaaagaccagatgaaccggcggtgctggagatggaagaccttgaccatctggccattcggctaggagatggactggatcccgactcggtgtctctagcctcagtcacagctctcaccactaatgtctccaacaagcgatctaagccagacattaagatggagccaagtgctgggcggcccatggattaccaggtcagcatcacggtgatcgaggcccggcagctggtgggcttgaacatggaccctgtggtgtgcgtggaggtgggtgacgacaagaagtacacatccatgaaggagtccactaactgcccctattacaacgagtacttcgtcttcgacttccatgtctctccggatgtcatgtttgacaagatcatcaagatttcggtgattcactccaagaacctgctgcgcagtggcaccctggtgggctccttcaaaatggacgtgggaaccgtgtactcgcagccagagcaccagttccatcacaagtgggccatcctgtctgaccccgatgacatctcctcggggctgaagggctacgtgaagtgtgacgttgccgtggtgggcaaaggggacaacatcaagacgccccacaaggccaatgagaccgacgaagatgacattgaggggaacttgctgctccccgagggggtgccccccgaacgccagtgggcccggttctatgtgaaaatttaccgagcagaggggctgccccgtatgaacacaagcctcatggccaatgtaaagaaggctttcatcggtgaaaacaaggacctcgtggacccctacgtgcaagtcttctttgctggccagaagggcaagacttcagtgcagaagagcagctatgagcccctgtggaatgagcaggtcgtctttacagacctcttccccccactctgcaaacgcatgaaggtgcagatccgagactcggacaaggtcaacgacgtggccatcggcacccacttcattgacctgcgcaagatttctaatgacggagacaaaggcttcctgcccacactgggcccagcctgggtgaacatgtacggctccacacgtaactacacgctgctggatgagcatcaggacctgaacgagggcctgggggagggtgtgtccttccgggcccggctcctgctgggcctggctgtggagatcgtagacacctccaaccctgagctcaccagctccacagaggtgcaggtggagcaggccacgcccatctcggagagctgtgcaggtaaaatggaagaattctttctctttggagccttcctggaggcctcaatgatcgaccggagaaacggagacaagcccatcacctttgaggtcaccataggcaactatgggaacgaagttgatggcctgtcccggccccagcggcctcggccccggaaggagccgggggatgaggaagaagtagacctgattcagaacgcaagtgatgacgaggccggtgatgccggggacctggcctcagtctcctccactccaccaatgcggccccaggtcaccgacaggaactacttccatctgccctacctggagcgaaagccctgcatctacatcaagagctggtggccggaccagcgccgccgcctctacaatgccaacatcatggaccacattgccgacaagctggaagaaggcctgaacgacatacaggagatgatcaaaacggagaagtcctaccctgagcgtcgcctgcggggcgtcctggaggagctgagctgtggctgctgccgcttcctctccctcgctgacaaggaccagggccactcatcccgcaccaggcttgaccgggagcgcctcaagtcctgcatgagggagctggaaaacatggggcagcaggccaggatgctgcgggcccaggtgaagcggcacacggtgcgggacaagctgaggctgtgccagaacttcctgcagaagctgcgcttcctggcggacgagccccagcacagcattcccgacatcttcatctggatgatgagcaacaacaagcgtgtcgcctatgcccgtgtgccctccaaggacctgctcttctccatcgtggaggaggagactggcaaggactgcgccaaggtcaagacgctcttccttaagctgccagggaagcggggcttcggctcggcaggctggacagtgcaggccaaggtggagctgtacctgtggctgggcctcagcaaacagcgcaaggagttcctgtgcggcctgccctgtggcttccaggaggtcaaggcagcccagggcctgggcctgcatgccttcccacccgtcagcctggtctacaccaagaagcaggcgttccagctccgagcgcacatgtaccaggcccgcagcctctttgccgccgacagcagcggactctcagacccctttgcccgcgtcttcttcatcaatcagagtcagtgcacagaggtgctgaatgagaccctgtgtcccacctgggaccagatgctggtgttcgacaacctggagctctatggtgaagctcatgagctgagggacgatccgcccatcattgtcattgaaatctatgaccaggattccatgggcaaagctgacttcatgggccggaccttcgccaaacccctggtgaagatggcagacgaggcgtactgcccaccccgcttcccacctcagctcgagtactaccagatctaccgtggcaacgccacagctggagacctgctggcggccttcgagctgctgcagattggaccagcagggaaggctgacctgccccccatcaatggcccggtggacgtggaccgaggtcccatcatgcccgtgcccatgggcatccggcccgtgctcagcaagtaccgagtggaggtgctgttctggggcctacgggacctaaagcgggtgaacctggcccaggtggaccggccacgggtggacatcgagtgtgcagggaagggggtgcagtcgtccctgatccacaattataagaagaaccccaacttcaacaccctcgtcaagtggtttgaagtggacctcccagagaacgagctgctgcacccgcccttgaacatccgtgtggtggactgccgggccttcggtcgctacacactggtgggctcccatgccgtcagctccctgcgacgcttcatctaccggcccccagaccgctcggcccccagctggaacaccacggtcaggcttctccggcgctgccgtgtgctgtgcaatgggggctcctcctctcactccacaggggaggttgtggtgactatggagccagaggtacccatcaagaaactggagaccatggtgaagctggacgcgacttctgaagctgttgtcaaggtggatgtggctgaggaggagaaggagaagaagaagaagaagaagggcactgcggaggagccagaggaggaggagccagacgagagcatgctggactggtggtccaagtactttgcctccattgacaccatgaaggagcaacttcgacaacaagagccctctggaattgacttggaggagaaggaggaagtggacaataccgagggcctgaaggggtcaatgaagggcaaggagaaggcaagggctgccaaagaggagaagaagaagaaaactcagagctctggctctggccaggggtccgaggcccccgagaagaagaaacccaagattgatgagcttaaggtataccccaaagagctggagtccgagtttgataactttgaggactggctgcacactttcaacttgcttcggggcaagaccggggatgatgaggatggctccaccgaggaggagcgcattgtgggacgcttcaagggctccctctgcgtgtacaaagtgccactcccagaggacgtgtcccgggaagccggctacgactccacctacggcatgttccagggcatcccgagcaatgaccccatcaatgtgctggtccgagtctatgtggtccgggccacggacctgcaccctgctgacatcaacggcaaagctgacccctacatcgccatccggctaggcaagactgacatccgcgacaaggagaactacatctccaagcagctcaaccctgtctttgggaagtcctttgacatcgaggcctccttccccatggaatccatgctgacggtggctgtgtatgactgggacctggtgggcactgatgacctcattggggaaaccaagatcgacctggagaaccgcttctacagcaagcaccgcgccacctgcggcatcgcccagacctactccacacatggctacaatatctggcgggaccccatgaagcccagccagatcctgacccgcctctgcaaagacggcaaagtggacggcccccactttgggccccctgggagagtgaaggtggccaaccgcgtcttcactgggccctctgagattgaggacgagaacggtcagaggaagcccacagacgagcatgtggcgctgttggccctgaggcactgggaggacatcccccgcgcaggctgccgcctggtgccagagcatgtggagacgaggccgctgctcaaccccgacaagccgggcatcgagcagggccgcctggagctgtgggtggacatgttccccatggacatgccagcccctgggacgcctctggacatctcacctcggaagcccaagaagtacgagctgcgggtcatcatctggaacacagatgaggtggtcttggaggacgacgacttcttcacaggggagaagtccagtgacatcttcgtgagggggtggctgaagggccagcaggaggacaagcaggacacagacgtccactaccactccctcactggcgagggcaacttcaactggcgctacctgttccccttcgactacctggcggcggaggagaagatcgtcatctccaagaaggagtccatgttctcctgggacgagaccgagtacaagatccccgcgcggctcaccctgcagatctgggatgcggaccacttctccgctgacgacttcctgggggccatcgagctggacctgaaccggttcccgcggggcgcaaagacagccaagcagtgcaccatggagatggccaccggggaggtggacgtgcccctcgtgtccatcttcaagcaaaagcgcgtcaaaggctggtggcccctcctggcccgcaatgagaacgatgagtttgagctcacgggcaaggtggaggctgagctgcatttactgacagcagaggaggcagagaagaacccagtgggcctggcccgcaatgaacctgaccccctagagaaacccaaccggcccgacacgagcttcatctggttcctgaaccctctcaagtcggctcgctacttcttgtggcacacgtatcgctggctgctcctcaaactgttgctgctcctgctgctgctcctcctcctcgccctgttcctctactctgtgcctggctacctggtcaagaaaatcctcggggcctgagcccagtggcctcctggccggcccgacacggccttcgtctggttcctcaaccctctcaagtccatcaagtacctcatctgcacccggtacaagtggctcatcatcaagatcgtgctggcgctgttggggctgctcatgttggggctcttcctctacagcctccctggctacatggtcaaaaagctccttggggcatgaaggccgccagctcccgccagccgctccccagccctgccgcatttcctttcagtggcttggactctttcccatctcccctggggagcctgaggagcccagcgtccactcttcatgccttgggccgagcctgcctcctgcttgcgggggccgcctgtcctcactgccccaggctgcggcttgcccagtcccgcccctctgacccctgcctgtgggctggggagccttggatggggtggggacctggaatgggtctctcttgccccacctggctgaggcgccacccttcttcaggcccaggctccagaggaagactcctgaaaccctccccaggtcttccaagtacaggattgaagctttagtgaaattaaccaaggaccatgggtcagtgcccagggctttaaaaagaatgaacgagcaaaaggtatccccgccgtgacccctgcagatagcaccggtctttgatccgcagcaggggccagaccctgcccacaagtcccagcgcggctgcttctgccactgctgggctccacttggctcctctcacttcccagggggtcgcctgtcctgcctgtgggtttccatggcttcccagagctccctctgccccagccagcgcctccaggcccagctgaggagctgtgagaagcagcagaggggactccccatcccgggcacaccctgtcctcccacccctgcccccttgcccttccagccctttcagctgcagctgggagctggcccgtcaagtgctgcccctgcctgtgtctgggtttctgttggctgtttttcttttcttgagtggtgatttttctctaaataaaagaagtcaagcactga

SEQ ID NO: 258252 - DNA, 5994 bp, Artificial Sequence
  derived and/or modified sequence
atggctttactaatacacctgaaaaccgtttctgagctgcgcggtcggggagaccgcatagcaaaggtgacgttccgtggccagagcttctattcacgggtgttggaaaattgcgaagacgtcgccgattttgatgagaccttccgttggcctgtggcaagctcaatcgaccgaaacgaaatgctcgagattcaagtttttaactacagtaaagtcttctctaacaagcttattggaaccttcaggatggtgttgcaaaaagtggtggaggaatcccacgtcgaggtgacagacacattaatcgacgacaacaatgccattattaagaccagtctatgcgtggaggtgcgctatcaggctacggacggcacagttggaagttgggatgatggcgattttctcggcgacgaatctctgcaagaagaagagaaagattctcaggagactgacgggctgctacccggttcaaggccaagctcccggccacccggtgagaagtccttcaggcgcgcagggagaagcgtgtttagtgctatgaaattgggtaaaaacagatctcacaaagaggagccccagcgccctgatgagcctgctgtgctggagatggaggaccttgaccatctagcgattcgcttgggagacggactggacccagacagcgtgtccctggcatccgtcactgcccttacgaccaatgtaagcaataagcggtccaagcccgacatcaaaatggagcctagcgccggaaggcctatggattaccaggtgtcaattactgtcatcgaggctaggcagttagtgggcctgaacatggaccctgtcgtctgcgtagaggtgggggacgacaaaaagtatacctctatgaaagaaagcacaaattgcccgtactacaatgagtacttcgtcttcgattttcacgtctcccccgacgtgatgttcgacaaaatcatcaagattagcgttatacacagcaagaatctcttgcggtccgggacattggtggggtctttcaaaatggacgtgggaactgtctactcgcaacccgagcaccagttccatcacaagtgggccatcctgtccgatccggatgatatcagtagtggcctgaaggggtacgtcaagtgcgatgtcgcggtggttggcaagggggacaatatcaaaacaccccacaaggcaaacgagacggatgaggacgacatcgaggggaatctgctcctccctgaaggggttccacccgaacgtcagtgggcaaggttctatgtcaagatttaccgggcagagggcttacccaggatgaataccagtttgatggccaacgtcaagaaagcctttattggcgaaaacaaagatctcgtcgacccatacgtccaggttttctttgctggccagaaaggaaagacctccgtccaaaagagctcgtacgagcccctgtggaatgaacaagtggtcttcacagacctgtttcctccattatgcaaaaggatgaaagttcagattagagactctgacaaggtgaacgatgtggcgatcggtacacatttcatcgacctgcgaaagatctctaacgatggagataaaggcttcttacctacactggggccagcctgggtcaatatgtacggatctacccggaattacactcttctggatgagcatcaggatctaaacgaaggcctgggggaaggagtgtcattcagagcacggctcctcctgggcctcgctgtcgaaatcgttgacacctctaaccccgaactcacatcatctacagaagttcaggtcgagcaggccacacctatcagcgagagttgcgccggaaagatggaagagttttttctgtttggcgctttcttggaagctagcatgattgaccgacgcaatggcgataagcccatcaccttcgaggtcaccatcggcaactacgggaatgaagtggacggactaagcagaccgcagcgtccaaggccacgcaaggagcctggcgatgaggaggaggtggacctcatccagaacgccagtgacgacgaggcgggagacgctggtgaccttgcgagcgtgtcgagtactccgccaatgaggcctcaggtgaccgatagaaactatttccaccttccctacctggagcgtaaaccatgtatctacatcaaaagctggtggcctgatcaacgaagacgcctctataatgctaacataatggaccacatcgccgacaagttagaggaaggccttaacgacattcaggaaatgataaagacggagaagtcatatccggaacgtcggctgaggggagtgctggaagaactaagctgcggttgctgccgctttctgagtctagcagataaggaccaggggcactcatcaaggactcgcctggatcgtgaacggctgaagagttgcatgcgggaactggagaatatgggtcagcaggctcggatgttgagggcccaggtgaaaaggcatacagtcagagataaattacggctgtgtcagaatttccttcagaaactgcgcttcctggccgacgagccacagcatagcatacccgatattttcatctggatgatgtctaacaacaagcgggtagcctatgccagggtaccgtcgaaggatctgttattttccatcgtggaggaagagactgggaaagactgtgccaaagtgaagacgttgttcttaaagctacctgggaaaagaggattcggctccgccggatggacagtgcaggcgaaggttgagctctacctttggctcggactctctaaacaacgcaaggagtttctctgtggcctgccttgcggattccaggaggtcaaagctgcccaaggactggggctacacgcttttccacctgtctccctggtttacaccaaaaaacaggcgttccagctgcgcgctcatatgtatcaggctcgttcacttttcgctgccgactcctcgggcttgtctgatcctttcgccagagtgttcttcatcaatcagtctcagtgtactgaagtgctgaacgaaaccctttgcccaacctgggaccagatgctcgtattcgataacctcgaactgtacggcgaagcccacgaactcagagacgaccccccaatcattgtcatagagatatacgaccaggacagcatgggcaaggcggactttatggggagaacatttgcgaagccactggtcaaaatggctgatgaagcctactgtcctcccaggttccctcctcaactggagtactaccagatataccgcggtaacgcaacagccggtgaccttctcgccgctttcgagctcttgcagattggaccagccggaaaggcagacctcccaccgatcaatggtccagtcgacgtggataggggaccaatcatgcccgtgcccatgggaatccgacccgtgctgtccaaatacagagtggaagttctgttttgggggctcagagacctgaagagagtcaacctagcccaggtcgatcgtccacgcgtagatattgaatgcgccggaaaaggagtccagagctccttaatccacaactacaagaaaaaccccaactttaatactttggtcaaatggttcgaagtggatctgcctgagaatgagctgctgcatcctccactgaatatcagagtcgtagactgcagagctttcgggagatatactctggtaggaagccacgcagtttccagcctgcggagatttatctatagacccccagataggtcagctccctcttggaatacgaccgtccgattactgcgacggtgtagagtcctctgcaatggaggaagtagctcccactcaactggtgaggtcgtggtgactatggagcccgaagtccccattaagaagttggagactatggtgaagctcgacgctacctcagaagctgttgttaaggttgatgtagcagaggaagagaaagagaaaaaaaagaaaaaaaagggcacagctgaagagcctgaggaagaagaacccgatgagtctatgctggattggtggtctaagtatttcgcctctatcgataccatgaaagagcagcttcgacagcaagagccaagtggaattgacctcgaggaaaaggaggaagttgacaacactgagggtctgaaggggagcatgaaggggaaagagaaagcccgagcggctaaagaagaaaaaaagaaaaagactcaaagtagtggtagcggccaagggtccgaggccccagaaaagaagaagccgaaaatagacgagctgaaggtctatccaaaagaactggaatccgagttcgacaactttgaggattggctgcacacctttaatttgttacgcggtaagactggggatgatgaggacggcagcacagaggaggaaaggattgtcggacgctttaagggctcactgtgtgtatataaggtccctctaccagaagacgtgtccagggaagccggttacgattccacttacggaatgttccaggggatcccaagcaacgaccctataaacgtgctggtaagagtctacgtggtcagggccaccgatctccatccggctgacataaatgggaaagcagatccctatatcgctatcaggctggggaaaaccgacattagggataaagaaaattacatcagcaaacaattgaatccggtgtttggcaagagctttgatattgaggcaagtttcccgatggagtcaatgttgacggttgccgtatatgactgggacctcgtgggtaccgacgatcttatcggagagaccaagatcgacctggagaaccgtttctacagcaagcatcgcgctacatgcgggattgctcagacgtatagtacccacggctataacatttggcgcgacccgatgaaaccgtcacagattctcacacgtctgtgcaaagatggcaaggtggacggaccacactttggccctcccggtcgggtaaaggtggcaaatcgggtgttcactggaccttcagagatcgaagacgaaaatggacagcggaaaccaacagatgaacacgtggctttgctcgctctgcggcactgggaagacatcccacgggctggctgccgtttggtgcctgagcacgtcgaaacccggccactgctgaacccagataaacccggtatagagcaagggcgactggagctctgggttgacatgttccctatggacatgccagcccctggtacgcccctggacatttcaccaagaaagccaaagaaatatgaattgagagtcataatctggaacacagatgaagtggtgctggaagacgatgatttcttcacgggggagaagtcatcagacatattcgtgcggggatggctgaagggccaacaggaggataagcaggacactgatgtgcattaccacagtcttacgggtgaggggaattttaattggcgttacttgttcccctttgactatctcgctgctgaggaaaagatcgtaatttccaaaaaagagagtatgtttagctgggatgagacagagtataagatacccgctcggctgactcttcagatctgggatgcggatcatttctccgccgatgattttttgggtgccatagaactggacctgaacagattccccaggggagctaaaaccgctaagcagtgcacaatggaaatggccactggggaggtggacgttccattggtgagtattttcaagcagaagcgggttaaaggctggtggcccctgctggcccgaaacgaaaacgatgaattcgaactcactggtaaggtggaagcagaactgcaccttctcaccgctgaagaggctgagaagaaccctgtcggcctcgcccgaaacgagcccgacccattagaaaagcccaatcgccctgacacttcttttatctggttcttaaatccgctgaaaagtgcgagatacttcctctggcatacctatcggtggctacttctgaagctcctgctccttttgctgctcctgctgttgctggccttatttctatacagtgtgccaggttacctggtcaagaaaatcctcggcgcatag

SEQ ID NO: 258253 - DNA, 5994 bp, Artificial Sequence
  derived and/or modified sequence
atggccctgctgatccacctgaagaccgtgagcgagctgagaggcagaggcgacagaatcgccaaggtgaccttcagaggccagagcttctacagcagagtgctggagaactgcgaggacgtggccgacttcgacgagaccttcagatggcccgtggccagcagcatcgacagaaacgagatgctggagatccaggtgttcaactacagcaaggtgttcagcaacaagctgatcggcaccttcagaatggtgctgcagaaggtggtggaggagagccacgtggaggtgaccgacaccctgatcgacgacaacaacgccatcatcaagaccagcctgtgcgtggaggtgagataccaggccaccgacggcaccgtgggcagctgggacgacggcgacttcctgggcgacgagagcctgcaggaggaggagaaggacagccaggagaccgacggcctgctgcccggcagcagacccagcagcagaccccccggcgagaagagcttcagaagagccggcagaagcgtgttcagcgccatgaagctgggcaagaacagaagccacaaggaggagccccagagacccgacgagcccgccgtgctggagatggaggacctggaccacctggccatcagactgggcgacggcctggaccccgacagcgtgagcctggccagcgtgaccgccctgaccaccaacgtgagcaacaagagaagcaagcccgacatcaagatggagcccagcgccggcagacccatggactaccaggtgagcatcaccgtgatcgaggccagacagctggtgggcctgaacatggaccccgtggtgtgcgtggaggtgggcgacgacaagaagtacaccagcatgaaggagagcaccaactgcccctactacaacgagtacttcgtgttcgacttccacgtgagccccgacgtgatgttcgacaagatcatcaagatcagcgtgatccacagcaagaacctgctgagaagcggcaccctggtgggcagcttcaagatggacgtgggcaccgtgtacagccagcccgagcaccagttccaccacaagtgggccatcctgagcgaccccgacgacatcagcagcggcctgaagggctacgtgaagtgcgacgtggccgtggtgggcaagggcgacaacatcaagaccccccacaaggccaacgagaccgacgaggacgacatcgagggcaacctgctgctgcccgagggcgtgccccccgagagacagtgggccagattctacgtgaagatctacagagccgagggcctgcccagaatgaacaccagcctgatggccaacgtgaagaaggccttcatcggcgagaacaaggacctggtggacccctacgtgcaggtgttcttcgccggccagaagggcaagaccagcgtgcagaagagcagctacgagcccctgtggaacgagcaggtggtgttcaccgacctgttcccccccctgtgcaagagaatgaaggtgcagatcagagacagcgacaaggtgaacgacgtggccatcggcacccacttcatcgacctgagaaagatcagcaacgacggcgacaagggcttcctgcccaccctgggccccgcctgggtgaacatgtacggcagcaccagaaactacaccctgctggacgagcaccaggacctgaacgagggcctgggcgagggcgtgagcttcagagccagactgctgctgggcctggccgtggagatcgtggacaccagcaaccccgagctgaccagcagcaccgaggtgcaggtggagcaggccacccccatcagcgagagctgcgccggcaagatggaggagttcttcctgttcggcgccttcctggaggccagcatgatcgacagaagaaacggcgacaagcccatcaccttcgaggtgaccatcggcaactacggcaacgaggtggacggcctgagcagaccccagagacccagacccagaaaggagcccggcgacgaggaggaggtggacctgatccagaacgccagcgacgacgaggccggcgacgccggcgacctggccagcgtgagcagcaccccccccatgagaccccaggtgaccgacagaaactacttccacctgccctacctggagagaaagccctgcatctacatcaagagctggtggcccgaccagagaagaagactgtacaacgccaacatcatggaccacatcgccgacaagctggaggagggcctgaacgacatccaggagatgatcaagaccgagaagagctaccccgagagaagactgagaggcgtgctggaggagctgagctgcggctgctgcagattcctgagcctggccgacaaggaccagggccacagcagcagaaccagactggacagagagagactgaagagctgcatgagagagctggagaacatgggccagcaggccagaatgctgagagcccaggtgaagagacacaccgtgagagacaagctgagactgtgccagaacttcctgcagaagctgagattcctggccgacgagccccagcacagcatccccgacatcttcatctggatgatgagcaacaacaagagagtggcctacgccagagtgcccagcaaggacctgctgttcagcatcgtggaggaggagaccggcaaggactgcgccaaggtgaagaccctgttcctgaagctgcccggcaagagaggcttcggcagcgccggctggaccgtgcaggccaaggtggagctgtacctgtggctgggcctgagcaagcagagaaaggagttcctgtgcggcctgccctgcggcttccaggaggtgaaggccgcccagggcctgggcctgcacgccttcccccccgtgagcctggtgtacaccaagaagcaggccttccagctgagagcccacatgtaccaggccagaagcctgttcgccgccgacagcagcggcctgagcgaccccttcgccagagtgttcttcatcaaccagagccagtgcaccgaggtgctgaacgagaccctgtgccccacctgggaccagatgctggtgttcgacaacctggagctgtacggcgaggcccacgagctgagagacgacccccccatcatcgtgatcgagatctacgaccaggacagcatgggcaaggccgacttcatgggcagaaccttcgccaagcccctggtgaagatggccgacgaggcctactgcccccccagattccccccccagctggagtactaccagatctacagaggcaacgccaccgccggcgacctgctggccgccttcgagctgctgcagatcggccccgccggcaaggccgacctgccccccatcaacggccccgtggacgtggacagaggccccatcatgcccgtgcccatgggcatcagacccgtgctgagcaagtacagagtggaggtgctgttctggggcctgagagacctgaagagagtgaacctggcccaggtggacagacccagagtggacatcgagtgcgccggcaagggcgtgcagagcagcctgatccacaactacaagaagaaccccaacttcaacaccctggtgaagtggttcgaggtggacctgcccgagaacgagctgctgcacccccccctgaacatcagagtggtggactgcagagccttcggcagatacaccctggtgggcagccacgccgtgagcagcctgagaagattcatctacagaccccccgacagaagcgcccccagctggaacaccaccgtgagactgctgagaagatgcagagtgctgtgcaacggcggcagcagcagccacagcaccggcgaggtggtggtgaccatggagcccgaggtgcccatcaagaagctggagaccatggtgaagctggacgccaccagcgaggccgtggtgaaggtggacgtggccgaggaggagaaggagaagaagaagaagaagaagggcaccgccgaggagcccgaggaggaggagcccgacgagagcatgctggactggtggagcaagtacttcgccagcatcgacaccatgaaggagcagctgagacagcaggagcccagcggcatcgacctggaggagaaggaggaggtggacaacaccgagggcctgaagggcagcatgaagggcaaggagaaggccagagccgccaaggaggagaagaagaagaagacccagagcagcggcagcggccagggcagcgaggcccccgagaagaagaagcccaagatcgacgagctgaaggtgtaccccaaggagctggagagcgagttcgacaacttcgaggactggctgcacaccttcaacctgctgagaggcaagaccggcgacgacgaggacggcagcaccgaggaggagagaatcgtgggcagattcaagggcagcctgtgcgtgtacaaggtgcccctgcccgaggacgtgagcagagaggccggctacgacagcacctacggcatgttccagggcatccccagcaacgaccccatcaacgtgctggtgagagtgtacgtggtgagagccaccgacctgcaccccgccgacatcaacggcaaggccgacccctacatcgccatcagactgggcaagaccgacatcagagacaaggagaactacatcagcaagcagctgaaccccgtgttcggcaagagcttcgacatcgaggccagcttccccatggagagcatgctgaccgtggccgtgtacgactgggacctggtgggcaccgacgacctgatcggcgagaccaagatcgacctggagaacagattctacagcaagcacagagccacctgcggcatcgcccagacctacagcacccacggctacaacatctggagagaccccatgaagcccagccagatcctgaccagactgtgcaaggacggcaaggtggacggcccccacttcggcccccccggcagagtgaaggtggccaacagagtgttcaccggccccagcgagatcgaggacgagaacggccagagaaagcccaccgacgagcacgtggccctgctggccctgagacactgggaggacatccccagagccggctgcagactggtgcccgagcacgtggagaccagacccctgctgaaccccgacaagcccggcatcgagcagggcagactggagctgtgggtggacatgttccccatggacatgcccgcccccggcacccccctggacatcagccccagaaagcccaagaagtacgagctgagagtgatcatctggaacaccgacgaggtggtgctggaggacgacgacttcttcaccggcgagaagagcagcgacatcttcgtgagaggctggctgaagggccagcaggaggacaagcaggacaccgacgtgcactaccacagcctgaccggcgagggcaacttcaactggagatacctgttccccttcgactacctggccgccgaggagaagatcgtgatcagcaagaaggagagcatgttcagctgggacgagaccgagtacaagatccccgccagactgaccctgcagatctgggacgccgaccacttcagcgccgacgacttcctgggcgccatcgagctggacctgaacagattccccagaggcgccaagaccgccaagcagtgcaccatggagatggccaccggcgaggtggacgtgcccctggtgagcatcttcaagcagaagagagtgaagggctggtggcccctgctggccagaaacgagaacgacgagttcgagctgaccggcaaggtggaggccgagctgcacctgctgaccgccgaggaggccgagaagaaccccgtgggcctggccagaaacgagcccgaccccctggagaagcccaacagacccgacaccagcttcatctggttcctgaaccccctgaagagcgccagatacttcctgtggcacacctacagatggctgctgctgaagctgctgctgctgctgctgctgctgctgctgctggccctgttcctgtacagcgtgcccggctacctggtgaagaagatcctgggcgcctag

SEQ ID NO: 258254 - protein, 353 aa, Artificial Sequence
  derived and/or modified sequence
MQSKRDCELWCERVNPENKAALEAWVRETGIRLVQVNGQRKYGGPPPGWVGSPPPAGSEVFIGRLPQDVYEHQLIPLFQRVGRLYEFRLMMTFSGLNRGFAYARYSSRRGAQAAIATLHNHPLRPSCPLLVCRSTEKCELSVDGLPPNLTRSALLLALQPLGPGLQEARLLPSPGPAPGQIALLKFSSHRAAAMAKKALVEGQSHLCGEQVAVEWLKPDLKQRLRQQLVGPFLRSPQPEGSQLALARDKLGFQGARATLQLLCQRMKLGSPVFLTKCLGIGPAGWHRFWYQVVIPGHPVPFSGLIWVVLTLDGRDGHEVAKDAVSVRLLQALSESGANLLWSAGAEAGTMVKQ

SEQ ID NO: 258255 - DNA, 1062 bp, Artificial Sequence
  derived and/or modified sequence
atgcagtccaaaagggattgcgagctttggtgtgaaagagtgaatcccgaaaataaggccgccttggaggcgtgggtgagggagaccggtattcgactggtccaagtgaacgggcagcgcaagtatggtggacctccccccggctgggtcggatcccctccgcctgctgggagcgaggtcttcatcgggcgtctaccccaagatgtctatgagcaccagctaatcccattgtttcagagagtagggcgcctgtatgaatttcgcctgatgatgacattttctggactgaataggggattcgcttacgcgagatatagcagccggagaggcgcccaggcagccatagccactcttcataaccaccccctcaggccttcgtgtccacttctggtctgccgttcaactgaaaagtgtgaactgagtgtggacgggttacctcccaatctcaccaggagtgctctccttctcgcactccagcccttaggtccaggactgcaagaagcccgcctgctaccctcccctggaccagcaccgggtcaaattgctctgctgaagttttcgagtcatagggctgcagccatggccaagaaagccctggtggaagggcaaagtcacctgtgcggagagcaggtggcggtcgaatggctcaagcccgatctgaagcaacggctgcggcaacagctagttggacctttcttaaggagccctcagcccgaagggtcccagctggctctggcccgtgataaactgggatttcaaggtgccagggccaccctgcaattactgtgtcagcgcatgaagctgggctcaccggtctttttgactaagtgcctggggattggacctgccggctggcacaggttctggtatcaggtggtaattcccggccacccggtgcctttttctggactcatttgggtcgtgctcactctagacggtcgagacggacatgaagtggctaaagatgccgtatcagtcagactgcttcaggcactgtctgagtcaggcgccaatctgctgtggagcgccggagctgaggccgggactatggtgaaacagtag

SEQ ID NO: 258256 - DNA, 1062 bp, Artificial Sequence
  derived and/or modified sequence
atgcagagcaagagggactgtgagctgtggtgtgagcgggtgaaccctgagaacaaggccgccctggaggcctgggtgcgggagaccggcatccggctggtgcaggtgaatggccagaggaaatatggaggccccccacctggctgggtgggcagccccccacctgctggcagcgaggtgttcatcggccgcctgccccaggatgtgtatgagcaccagctgatccccctcttccagagggtgggccgcctgtatgagttccggctgatgatgaccttcagcggcctgaacagaggatttgcctatgcccgctacagcagccggcggggggcccaggccgccatcgccaccctgcacaaccaccccctgcggcccagctgccccctgctggtgtgccgcagcacagagaagtgtgagctgtctgtggatggcctgccccccaacctgaccaggtctgccctgctgctggccctgcagcccctgggccctggcctgcaggaggcccggctgctgcccagccctggccctgcccctggccagatcgccctgctgaagttcagcagccacagagctgctgccatggccaagaaggccctggtggagggccagagccacctgtgtggggagcaggtggccgtggagtggctgaagccagacctgaagcagaggctgcggcagcagctggtgggccccttcctgcggagcccccagcctgagggcagccagctggccctggcccgggacaagctgggcttccagggcgcccgggccaccctgcagctgctgtgccagaggatgaagctgggcagccctgtgttcctgaccaagtgcctgggcatcggccctgctggctggcaccgcttctggtaccaggtggtgattcctggccaccctgtgcccttcagcggcctcatctgggtggtgctgaccctggatggaagagatggccacgaggtggccaaggatgctgtgtctgtgcggctgctgcaggccctgtctgagagcggggccaacctgctgtggagcgctggagctgaggccggcaccatggtgaagcagtag

SEQ ID NO: 258257 - DNA, 1062 bp, Artificial Sequence
  derived and/or modified sequence
atgcagagcaagcgggactgcgagctgtggtgcgagcgggtgaaccccgagaacaaggccgctttagaagcttgggtccgcgaaaccggtattcgcctcgtacaggtgaatggacagagaaaatacgggggcccgcctcccggatgggtggggagccccccccctgcaggatccgaagtcttcatcggtaggttgcctcaggacgtgtatgaacatcaacttattccactgttccagcgtgtgggcagactgtacgagtttcgtctgatgatgacgttctccgggttgaacagggggttcgcgtacgctaggtattcaagcaggcgaggagctcaggccgccattgcaactcttcacaatcaccccttgaggcctagctgcccgctcctcgtgtgtcgcagtacggagaaatgtgaactgtccgttgacgggctacccccgaacctcacaaggtctgccctgctgctagcactccagccactgggacccggtttacaagaggcacggctattgccttcaccaggcccagccccgggccagatcgcattgcttaaattctcatctcatagagctgctgcaatggctaaaaaggccctggttgagggacaatcacatttatgtggcgagcaggttgccgtggagtggctgaagccagatctgaagcagcgactgcggcagcagctggtcggcccattcctgcgctccccacagccggaaggatctcagctggcattggcgagagacaagttgggattccagggtgcccgtgccactttgcagctgttgtgccagcgtatgaaactcggctctccagtctttctaaccaaatgcctcggtatcggcccagccggttggcatcgcttttggtaccaggtggtgatccctggacacccggtgccattttctggactgatttgggtggtcctgaccctggatggtagagatggccacgaagtagcaaaagatgctgtcagcgtccgtctcctgcaggcgctgtcagagtcaggagctaatttgctgtggtccgccggtgccgaagcaggtaccatggtaaaacaatag

SEQ ID NO: 258258 - DNA, 1062 bp, Artificial Sequence
  derived and/or modified sequence
atgcaatcaaagcgtgactgtgaattgtggtgcgagcgcgtgaatcctgagaataaggccgctctggaagcttgggttagagagaccgggataaggctggttcaggtgaatggtcagagaaagtatggagggccaccgccagggtgggtgggaagtcctcctcctgccggaagtgaggtgtttattggcaggctcccccaagatgtctacgagcaccagcttattcccctgtttcagcgagtgggccgactctatgagtttcgtctgatgatgaccttttccggcctcaaccgcggatttgcctacgctcgctacagctccaggcggggtgcccaggctgcaattgcaacactgcacaaccacccgctgcgccctagttgtccactgctggtttgccgctcaaccgaaaagtgtgagttatccgtggacggcttaccaccaaacctgacacgctcagcgttgcttctcgccctccaacccctcggacccggactccaggaagcaagactactcccgtctccaggtcctgcacctgggcagatcgctttgctcaaatttagctcccaccgtgctgctgccatggctaagaaggcactggtggagggtcagagtcacttgtgtggcgaacaggtggccgttgaatggcttaagcctgacttgaaacagcggctgcggcagcagctggtaggacccttccttcggagcccccagcctgaggggtcccagctggccctggcaagggataagttggggttccagggagccagggccaccctccaacttttgtgccagcgcatgaagctaggttcacccgtgtttctgacaaaatgcctgggcattggtccagctgggtggcatcgcttttggtaccaggtggtcattcctgggcatcccgtgcctttctctgggttgatatgggtggtgctaaccctcgatggcagggatggacatgaggtcgccaaggatgctgtgagcgtgagattactccaggcattatccgagtccggcgctaacctcctctggtctgccggtgccgaagctggcacaatggtgaagcaatag

SEQ ID NO: 258259 - DNA, 1062 bp, Artificial Sequence
  derived and/or modified sequence
atgcagagcaagagagactgcgagctgtggtgcgagagagtgaaccccgagaacaaggccgccctggaggcctgggtgagagagaccggcatcagactggtgcaggtgaacggccagagaaagtacggcggccccccccccggctgggtgggcagccccccccccgccggcagcgaggtgttcatcggcagactgccccaggacgtgtacgagcaccagctgatccccctgttccagagagtgggcagactgtacgagttcagactgatgatgaccttcagcggcctgaacagaggcttcgcctacgccagatacagcagcagaagaggcgcccaggccgccatcgccaccctgcacaaccaccccctgagacccagctgccccctgctggtgtgcagaagcaccgagaagtgcgagctgagcgtggacggcctgccccccaacctgaccagaagcgccctgctgctggccctgcagcccctgggccccggcctgcaggaggccagactgctgcccagccccggccccgcccccggccagatcgccctgctgaagttcagcagccacagagccgccgccatggccaagaaggccctggtggagggccagagccacctgtgcggcgagcaggtggccgtggagtggctgaagcccgacctgaagcagagactgagacagcagctggtgggccccttcctgagaagcccccagcccgagggcagccagctggccctggccagagacaagctgggcttccagggcgccagagccaccctgcagctgctgtgccagagaatgaagctgggcagccccgtgttcctgaccaagtgcctgggcatcggccccgccggctggcacagattctggtaccaggtggtgatccccggccaccccgtgcccttcagcggcctgatctgggtggtgctgaccctggacggcagagacggccacgaggtggccaaggacgccgtgagcgtgagactgctgcaggccctgagcgagagcggcgccaacctgctgtggagcgccggcgccgaggccggcaccatggtgaagcagtag

SEQ ID NO: 258260 - DNA, 1605 bp, Artificial Sequence
  derived and/or modified sequence
ggaggaagttataaagagggtacgagggggccagctggagagccatgcagtccaagcgggattgtgagctgtggtgtgagagggtgaatccagagaacaaggcggcgctggaggcgtgggtcagggagacaggcatccgcctggtgcaggtgaacgggcagaggaagtatggcgggccacccccaggctgggtgggcagcccgccgccagctgggtcagaggtgttcatcgggcggctgcctcaggacgtgtacgagcaccagcttatcccgctgttccagcgcgtgggccgcctctacgagttccgcctgatgatgaccttcagcggcctgaaccgcggcttcgcctatgcccgctacagctcgaggcgcggcgcgcaggccgccatcgccacgctgcacaaccatccgctgcggccgtcctgcccgctgctcgtgtgccgcagcaccgagaagtgtgagctgagcgttgacggcctgccgccgaatctgacccgcagcgcgctgctgctcgcgctgcagccgctgggtcccggcttgcaggaggcgcggctgctgcccagccccggaccggcgcccgggcagatcgctctgctcaaattcagctcgcaccgggccgctgccatggccaaaaaggccctggtggaagggcagtcacacctctgtggagagcaggtggctgtggagtggctcaagccagacctgaagcagcgacttcgccagcagcttgtgggtcccttcttgcggtccccacagccagagggcagccagttggctttggcaagggacaagttagggttccaaggggctcgggctaccctgcagttgctgtgccaacgaatgaagctgggcagccctgtgttcctcaccaagtgtttgggcataggacctgctggctggcaccgcttctggtaccaggtggtgattcctgggcatccggtgcccttcagcggcctcatctgggttgtgctgaccctagatggccgggatgggcatgaggtggccaaggatgctgtgtctgtacggctgctgcaggcactcagtgagtctggggccaacctcctgtggtctgctggggctgaggcaggtaccatggttaaacagtgactccattctttctccacaggcaccctgaatgggcatgcagagcctgtgtcaggccccatcccagcaggcctgggtggccactttctgacccccaaaggtggggaggggcatgggcccaggcccatcagcctccctgctgggacagggacctatggcacctgggggcagcttaggtttgggttaagttgtggtgaggggccttgccctcccgctcccagcccagggtccaacctgacccagtgatcttccatggccgttccttgtcccacccccacccgatcataccttcccccctctgccacagcttagcatgaatcttctttattgtcctgatttgtcctctttgttggtttttatttgtggggaagggcagctgagccaaaggggtcagaaattctgccctttgcctccaccacatggcattctggttttggtttctgtatagttttgggtctttctatgctggttgtatttatattaaacccctggttagtatata

SEQ ID NO: 258261 - protein, 1209 aa, Artificial Sequence
  derived and/or modified sequence
MECYYIVISSTHLSNGHFRNIKGVFRGPLSKNGNKTLDYAEKENTIAKALEDLKANFYCELCDKQYYKHQEFDNHINSYDHAHKQRLKELKQREFARNVASKSRKDERKQEKALQRLHKLAELRKETVCAPGSGPMFKSTTVTVRENCNEISQRVVVDSVNNQQDFKYTLIHSEENTKDATTVAEDPESANNYTAKNNQVGDQAQGIHRHKIGFSFAFPKKASVKLESSAAAFSEYSDDASVGKGFSRKSRFVPSACHLQQSSPTDVLLSSEEKTNSFHPPEAMCRDKETVQTQEIKEVSSEKDALLLPSFCKFQLQLSSDADNCQNSVPLADQIPLESVVINEDIPVSGNSFELLGNKSTVLDMSNDCISVQATTEENVKHNEASTTEVENKNGPETLAPSNTEEVNITIHKKTNFCKRQCEPFVPVLNKHRSTVLQWPSEMLVYTTTKPSISYSCNPLCFDFKSTKVNNNLDKNKPDLKDLCSQQKQEDICMGPLSDYKDVSTEGLTDYEIGSSKNKCSQVTPLLADDILSSSCDSGKNENTGQRYKNISCKIRETEKYNFTKSQIKQDTLDEKYNKIRLKETHEYWFHKSRRKKKRKKLCQHHHMEKTKESETRCKMEAENSYTENAGKYLLEPISEKQYLAAEQLLDSHQLLDKRPKSESISLSDNEEMCKTWNTEYNTYDTISSKNHCKKNTILLNGQSNATMIHSGKHNLTYSRTYCCWKTKMSSCSQDHRSLVLQNDMKHMSQNQAVKRGYNSVMNESERFYRKRRQHSHSYSSDESLNRQNHLPEEFLRPPSTSVAPCKPKKKRRRKRGRFHPGFETLELKENTDYPVKDNSSLNPLDRLISEDKKEKMKPQEVAKIERNSEQTNQLRNKLSFHPNNLLPSETNGETEHLEMETTSGELSDVSNDPTTSVCVASAPTKEAIDNTLLEHKERSENINLNEKQIPFQVPNIERNFRQSQPKSYLCHYELAEALPQGKMNETPTEWLRYNSGILNTQPPLPFKEAHVSGHTFVTAEQILAPLALPEQALLIPLENHDKFKNVPCEVYQHILQPNMLANKVKFTFPPAALPPPSTPLQPLPLQQSLCSTSVTTIHHTVLQQHAAAAAAAAAAAAAGTFKVLQPHQQFLSQIPALTRTSLPQLSVGPVGPRLCPGNQPTFVAPPQMPIIPASVLHPSHLAFPSLPHALFPSLLSPHPTVIPLQPLF

SEQ ID NO: 258262 - DNA, 3630 bp, Artificial Sequence
  derived and/or modified sequence
atggagtgctactacatcgtgatcagcagcacccacctgagcaacggccacttcagaaacatcaagggcgtgttcagaggccccctgagcaagaacggcaacaagaccctggactacgccgagaaggagaacaccatcgccaaggccctggaggacctgaaggccaacttctactgcgagctgtgcgacaagcagtactacaagcaccaggagttcgacaaccacatcaacagctacgaccacgcccacaagcagagactgaaggagctgaagcagagagagttcgccagaaacgtggccagcaagagcagaaaggacgagagaaagcaggagaaggccctgcagagactgcacaagctggccgagctgagaaaggagaccgtgtgcgcccccggcagcggccccatgttcaagagcaccaccgtgaccgtgagagagaactgcaacgagatcagccagagagtggtggtggacagcgtgaacaaccagcaggacttcaagtacaccctgatccacagcgaggagaacaccaaggacgccaccaccgtggccgaggaccccgagagcgccaacaactacaccgccaagaacaaccaggtgggcgaccaggcccagggcatccacagacacaagatcggcttcagcttcgccttccccaagaaggccagcgtgaagctggagagcagcgccgccgccttcagcgagtacagcgacgacgccagcgtgggcaagggcttcagcagaaagagcagattcgtgcccagcgcctgccacctgcagcagagcagccccaccgacgtgctgctgagcagcgaggagaagaccaacagcttccacccccccgaggccatgtgcagagacaaggagaccgtgcagacccaggagatcaaggaggtgagcagcgagaaggacgccctgctgctgcccagcttctgcaagttccagctgcagctgagcagcgacgccgacaactgccagaacagcgtgcccctggccgaccagatccccctggagagcgtggtgatcaacgaggacatccccgtgagcggcaacagcttcgagctgctgggcaacaagagcaccgtgctggacatgagcaacgactgcatcagcgtgcaggccaccaccgaggagaacgtgaagcacaacgaggccagcaccaccgaggtggagaacaagaacggccccgagaccctggcccccagcaacaccgaggaggtgaacatcaccatccacaagaagaccaacttctgcaagagacagtgcgagcccttcgtgcccgtgctgaacaagcacagaagcaccgtgctgcagtggcccagcgagatgctggtgtacaccaccaccaagcccagcatcagctacagctgcaaccccctgtgcttcgacttcaagagcaccaaggtgaacaacaacctggacaagaacaagcccgacctgaaggacctgtgcagccagcagaagcaggaggacatctgcatgggccccctgagcgactacaaggacgtgagcaccgagggcctgaccgactacgagatcggcagcagcaagaacaagtgcagccaggtgacccccctgctggccgacgacatcctgagcagcagctgcgacagcggcaagaacgagaacaccggccagagatacaagaacatcagctgcaagatcagagagaccgagaagtacaacttcaccaagagccagatcaagcaggacaccctggacgagaagtacaacaagatcagactgaaggagacccacgagtactggttccacaagagcagaagaaagaagaagagaaagaagctgtgccagcaccaccacatggagaagaccaaggagagcgagaccagatgcaagatggaggccgagaacagctacaccgagaacgccggcaagtacctgctggagcccatcagcgagaagcagtacctggccgccgagcagctgctggacagccaccagctgctggacaagagacccaagagcgagagcatcagcctgagcgacaacgaggagatgtgcaagacctggaacaccgagtacaacacctacgacaccatcagcagcaagaaccactgcaagaagaacaccatcctgctgaacggccagagcaacgccaccatgatccacagcggcaagcacaacctgacctacagcagaacctactgctgctggaagaccaagatgagcagctgcagccaggaccacagaagcctggtgctgcagaacgacatgaagcacatgagccagaaccaggccgtgaagagaggctacaacagcgtgatgaacgagagcgagagattctacagaaagagaagacagcacagccacagctacagcagcgacgagagcctgaacagacagaaccacctgcccgaggagttcctgagaccccccagcaccagcgtggccccctgcaagcccaagaagaagagaagaagaaagagaggcagattccaccccggcttcgagaccctggagctgaaggagaacaccgactaccccgtgaaggacaacagcagcctgaaccccctggacagactgatcagcgaggacaagaaggagaagatgaagccccaggaggtggccaagatcgagagaaacagcgagcagaccaaccagctgagaaacaagctgagcttccaccccaacaacctgctgcccagcgagaccaacggcgagaccgagcacctggagatggagaccaccagcggcgagctgagcgacgtgagcaacgaccccaccaccagcgtgtgcgtggccagcgcccccaccaaggaggccatcgacaacaccctgctggagcacaaggagagaagcgagaacatcaacctgaacgagaagcagatccccttccaggtgcccaacatcgagagaaacttcagacagagccagcccaagagctacctgtgccactacgagctggccgaggccctgccccagggcaagatgaacgagacccccaccgagtggctgagatacaacagcggcatcctgaacacccagccccccctgcccttcaaggaggcccacgtgagcggccacaccttcgtgaccgccgagcagatcctggcccccctggccctgcccgagcaggccctgctgatccccctggagaaccacgacaagttcaagaacgtgccctgcgaggtgtaccagcacatcctgcagcccaacatgctggccaacaaggtgaagttcaccttcccccccgccgccctgcccccccccagcacccccctgcagcccctgcccctgcagcagagcctgtgcagcaccagcgtgaccaccatccaccacaccgtgctgcagcagcacgccgccgccgccgccgccgccgccgccgccgccgccgccggcaccttcaaggtgctgcagccccaccagcagttcctgagccagatccccgccctgaccagaaccagcctgccccagctgagcgtgggccccgtgggccccagactgtgccccggcaaccagcccaccttcgtggcccccccccagatgcccatcatccccgccagcgtgctgcaccccagccacctggccttccccagcctgccccacgccctgttccccagcctgctgagcccccaccccaccgtgatccccctgcagcccctgttctag

SEQ ID NO: 258263 - DNA, 3630 bp, Artificial Sequence
  derived and/or modified sequence
atggagtgctattacatcgttatatcatccactcatctgtccaacgggcacttccggaacattaagggcgtgtttagagggcctctgtctaagaacgggaacaagacactggattacgccgagaaagagaatacaatagccaaagccttggaagatctgaaggctaatttctactgtgagctctgtgacaaacagtactataaacatcaggagttcgacaatcatatcaattcttacgatcatgcccacaagcaacggctcaaggaactcaagcagcgcgagttcgcccggaatgtggcctctaaatcgcggaaagacgagcgcaagcaggagaaggccctgcagcgcctccataagctagctgagctgaggaaagaaaccgtgtgcgccccaggctctgggccaatgtttaagagcacgaccgtaacagttagggagaactgtaacgagatctcgcagagagttgtcgtcgacagcgtgaataatcagcaagattttaagtacactctgatccactctgaggaaaatacaaaggatgcaacaacagtcgctgaggatcccgagtctgccaacaactacacagcgaaaaataatcaagtgggggatcaggcacagggtatccaccggcacaaaattggttttagttttgccttccccaagaaagccagtgtcaaactggaatcatccgcagccgcattcagtgagtatagtgatgatgctagcgtggggaaggggttttcacggaagtcccgcttcgtgcccagcgcttgccatctgcagcagtcgagccctacagatgtgttattatcttccgaggaaaagaccaattcttttcatccccccgaagccatgtgcagagataaggagacggtgcaaacccaggagattaaggaagtgtcttccgagaaggatgcgctgcttctaccatccttctgcaaatttcaactccagttgagcagcgacgctgataattgccaaaactctgtgccactggccgaccagattcctctcgaaagcgtggttattaatgaagatattccagtctctggaaactctttcgaactgctgggaaacaagtccaccgtgctcgacatgagcaatgattgtatctcggttcaggccacaaccgaggaaaacgtcaagcataacgaggcctctaccaccgaggtggaaaacaaaaacggccccgaaactctggccccctctaataccgaagaagtgaacatcaccattcataaaaagaccaacttctgcaagagacaatgtgagcctttcgtgccagttttgaacaaacaccgatccactgttctccaatggccaagcgaaatgcttgtgtatactacaactaagccctccatttcttactcgtgtaatccactctgctttgattttaagtccacaaaggtcaataacaatcttgataaaaataagccagacttgaaggacctgtgttcccagcagaagcaggaagatatctgcatgggccccctgtcggactacaaagatgtgagtaccgaaggcctaactgactatgagatagggtcttctaagaacaagtgctcccaggtgactcctctcctagccgacgacatcctttcctctagttgtgacagcggtaaaaacgagaacactggtcaaaggtataaaaacatctcatgcaagataagagaaacagagaagtataactttactaagtctcagatcaaacaagacactctggatgagaagtataacaagattaggctcaaggagacccatgaatactggtttcacaagtcaagacgcaagaagaaaaggaagaaactgtgccagcaccaccatatggagaagacgaaggagtccgaaacccgctgcaagatggaggcagagaacagttatacggaaaatgccgggaaatatctgttggagcccatctcagagaagcagtatctggccgccgaacagctgttggattcacaccagctgctggataaaaggcccaaaagcgaaagtatttctctgagcgataacgaggaaatgtgtaaaacttggaatactgagtataacacttacgacacaattagctcaaagaaccactgtaaaaagaacaccatcctgttaaatggccagtcaaacgcaacgatgatccatagtgggaaacataatttaacttactcccggacttactgttgctggaaaactaagatgagctcatgctcccaagaccacaggtcactcgtgttgcaaaatgatatgaagcacatgtctcaaaatcaggccgtgaagcgcggatataacagtgttatgaacgaatcagagcggttttatcgtaagcggcgccaacattcgcattcttacagctccgacgagtcccttaacagacagaatcacttgccagaagaatttctacgccctccctctacttctgtcgctccgtgtaagcctaaaaagaagagacggagaaaaagagggcgtttccacccgggctttgagacattggaactcaaagagaacactgactacccagtgaaggacaactcatccctgaaccccttagatcgcctcatttccgaggataagaaagagaagatgaagccacaggaagttgcaaagatagaaagaaatagcgagcagacgaatcagttgcgcaacaaactttccttccatccaaataacctgctgccttccgaaactaatggcgaaacagaacacctggagatggagacgacatccggggaacttagtgacgtgagcaatgacccaacgacttccgtgtgtgtggcatccgctcccacgaaagaagccatagacaacactctcctggagcacaaggagaggagtgaaaacatcaatctgaatgaaaagcagatccccttccaggtgccaaatatagagaggaacttccggcagtctcagccaaagtcatatctgtgtcactacgaactggcagaggcccttccccaggggaagatgaacgagactcctacagagtggcttcgttacaatagtggtatcctgaatacgcagcctcccctgcccttcaaagaggctcatgtgagtgggcatacctttgtgactgcggagcagattcttgctcccctggctctgcccgagcaggccctgctgatcccactggaaaaccatgataaatttaaaaacgtcccatgcgaggtgtaccagcacattctgcagcctaatatgttggctaacaaggttaaatttacgtttcccccagccgccctgccgccgccttccacgccattacaaccactccctctgcagcagtctctgtgtagtacctctgtaactacgatccaccacactgtgctgcaacaacacgctgccgctgcagctgctgcagcggccgccgcagcagccggcaccttcaaggttctgcagcctcaccagcaattcctgtctcaaattcctgccttaacccgaactagtctgcctcagctcagcgtgggtccagtgggcccgagactctgtccagggaaccagcccacatttgttgcacctccacagatgccgatcattccagccagcgtccttcaccctagccatctagctttcccatcattaccacatgctctcttcccatccttgctgtcacctcatccaactgttattccattgcaaccccttttttag

SEQ ID NO: 258264 - DNA, 3630 bp, Artificial Sequence
  derived and/or modified sequence
atggagtgctactacatcgtcatcagcagcacccacctgagcaatggccacttcaggaacatcaagggcgtcttccggggccccctgagcaagaatggaaacaagaccctggactatgcagagaaggagaacaccatcgccaaggccctggaggacctgaaggccaacttctactgtgagctgtgtgacaagcagtactacaagcaccaggagtttgacaaccacatcaacagctatgaccacgcccacaagcagaggctgaaggagctgaagcagcgggagtttgccagaaatgtggccagcaagagcaggaaggatgagaggaagcaggagaaggccctgcagaggctgcacaagctggccgagctgaggaaggagaccgtgtgtgcccctggcagcggccccatgttcaagagcaccaccgtgacagtgcgggagaactgcaatgagatcagccagagggtggtggtggacagcgtgaacaaccagcaggacttcaagtacaccctcatccacagcgaggagaacaccaaggatgccaccaccgtggctgaagatcctgagagcgccaacaactacacagccaagaacaaccaggtgggggaccaggcccagggcatccaccgccacaagattggcttctcctttgccttccccaagaaggcctctgtgaagctggagagcagcgctgctgccttcagcgagtacagtgatgatgcctctgtgggcaagggcttcagcaggaagagcagatttgtgcccagcgcctgccacctgcagcagagcagccccacagatgtgctgctgagcagcgaggagaagaccaacagcttccaccccccagaggccatgtgccgggacaaggagaccgtgcagacccaggagatcaaggaggtgtcctctgagaaggatgccctgctgctgcccagcttctgcaagttccagctgcagctgagcagtgatgctgacaactgccagaacagcgtgcccctggccgaccagatccccctggagagcgtggtgatcaatgaagacatccctgtgtctggcaacagctttgagctgctgggcaacaagagcacagtgctggacatgagcaatgactgcatctctgtgcaggccaccacagaggagaatgtgaagcacaatgaggccagcaccacagaggtggagaacaagaatggacctgagaccctggcccccagcaacacagaggaggtgaacatcaccatccacaagaagaccaacttctgcaagaggcagtgtgagccctttgtgcctgtgctgaacaagcacaggagcacagtgctgcagtggcccagcgagatgctggtgtacaccaccaccaagcccagcatctcctacagctgcaaccccctgtgctttgacttcaagagcaccaaggtgaacaacaacctggacaagaacaagccagacctgaaggacctgtgcagccagcagaagcaggaggacatctgcatgggccccctgagtgactacaaggatgtgtccacagagggcctgacagattatgaaattggcagcagcaagaacaagtgcagccaggtgacccccctgctggctgatgacatcctgagcagcagctgtgacagcggcaagaatgaaaatacaggccagcgctacaagaacatcagctgcaagatccgggagacagagaagtacaacttcaccaagagccagatcaagcaggacaccctggatgagaagtacaacaagatccggctgaaggagacccatgagtactggttccacaagagcaggaggaagaagaagaggaagaagctgtgccagcaccaccacatggagaagaccaaggagagcgagacccgctgcaagatggaggctgaaaattcctacacagaaaatgctgggaagtacctgctggagcccatcagcgagaagcagtacctggccgctgagcagctgctggacagccaccagctgctggacaagaggcccaagtctgagagcatcagcctgagtgacaatgaggagatgtgcaagacctggaacacagagtacaacacctatgacaccatcagcagcaagaaccactgcaagaagaacaccatcctgctgaatggccagagcaatgccaccatgatccacagcggcaagcacaacctgacctacagcaggacctactgctgctggaagaccaagatgagcagctgcagccaggaccacaggagcctggtgctgcagaatgacatgaagcacatgagccagaaccaggccgtgaagaggggctacaacagcgtgatgaatgaaagtgagcgcttctacaggaagaggcggcagcacagccacagctacagcagtgatgagagcctgaaccggcagaaccacctgcctgaggagttcctgcggccccccagcacctctgtggccccctgcaagcccaagaagaagagaagaaggaagaggggccgcttccaccctggctttgagaccctggagctgaaggagaacacagactaccctgtgaaggacaacagcagcctgaaccccctggacaggctcatcagcgaggacaagaaggagaagatgaagccccaggaggtggccaagattgaaagaaattctgagcagaccaaccagctgaggaacaagctgtccttccaccccaacaacctgctgcccagcgagaccaacggggagacagagcacctggagatggagaccaccagcggggagctgagtgatgtgtccaatgaccccaccacctctgtgtgtgtggccagcgcccccaccaaggaggccatcgacaacaccctgctggagcacaaggagaggtctgagaacatcaacctgaatgagaagcagatccccttccaggtgcccaacattgaaagaaacttccggcagagccagcccaagagctacctgtgccactatgagctggccgaggccctgccccagggcaagatgaatgagacccccacagagtggctgcgctacaacagcggcatcctgaacacccagccccccctgcccttcaaggaggcccacgtgtctggccacacctttgtgacagctgagcagatcctggcccccctggccctgcctgagcaggccctgctgatccccctggagaaccacgacaagttcaagaatgtgccctgtgaggtgtaccagcacatcctgcagcccaacatgctggccaacaaggtgaagttcaccttccccccagctgccctgcccccacccagcacccccctgcagcccctgcccctgcagcagagcctgtgcagcacctctgtgaccaccatccaccacacagtgctgcagcagcacgccgctgctgctgctgctgctgctgctgctgctgctgctggcaccttcaaggtgctgcagccccaccagcagttcctgagccagatcccagccctgaccaggaccagcctgccccagctgtctgtgggccctgtgggcccccggctgtgccccggcaaccagcccacctttgtggccccaccccagatgcccatcatcccagcctctgtgctgcaccccagccacctggccttccccagcctgccccacgccctcttccccagcctgctgagcccccaccccaccgtcatccccctgcagcccctcttctag

SEQ ID NO: 258265 - DNA, 3630 bp, Artificial Sequence
  derived and/or modified sequence
atggagtgctactacatcgtgatcagcagcacccacctgagcaacgggcactttaggaatattaaaggggtctttcggggtccgctgtcgaagaacggcaacaagaccctggactatgcggaaaaagagaatactatagccaaggcgctagaggacctcaaagcaaatttttactgtgaactatgcgataaacaatactacaagcaccaggaatttgacaaccatatcaattcttacgatcacgcccataagcagaggttgaaggaactgaaacagagggaatttgcgagaaacgtcgcgagcaaaagccgcaaggatgaacggaaacaagaaaaagctctgcagagactccacaagcttgccgagctgcggaaagagaccgtctgtgcaccaggaagtggaccaatgttcaaatctaccacggtaaccgttagagaaaattgcaatgaaatcagccaacgagtggtcgtggacagcgtgaacaatcagcaggatttcaagtatactttgattcatagtgaagagaataccaaggatgcaaccactgttgctgaggaccccgaaagcgcaaacaattacactgcgaagaacaatcaagttggcgatcaagcacagggcatccatagacataaaatcggcttcagcttcgcatttccaaagaaggcgtctgtgaaattagaatcatcggctgctgctttcagcgaatattcagacgacgcatccgtgggaaaaggcttttcacgtaagtcccgctttgtgccatcagcctgtcatttacagcagtcctcccctacagatgtgctgctctccagtgaggaaaagacaaactcattccacccacctgaggctatgtgtagggataaagaaacagtacagacacaggaaattaaggaagtgtcatctgagaaggacgctcttcttcttccaagcttctgtaagttccaattacaactgtccagtgacgcggacaattgccagaactcagtccctctggcagatcaaatccccctggagagtgtagtgatcaacgaggacatcccagtgagcggaaattcattcgaattgctaggaaacaaatctaccgtcctggatatgagcaacgactgtattagtgttcaagctacaacagaggagaacgttaagcataacgaagcgtccaccaccgaggtcgagaataaaaatggccctgagacccttgcaccctccaacaccgaggaagtaaatatcactatccacaaaaagactaacttttgcaagaggcagtgtgagccatttgtgcctgtcttaaataagcaccgcagtacagtcctgcagtggccctccgaaatgctggtctataccactaccaaaccctcaatctcctatagctgcaacccgctctgcttcgactttaaatctaccaaggtcaataacaatctagacaagaataaacctgatcttaaagatctgtgttcacagcagaagcaggaagacatctgtatgggacccttgtccgactataaggatgttagcaccgaaggactgacagactacgaaatcggatctagtaaaaataagtgctcacaggtgacaccactgttggccgatgatatattgagttctagttgtgactctggcaagaacgagaacactggtcagcggtacaaaaatattagttgcaaaatacgggagaccgaaaagtataatttcaccaagagccagattaagcaggacactctggacgaaaagtacaacaaaatccgtctgaaagagacacacgaatactggtttcacaaatctcgacggaagaaaaagcgtaagaaactatgccaacaccaccatatggaaaagacaaaagaaagtgagacgaggtgtaaaatggaagctgaaaactcatacaccgaaaatgcaggaaaatatctcctagaacctatatcagaaaaacaatatctcgcagccgagcaactgcttgactcccatcagcttttagataaaaggccaaagtctgagtctatttcgctgtctgataacgaggaaatgtgtaaaacctggaatacggaatacaacacctatgacacaattagttcaaaaaatcattgcaagaaaaatactattctacttaatgggcagtccaatgcaactatgattcattctggcaaacacaacttaacgtattctagaacgtattgttgttggaagaccaaaatgtcttcctgctcgcaggaccatcggtccctggtcctgcagaacgatatgaagcacatgtctcaaaaccaggcagtgaaacggggctataactccgtcatgaacgagtccgagcgcttctaccgaaagagacgccagcatagccattcatactctagtgatgagagcctcaaccgccagaatcacttgccagaagaattccttcggccgccatccacaagtgtcgcaccctgcaagcctaagaagaaacgtcggagaaaacgggggagattccacccaggatttgagactttggagctaaaggagaataccgattatccagtaaaagataactccagcctcaatcccttggaccgattgatatcagaagacaagaaagaaaagatgaaacctcaagaggttgccaagatagaaagaaatagtgagcagactaaccaattgcggaataaactcagcttccaccccaacaatctcctgccttcagagaccaacggggaaactgaacatctcgagatggagactacgtccggggagttaagcgatgtgagcaatgatcctacgacctccgtttgtgtggcctccgctcctacaaaggaggccattgacaacaccctattggagcacaaagagcggtctgagaatattaatctgaatgagaagcagattccttttcaggtcccaaacattgagagaaatttcaggcaatcccagcccaaatcatacctgtgtcattacgaactggcagaggccctgcctcagggaaagatgaacgagaccccaacggagtggctgagatacaactctgggatactgaacacgcagcccccactccctttcaaggaagcccacgtgtctggtcacactttcgtgacagccgaacagattcttgcacccttggctctaccggagcaggcgttgttgattcctctcgagaaccacgataagtttaagaatgtcccctgcgaagtctatcagcacattctgcaaccaaatatgctggcgaataaagttaaattcacctttccacccgcagcccttcccccaccttccactcctttacagccactgcctctccagcaaagcctttgtagcacctcagtcacgaccatccatcacaccgtgctgcaacagcacgccgcagccgctgccgctgcggccgccgctgccgccgctggtactttcaaagtcctgcagccacatcaacagtttctatctcagattcctgcgcttactaggactagcctgccccagctcagcgtcggccctgtcggacctagactctgtcccgggaatcagccaacttttgttgctcccccgcagatgcccataattcctgcaagtgtgcttcacccttctcacctggccttcccttctctgcctcatgccctgttcccaagcttactctcacctcatcctactgtgatccctcttcagcctctattctag

SEQ ID NO: 258266 - DNA, 3630 bp, Artificial Sequence
  derived and/or modified sequence
atggagtgctattacattgtgattagttctacacacctgtcgaatggccacttccggaacattaaaggagtgtttcgcggtccacttagtaaaaatggtaacaaaacgctcgattatgcggagaaggagaatactatagcgaaagcactggaagacctgaaagccaacttttattgtgaactgtgcgacaaacagtattataaacaccaagagttcgacaatcacatcaatagctacgaccatgctcacaagcaaaggctgaaagagctgaaacagcgggagttcgctcggaacgttgcgagcaagagtcgaaaggatgaacgcaaacaagaaaaagcgctgcaaagacttcacaaacttgccgagctgagaaaagaaacggtctgcgctccaggatctgggccaatgtttaagtcaaccacagtgactgtccgcgaaaactgcaatgaaatatcccaaagagtggtcgtggactccgtcaacaatcagcaggacttcaagtacactttaatccactccgaggagaacacaaaggatgccaccaccgtcgccgaagaccctgaatccgccaacaactataccgctaaaaataatcaggtaggtgatcaagcccaggggatccataggcacaaaatcgggttttcttttgctttccccaaaaaagctagcgtaaaactggagagtagtgctgccgctttttccgagtactcggatgacgcatccgtgggcaaaggctttagccgcaaatccaggttcgtgccatctgcctgccacctgcagcaaagctctccgacggatgtgcttctgagctctgaagagaagaccaattcatttcacccccctgaggccatgtgtcgggataaggagaccgtgcagactcaggagattaaagaggttagtagcgagaaagatgcactccttttgccctccttctgtaagtttcaactgcagctgagctccgacgcagataactgccagaattcagtgcccctggctgaccagatccccttggagtccgtcgtgattaatgaggatatccctgtgtccggaaactctttcgagctgctgggtaataaatccacggtgctggatatgagtaatgattgtattagcgtacaggcaaccacggaggaaaacgtgaagcataatgaagccagcaccaccgaagtagagaacaagaatggccctgaaacgttggccccatctaacaccgaggaggtgaatataacaatacataaaaagacaaacttctgtaaacgccaatgcgagccttttgtcccagtgctcaataaacaccggtctacggttctccagtggccgtccgagatgttggtttacactaccactaagccaagtataagctacagctgtaatccactgtgctttgacttcaaatcaacaaaagtcaataataacttagataaaaataaacccgatctcaaagatctatgctctcagcaaaagcaagaggatatttgtatgggcccactgagcgactacaaagacgtctctaccgagggtctgaccgactacgaaatcggctcctcaaagaacaaatgctcacaagtaacgccactgctggccgacgatatcctgtcgagttcgtgcgattctgggaagaatgagaacacaggtcagagatacaagaatatcagttgcaagattagagagaccgaaaagtataactttacaaagtcacagatcaagcaggacacattggacgagaagtacaacaagatccgccttaaagagactcacgaatattggttccataagtcccggagaaaaaagaagcggaagaagttgtgccaacatcatcacatggagaaaacaaaggaatctgaaacacgatgcaaaatggaagccgagaattcctacactgagaacgccggaaaatatctgctggagccgattagcgaaaagcaatatctggcagccgagcaactgttagactctcaccagttactggataaacggccaaagtctgaaagcatctctctttccgacaatgaagagatgtgcaaaacctggaataccgagtacaatacgtacgacacaatctccagcaaaaatcactgtaaaaaaaatactattctgctcaatggccagagtaacgccactatgatccattcagggaaacacaacctgacctacagtaggacctattgctgctggaagactaagatgagcagctgctcgcaggatcaccgcagcttggttcttcagaatgatatgaagcatatgtcccaaaaccaggctgttaaacggggatataactccgtcatgaatgagagcgagcgcttttatcgtaagagaagacagcattctcattcttattcgtctgacgaaagcttgaaccggcagaaccacctgcccgaagagttcctgcgtcctccgtcaacatccgtggccccttgtaagcctaaaaaaaaacgtcgacgtaagaggggccgttttcacccaggctttgagaccctcgagctcaaagagaacaccgattaccccgtgaaagacaacagttcccttaaccccctagatcgattgatttcagaagacaaaaaagaaaaaatgaagcctcaagaagtagccaaaattgagcggaattcggaacagaccaaccaactgcgaaataaacttagtttccatcctaataacctgctgccaagcgaaactaatggcgagacagaacaccttgaaatggaaaccacaagtggcgaactctcagatgtgtccaatgacccaaccacctctgtgtgcgttgcctccgcgccaactaaagaagccatcgacaatacgctcctggagcacaaggaacgcagcgaaaacatcaatctgaacgagaaacagatcccattccaagtgccgaatatagagcgcaattttcgtcagagtcaaccaaagagttatctctgtcactatgagctggccgaagccctacctcagggaaagatgaatgagactccaaccgagtggctccgttataactctggcattctgaatacccagccgccacttccattcaaggaggcacatgtgtctggacacacgtttgtcacggctgagcagattcttgctcccctagccttacctgaacaggccctcctgattcccctggagaaccacgacaaattcaaaaatgtgccatgtgaggtgtaccagcacatcctgcagcccaatatgctggccaataaggtcaagtttaccttccccccagccgctctgccacctccgagtacacctctgcagccactcccactgcaacaaagcctttgcagcacaagcgtcactactattcaccatacggtgctccaacagcacgccgcagctgccgctgctgcggcagccgctgccgctgccggtacatttaaagtgctccagccacaccagcaattcctcagccagatccctgctctgaccagaactagcctccctcagttgagtgtgggcccagtggggccacgcctctgtccaggtaatcagccaaccttcgtggccccaccccagatgccaattatccccgcttcggtgctccatccatcccatcttgcctttccttctttaccgcatgctttatttcctagtctgctgagcccccaccctaccgtgatccccctgcagcctcttttttag

SEQ ID NO: 258267 - DNA, 4690 bp, Artificial Sequence
  derived and/or modified sequence
ggccgcgggtcccggcggcggggtgggcgggggaggcagcgggtgacagatgtactcctctgacagctctcagtatcagcccagtggctccctgccattggctcagtgcaatggaccggcaacgccgctcactataataacactcatgcctgccagcagcagcaactccgagtgcaggcgccgagcgcgggggatgctgccgccgccgccgcttctgctgccgcgcgggcggctcccgcagccccgctccgcccggccaccgcgcgggcactgactcccgctcggttccgtttcgccggcccggccccctcctaggctggaatcctcccgcggggctcgtcgtcccgacgcgaatctgaggagaaacaggagcgagagactgaggggagagcgcggcgagcatgcggaggcgggggagcctcggcgctcaccacagaggggtgcagtgagccagtctccagaggacgtgccgggggtggctgcgtgccctcgtggcgggttcccagcccaccgtcgccggccccggcgcgctgcggctgtgggcgcggggtgcgtggaagcggcggctgcggcggaggaggcggcggctgccccatggagtgttactacattgtcatcagctccacgcatctcagcaacggacactttcgcaacatcaagggagttttccggggccctctcagcaagaacgggaacaaaactctggactatgctgagaaggaaaataccatagcaaaagctctggaagatctgaaggcaaatttttactgtgaactctgtgacaagcagtactataagcaccaggagtttgacaatcacattaattcatatgaccatgctcacaagcagaggctcaaggaactgaaacaaagggaatttgctcgaaatgtagcatctaaatccaggaaagatgaaagaaaacaggaaaaggcactccaacgcctgcacaagctggctgagctaagaaaggaaactgtatgtgctcctggaagtggccccatgttcaaatcaacaactgttactgtgagagaaaactgtaatgaaatttcccaacgagttgttgtggattcagttaataaccagcaagatttcaaatatactttgattcatagtgaagagaatactaaagatgctaccactgttgctgaagatccagaaagtgcaaataattatacagcaaaaaataaccaagttggggatcaagcccaggggattcacagacacaaaatcggcttttcttttgcatttccaaagaaagcgtccgtgaagctagagtcctcagctgcagccttctctgaatacagtgatgatgcctcagtgggaaaaggatttagcagaaaaagtagatttgtccccagtgcttgtcatcttcaacaatcttcaccaacagatgtgcttttgagttctgaggagaaaactaactcttttcatccaccagaggcaatgtgcagagacaaagaaactgttcaaactcaagagataaaagaagtctctagtgaaaaagatgcattattattaccttcattttgcaagtttcaacttcagttatcttctgatgcagataattgtcaaaattcagtcccattagcagatcaaataccactagagagtgttgttattaatgaagacatacctgttagtggtaacagttttgagttgttaggaaataaatccacagttcttgacatgtctaatgattgcatatctgtgcaagctaccacagaggaaaatgttaagcataacgaggcatccacaactgaggttgaaaataaaaatggtcccgagacattggccccttcaaatactgaagaggttaacataactatacataagaaaacaaatttctgcaaaagacaatgtgagccatttgtacctgtccttaacaaacacagatctacagttcttcagtggccatcagaaatgctggtttatacaactacgaaaccatcaatttcctatagctgtaatcctctatgttttgacttcaagtctactaaagtaaataataatctagataaaaataagccagacttaaaagatctttgttctcagcagaagcaggaagacatttgcatgggaccactttcagattacaaggatgtatctacagaaggactcactgattatgaaattggaagtagcaaaaataaatgcagccaagtcactcctcttttggctgatgatattctctccagtagttgtgattctggaaaaaatgagaacacaggtcagaggtataaaaacatttcctgtaagatcagagaaacagaaaagtataattttactaaaagtcaaataaaacaggacactctagatgaaaaatacaacaaaataaggttgaaagagacccatgaatactggttccataaaagtagaagaaagaaaaaaagaaaaaagttatgtcagcatcatcatatggagaaaaccaaagaatcagaaactcgctgcaaaatggaagcagagaatagttacactgaaaatgctgggaaatatctattggaaccaatttcagaaaagcagtatttagctgcagagcaattattagactcacatcagttacttgataaaaggcccaaatcagaatccatatccttaagtgacaatgaagaaatgtgtaaaacatggaatactgaatacaacacttatgatactatcagttctaaaaaccactgtaaaaagaacacaatacttttaaatggacaatcaaatgcaacaatgatacattctgggaaacataatttaacatattctagaacttactgttgttggaaaaccaaaatgtcaagctgtagtcaggatcacagaagcttagttcttcaaaatgatatgaaacacatgagtcagaatcaggctgttaaaagaggttacaattctgtcatgaatgaatcagaaagattctatcgaaaacgtagacaacattcacattcttattcttcagatgaaagtttaaatcgacagaatcatttaccagaagaatttttgaggccaccaagtacttcagttgctccctgcaagcctaaaaagaaacggaggcgaaaaagaggcagattccaccccggatttgaaactttagaactcaaagaaaatacagattatcccgtgaaagacaattcttccttaaatcctctggataggttaataagtgaagacaaaaaagagaaaatgaaaccacaagaagttgcaaaaatcgaaaggaactcagaacaaacaaaccaattaagaaacaaactgtctttccaccctaacaatctccttccttctgaaaccaatggtgaaactgagcatttagaaatggagaccacttctggtgaattgtcagatgtttccaatgatcccaccacatctgtctgtgtagctagtgccccaacaaaagaagcaattgacaataccctgcttgaacacaaagaaagaagtgagaatataaatcttaatgaaaagcaaattccttttcaggtgcctaatattgaaaggaactttagacagtcacagcctaaatcctatctttgccattatgaactggctgaggcccttccacaaggaaagatgaatgagacaccaactgagtggctgcgttataattcaggaatccttaacacacaaccaccattaccattcaaagaagcacatgtcagtggtcatacttttgtaacagctgagcaaatcctggctccattagctttaccagagcaagcattattgatcccactagaaaaccatgacaaattcaaaaatgtaccatgtgaggtctaccagcacattctgcagccaaacatgctggccaacaaggttaaatttacctttcctccagctgccctcccaccccctagcacacctctgcagcctttgcctttgcagcagtccttatgttctacctctgtaaccactatccatcacactgttttgcagcagcacgctgcagctgctgcagctgcagctgcagccgcagctgcaggaacctttaaagtgcttcagccacaccaacagtttctttcccaaatcccagctctcaccagaacctcattacctcagctctcagtaggaccagtaggaccgaggctttgtcctgggaaccagccaacttttgttgctcctcctcagatgccaatcattccagcttccgttcttcatcctagccatctggctttcccatctttaccccatgcactctttccttcactgctttccccacaccctactgtcatccctttgcaacctctcttctagtcatcaccataatgggaaaaaaatactcttgtgaaaactattgctatatgcgttaagtgttcatctatgtgggtacatggctatttaactggtggaaataaactggccgatacatggcgtcattggtttgaaatcatttactgtaagtgcaatgatgcaaataaatccctaagtttctgatatataatattattaaagcactgaatagtttgaaaatcaatacaatatatgctatatattaaaatgatgtcttaagagtatgtataatgtacataaaatatatttatagtactctaatttatgttgtaaagtatgctcccttggtttttcttaatctttgtgtatttgcacctatttaatgtttagacaaagctgatggcactatgttttgtatcatgttccttgaaactgtaaattcagtgaaaaatatctcttgcaataaatttttgttaactatttaagtaaa

SEQ ID NO: 258268 - protein, 419 aa, Artificial Sequence
  derived and/or modified sequence
MLAAAFADSNSSSMNVSFAHLHFAGGYLPSDSQDWRTIIPALLVAVCLVGFVGNLCVIGILLHNAWKGKPSMIHSLILNLSLADLSLLLFSAPIRATAYSKSVWDLGWFVCKSSDWFIHTCMAAKSLTIVVVAKVCFMYASDPAKQVSIHNYTIWSVLVAIWTVASLLPLPEWFFSTIRHHEGVEMCLVDVPAVAEEFMSMFGKLYPLLAFGLPLFFASFYFWRAYDQCKKRGTKTQNLRNQIRSKQVTVMLLSIAIISALLWLPEWVAWLWVWHLKAAGPAPPQGFIALSQVLMFSISSANPLIFLVMSEEFREGLKGVWKWMITKKPPTVSESQETPAGNSEGLPDKVPSPESPASIPEKEKPSSPSSGKGKTEKAEIPILPDVEQFWHERDTVPSVQDNDPIPWEHEDQETGEGVK

SEQ ID NO: 258269 - DNA, 1260 bp, Artificial Sequence
  derived and/or modified sequence
atgctggccgccgccttcgccgacagcaacagcagcagcatgaacgtgagcttcgcccacctgcacttcgccggcggctacctgcccagcgacagccaggactggagaaccatcatccccgccctgctggtggccgtgtgcctggtgggcttcgtgggcaacctgtgcgtgatcggcatcctgctgcacaacgcctggaagggcaagcccagcatgatccacagcctgatcctgaacctgagcctggccgacctgagcctgctgctgttcagcgcccccatcagagccaccgcctacagcaagagcgtgtgggacctgggctggttcgtgtgcaagagcagcgactggttcatccacacctgcatggccgccaagagcctgaccatcgtggtggtggccaaggtgtgcttcatgtacgccagcgaccccgccaagcaggtgagcatccacaactacaccatctggagcgtgctggtggccatctggaccgtggccagcctgctgcccctgcccgagtggttcttcagcaccatcagacaccacgagggcgtggagatgtgcctggtggacgtgcccgccgtggccgaggagttcatgagcatgttcggcaagctgtaccccctgctggccttcggcctgcccctgttcttcgccagcttctacttctggagagcctacgaccagtgcaagaagagaggcaccaagacccagaacctgagaaaccagatcagaagcaagcaggtgaccgtgatgctgctgagcatcgccatcatcagcgccctgctgtggctgcccgagtgggtggcctggctgtgggtgtggcacctgaaggccgccggccccgcccccccccagggcttcatcgccctgagccaggtgctgatgttcagcatcagcagcgccaaccccctgatcttcctggtgatgagcgaggagttcagagagggcctgaagggcgtgtggaagtggatgatcaccaagaagccccccaccgtgagcgagagccaggagacccccgccggcaacagcgagggcctgcccgacaaggtgcccagccccgagagccccgccagcatccccgagaaggagaagcccagcagccccagcagcggcaagggcaagaccgagaaggccgagatccccatcctgcccgacgtggagcagttctggcacgagagagacaccgtgcccagcgtgcaggacaacgaccccatcccctgggagcacgaggaccaggagaccggcgagggcgtgaagtag

SEQ ID NO: 258270 - DNA, 3088 bp, Artificial Sequence
  derived and/or modified sequence
tttcctatgcaaaagagcccaggcagaaagacaaacctaaataagaatctaacttctgtaagaagctgtgaagagtgatgctggcagctgcctttgcagactctaactccagcagcatgaatgtgtcctttgctcacctccactttgccggagggtacctgccctctgattcccaggactggagaaccatcatcccggctctcttggtggctgtctgcctggtgggcttcgtgggaaacctgtgtgtgattggcatcctccttcacaatgcttggaaaggaaagccatccatgatccactccctgattctgaatctcagcctggctgatctctccctcctgctgttttctgcacctatccgagctacggcgtactccaaaagtgtttgggatctaggctggtttgtctgcaagtcctctgactggtttatccacacatgcatggcagccaagagcctgacaatcgttgtggtggccaaagtatgcttcatgtatgcaagtgacccagccaagcaagtgagtatccacaactacaccatctggtcagtgctggtggccatctggactgtggctagcctgttacccctgccggaatggttctttagcaccatcaggcatcatgaaggtgtggaaatgtgcctcgtggatgtaccagctgtggctgaagagtttatgtcgatgtttggtaagctctacccactcctggcatttggccttccattattttttgccagcttttatttctggagagcttatgaccaatgtaaaaaacgaggaactaagactcaaaatcttagaaaccagatacgctcaaagcaagtcacagtgatgctgctgagcattgccatcatctctgctctcttgtggctccccgaatgggtagcttggctgtgggtatggcatctgaaggctgcaggcccggccccaccacaaggtttcatagccctgtctcaagtcttgatgttttccatctcttcagcaaatcctctcatttttcttgtgatgtcggaagagttcagggaaggcttgaaaggtgtatggaaatggatgataaccaaaaaacctccaactgtctcagagtctcaggaaacaccagctggcaactcagagggtcttcctgacaaggttccatctccagaatccccagcatccataccagaaaaagagaaacccagctctccctcctctggcaaagggaaaactgagaaggcagagattcccatccttcctgacgtagagcagttttggcatgagagggacacagtcccttctgtacaggacaatgaccctatcccctgggaacatgaagatcaagagacaggggaaggtgttaaatagatttaagtttcaaagcaaaacaaactgtgattattgtatttacttgtactgctgcttatcaatattgctgactttacaaactgatataattattaccattaggaattataaaaatatttcacaatctacactttccaaatgtgcaatgtggtaagtagagaaccatgttagaagtaataattgtttcagaattagaacttggcttcccaaacaatttaagtgttgtgtaaagatgttgctgtcaaagtgattagacagcctggctattctgtcatttgttcacagtggttttactgggtaccccctaggaccagccctgtagtggaccggctggagcctgcagtagaggttctgtcaaagctgagcccctttaccttcagtttcacccaggacctgctagtcctaattttacctactaaattgtatttcacataaccaaagctcaaaatctactttcacttgagatttttaacacattaatgataaattttaatgcgttcttcatttacttaataagtgttaatttacttgatgaaaagtccgtatcataatgttcatgactgaaggtcaaagaaaaagaaacagcaccttattccaattctggactcatttcaagccatggctggttctggccaagtttaaataaattcaaacttaaactaaagcctgcttcagtgaactttttaaagctacctgaatgagtcttcagtttctaagtctaagaattgtagcagctttccaatgacattcagtagtctgatatgggggaaaaaatacttaaaaaaatgtcctctcttcacttccaaaatgtgggaaagttatttttctataagcagaaatgtgttcctcctaatatctcctttctcccaagataaaccatggttaatgatataggtatagattactcctcaaatacaaatagaagatggagatggtgatctttcttgttaatggtactaaacttacccttactcagaacattgaacttgaaccctactcaacttttaaaatactataggctaagttataaaaataatctagcaacctgagaaagagattaatatcaaaaagagaaaattcaacaaaccaagacagaatttggttaagaatacaaaataaaaagcataagggcaatgcagaaagcagtaaaactgtgtacccagacatacggtaaaatctgagtaacaggcaataaccattcattttatagcaaggtaaaacatacccaataaaacatgattatgatatatttctgccccttttaagtataatgacattcacccatgattcttgattactttgttatggaactcgggtattttcactgaaagtttccctcagaatagaaatgcctttagggcaaaccaagccatggagaatctgaaatataaaggatatgttatggaaaaaaaaagattttgctttttgtctatgggtttccggattctttgctttttcataagtggtcatagtttgctttttaacacaggaggtagggctgtattctttttacatccttcattacaaattttatttgaagctcatgtattcaaataaagtaaaatttaacccaagaatccaaaatattgtcttgtgatatggtagttataaaaaggattatcattgtctgtgattatttgaataaataatttttatgttcattatatgtagtaaatttaggatgtaagcttccagggtttgacactttaaacttgtaaagaaataaaaataattacgctttacttccgata

SEQ ID NO: 258271 - DNA, 1260 bp, Artificial Sequence
  derived and/or modified sequence
atgctggcagccgccttcgccgattcaaactcctcttctatgaatgtctcttttgcccaccttcacttcgccggcggctatttaccttccgattctcaggactggcgaacgattatcccagccctgcttgtggcagtctgtctagtgggcttcgtcggaaatctgtgcgtcatcggcatactgctccataatgcctggaaggggaaaccctccatgattcactctcttatcctaaatctatccctcgctgatttgtcactgttgctgttctctgcaccaattcgcgccaccgcatactctaagagcgtctgggatctcggatggttcgtttgcaagagcagcgactggtttatccacacttgtatggcagcaaaatccctgaccatcgtagtcgttgctaaggtttgtttcatgtacgcctctgatcccgctaagcaggtatctatccacaattataccatctggtcggttcttgtcgcaatttggactgtagccagcctactccctctcccagagtggttctttagcaccatcaggcaccatgagggagtcgagatgtgtctggtagatgtcccagcagtcgccgaagagtttatgtcaatgttcggaaagttgtatcctctgctcgcctttgggctgcctctctttttcgctagcttctatttctggcgcgcctacgaccagtgcaaaaagcggggtacaaagacccagaacttgcgtaaccagatcaggagtaaacaggttactgtgatgctgttgagcattgcaatcatctcggcactcctgtggctccccgagtgggtggcatggctgtgggtatggcaccttaaggcagccggcccagctccccctcaaggatttattgccctgagtcaggttctgatgttctccatctcctctgcgaatcctttgatctttctagttatgtccgaagagtttcgtgaagggctaaaaggggtgtggaaatggatgattacaaagaaacccccaaccgtgagcgagagccaagagaccccggctggtaatagcgagggactacctgataaagtcccatctccggaatcaccagcctctatccccgaaaaagagaaaccatcgtccccttcaagcgggaagggaaagacagaaaaggcagaaataccaatcctccctgacgtcgaacaattttggcacgagcgcgacaccgtaccaagcgtgcaagataacgatcccattccttgggagcacgaagaccaagagaccggggagggtgtgaagtag

SEQ ID NO: 258272 - DNA, 1260 bp, Artificial Sequence
  derived and/or modified sequence
atgctggccgccgcctttgctgacagcaacagcagctccatgaatgtgtcctttgcccacctgcactttgctgggggctacctgcccagcgacagccaggactggaggaccatcatcccagccctgctggtggccgtgtgcctggtgggctttgtgggcaacctgtgtgtgattggcatcctgctgcacaatgcctggaagggcaagcccagcatgatccacagcctcatcctgaacctgagcctggccgacctgagcctgctgctcttcagcgcccccatccgggccacagcctacagcaagtctgtgtgggacctgggctggtttgtgtgcaagagcagtgactggttcatccacacctgcatggccgccaagagcctgaccatcgtggtggtggccaaggtgtgcttcatgtatgccagtgaccctgccaagcaggtgtccatccacaactacaccatctggagcgtgctggtggccatctggacagtggccagcctgctgcccctgcctgagtggttcttcagcaccatccgccaccatgaaggagtggagatgtgcctggtggatgtgcctgctgtggccgaggagttcatgtccatgtttgggaagctgtaccccctgctggccttcggcctgcccctcttctttgccagcttctacttctggagggcctatgaccagtgcaagaagaggggcaccaagacccagaacctgaggaaccagatccgcagcaagcaggtgacagtgatgctgctgagcatcgccatcatcagcgccctgctgtggctgcctgagtgggtggcctggctgtgggtgtggcacctgaaggctgctggccctgccccaccccagggcttcatcgccctgagccaggtgctgatgttcagcatcagcagcgccaaccccctcatcttcctggtgatgtctgaggagttccgggagggcctgaagggcgtgtggaagtggatgatcaccaagaagcccccaacagtgtctgagagccaggagaccccagctggcaacagcgagggcctgcctgacaaggtgcccagccctgagagccctgccagcatccctgagaaggagaagcccagcagccccagcagcggcaagggcaagacagagaaggccgagatccccatcctgcctgatgtggagcagttctggcatgagcgggacacagtgcccagcgtgcaggacaatgaccccatcccctgggagcacgaggaccaggagaccggggagggcgtgaagtag

SEQ ID NO: 258273 - DNA, 1260 bp, Artificial Sequence
  derived and/or modified sequence
atgctggccgccgccttcgccgacagcaacagcagcagcatgaacgttagctttgcacatctgcacttcgctggaggctacctgccatcagatagccaggattggcggacaattataccagcactgttagttgccgtttgcctggtcggctttgtaggcaacctttgcgtgatcggtatcttattgcacaatgcttggaaggggaagcctagtatgattcatagtctgatactgaatctctccttggccgatctcagccttctcctgttttccgcgcctatccgtgccaccgcctactccaaaagcgtatgggacctagggtggttcgtctgcaagagcagtgattggttcatccatacttgtatggccgccaaatcacttaccatagtggtagtggccaaggtctgcttcatgtacgccagcgatcctgccaagcaagtgtctatacacaattatacaatttggtcagtcttggtggccatctggaccgtcgcgagcctgctcccactgcctgaatggttttttagtacgattcggcaccatgaaggggttgagatgtgccttgtggacgtcccagcagtggcagaggagtttatgagtatgtttggcaagctatatccccttctggctttcggtctccccttattctttgccagcttctacttctggcgcgcgtacgaccagtgtaagaaaaggggaactaaaactcagaatctgcgcaaccagatccgttctaagcaggtgacagtcatgctcttatcaatcgccattatttccgctttactgtggctcccagaatgggtggcatggctctgggtttggcaccttaaggccgcaggacccgctccccctcaggggttcatcgctctgagccaggtgctcatgttttccatttcaagcgctaatcctcttatcttccttgtcatgagtgaagagttcagagaaggtctaaaaggcgtatggaaatggatgataaccaagaaaccccctacggtgtccgaaagccaggagacacctgccggtaacagtgagggcctccctgacaaagtaccatcaccggaaagccccgcaagtattcccgagaaggaaaagccgagctctccttccagtggaaagggtaaaaccgagaaggctgagatccctatactcccagatgtggaacaattttggcacgagcgcgacaccgtcccatcagtccaggataatgacccaataccttgggagcatgaagatcaagagacaggcgagggcgtgaagtag

SEQ ID NO: 258274 - DNA, 1260 bp, Artificial Sequence
  derived and/or modified sequence
atgctggcagctgcattcgctgatagtaattcttcttcgatgaatgtgagtttcgctcatctccactttgcgggtggttatctgccttctgattcccaggattggcggaccattatccctgcactgctggtcgcagtatgcctggtcggatttgtcgggaacctgtgcgtgataggaatcctgttgcacaacgcgtggaagggtaaaccttctatgatccactctcttatccttaacctaagtctggcagacctgagcctgctcctgtttagcgcgcctatcagggcaaccgcctactcaaaaagtgtgtgggacctcgggtggttcgtttgcaagtcctctgattggtttatccatacgtgtatggccgcaaagagtctgacaatcgtggtggtggctaaggtgtgtttcatgtacgctagtgatccagcgaagcaggtgtctattcacaactacacgatttggtctgtgttggtagccatttggacagttgccagcctgctgcccctgcccgagtggttcttctctacgattcgacaccacgagggcgtggagatgtgtctggtggacgttcccgctgtggctgaggagtttatgagtatgttcgggaaactttatcctctgctggcgttcgggctgcctctgttcttcgccagcttctatttctggcgtgcatacgatcagtgcaagaagcgcggaactaagacgcaaaatctgagaaaccaaattcggtcgaaacaggtcacggtaatgctcctcagcattgccatcatctccgcactcctgtggttgccagagtgggttgcctggctgtgggtgtggcatttgaaagccgctggccctgccccaccccagggatttatcgccctgagccaggttctgatgttctctatcagctcagccaacccactgatctttctggtgatgagtgaagagttccgcgaaggattaaaaggggtttggaagtggatgattaccaaaaaacctcctaccgtgagtgagtcccaggagacaccggcaggaaattccgagggtctgccagacaaagtccccagtcccgagtcaccagcttcaatcccggaaaaagaaaaaccatcctcgccaagctctggcaaaggaaaaacagaaaaggctgaaatccccatcctgcccgatgtggaacagttctggcacgagcgggacacagtgcccagcgttcaagataacgatcctatcccgtgggagcacgaagatcaggaaactggggagggagttaagtag

SEQ ID NO: 258275 - protein, 538 aa, Artificial Sequence
  derived and/or modified sequence
MAAAASVTGRVTWAASPMRSLGLGRRLSLPGPRLDAVTAAVNPSLSDHGNGLGRGTRGSGCSGGSLVADWGGGAAAAAAVALALAPALSTMRRGSSESELAARWEAEAVAAAKAAAKAEAEATAETVAEQVRVDAGAAGEPECKAGEEQPKVLAPAPAQPSAAEEGNTQVLQRPPPTLPPSKPKPVQGLCPHGKPRDKGRSCKRSSGHGSGENGSQRPVTVDSSKARTSLDALKISIRQLKWKEFPFGRRLPCDIYWHGVSFHDNDIFSGQVNKFPGMTEMVRKITLSRAVRTMQNLFPEEYNFYPRSWILPDEFQLFVAQVQMVKDDDPSWKPTFIVKPDGGCQGDGIYLIKDPSDIRLAGTLQSRPAVVQEYICKPLLIDKLKFDIRLYVLLKSLDPLEIYIAKDGLSRFCTEPYQEPTPKNLHRIFMHLTNYSLNIHSGNFIHSDSASTGSKRTFSSILCRLSSKGVDIKKVWSDIISVVIKTVIALTPELKVFYQSDIPTGRPGPTCFQVTIASSQPAFPALTGLKRALWLRVG

SEQ ID NO: 258276 - DNA, 1617 bp, Artificial Sequence
  derived and/or modified sequence
atggccgccgccgccagcgtgaccggcagagtgacctgggccgccagccccatgagaagcctgggcctgggcagaagactgagcctgcccggccccagactggacgccgtgaccgccgccgtgaaccccagcctgagcgaccacggcaacggcctgggcagaggcaccagaggcagcggctgcagcggcggcagcctggtggccgactggggcggcggcgccgccgccgccgccgccgtggccctggccctggcccccgccctgagcaccatgagaagaggcagcagcgagagcgagctggccgccagatgggaggccgaggccgtggccgccgccaaggccgccgccaaggccgaggccgaggccaccgccgagaccgtggccgagcaggtgagagtggacgccggcgccgccggcgagcccgagtgcaaggccggcgaggagcagcccaaggtgctggcccccgcccccgcccagcccagcgccgccgaggagggcaacacccaggtgctgcagagacccccccccaccctgccccccagcaagcccaagcccgtgcagggcctgtgcccccacggcaagcccagagacaagggcagaagctgcaagagaagcagcggccacggcagcggcgagaacggcagccagagacccgtgaccgtggacagcagcaaggccagaaccagcctggacgccctgaagatcagcatcagacagctgaagtggaaggagttccccttcggcagaagactgccctgcgacatctactggcacggcgtgagcttccacgacaacgacatcttcagcggccaggtgaacaagttccccggcatgaccgagatggtgagaaagatcaccctgagcagagccgtgagaaccatgcagaacctgttccccgaggagtacaacttctaccccagaagctggatcctgcccgacgagttccagctgttcgtggcccaggtgcagatggtgaaggacgacgaccccagctggaagcccaccttcatcgtgaagcccgacggcggctgccagggcgacggcatctacctgatcaaggaccccagcgacatcagactggccggcaccctgcagagcagacccgccgtggtgcaggagtacatctgcaagcccctgctgatcgacaagctgaagttcgacatcagactgtacgtgctgctgaagagcctggaccccctggagatctacatcgccaaggacggcctgagcagattctgcaccgagccctaccaggagcccacccccaagaacctgcacagaatcttcatgcacctgaccaactacagcctgaacatccacagcggcaacttcatccacagcgacagcgccagcaccggcagcaagagaaccttcagcagcatcctgtgcagactgagcagcaagggcgtggacatcaagaaggtgtggagcgacatcatcagcgtggtgatcaagaccgtgatcgccctgacccccgagctgaaggtgttctaccagagcgacatccccaccggcagacccggccccacctgcttccaggtgaccatcgccagcagccagcccgccttccccgccctgaccggcctgaagagagccctgtggctgagagtgggctag

SEQ ID NO: 258277 - DNA, 1617 bp, Artificial Sequence
  derived and/or modified sequence
atggcagccgccgcatcagttacaggtcgcgtgacttgggccgctagccccatgagaagcctgggactggggcgtcgactctccttgcctggacccaggctcgacgcggtgactgcggctgtcaatcccagcctctctgaccacggcaacgggctgggccgtggtactcgtgggagtggttgctctggcggctccctggttgcagactggggagggggcgcagctgccgcagccgctgtagccctggcccttgctccagccctgagcactatgagacgtgggagctctgaatcagagcttgcggcacgctgggaggctgaggctgtcgccgccgccaaggcagcagccaaggcagaagccgaagctacagctgaaaccgttgctgagcaggtgagggtcgacgcaggtgctgccggagagccagaatgcaaagccggggaggagcagcctaaagttcttgccccagcaccggcacagccctcggccgcagaagaaggtaacactcaggttctccagcgcccgcccccaaccctgccaccttcaaagccaaaacccgtgcagggactatgcccgcatggcaaaccaagagataaaggtcgtagctgtaagagatctagcggtcacggcagtggggagaatggatcacaaagaccagttaccgtggattctagcaaggctaggacatctctagatgcactcaagatcagtatcaggcaattaaaatggaaagagtttccgttcggcaggagactcccatgcgacatctattggcacggcgtttccttccatgacaatgatatcttttccggtcaggtgaacaaattccctggaatgaccgagatggttaggaagatcacactgagtcgtgccgtcagaaccatgcagaacctgtttcctgaggaatataatttctacccacgcagctggatcctgccagatgagtttcaactattcgtcgcccaggtgcaaatggtgaaggacgatgatcccagctggaagcccacattcatcgtaaagcctgacggcggctgtcagggagacggaatctatttgatcaaggacccttcagatatcagacttgcagggaccttgcaatctcgtccagccgtggttcaagaatatatttgcaaacctttgttgatagacaagctaaagtttgacattcgattgtatgtcctgcttaagtctctggaccctctcgaaatctacatcgccaaagatggattgtctagattttgtactgaaccgtaccaagagcctacacccaaaaacctgcatcgcatctttatgcatctgactaattacagtctcaacatacacagcggaaactttatacatagcgattccgctagtaccggatcaaagcgcactttcagcagtattctgtgtcgtttgtcgtcgaagggagtggacattaaaaaggtgtggtctgatataatttccgtggtgatcaaaacagtgattgccttgacaccagaactgaaggtcttttaccaaagcgacatcccaaccgggcgacccggccccacatgttttcaagtaactatcgcttcatcccagcccgcgtttcccgctctcacaggattaaaacgcgccctctggctgcgagtgggctag

SEQ ID NO: 258278 - DNA, 2012 bp, Artificial Sequence
  derived and/or modified sequence
cgagtgttggcggggactgagcctcctgcttgaggtagttgtttttactcccagtccccaggctcacgagccccacgcgcgctcaatctgccctcccgcttctcctcgccactccgagttctgcgccctcgagatccagcgcatccgcggggtgggcgggtcctggcggctctttgccctcttccaacatggccgccgctgcctctgtgacaggcagggtcacgtgggcagcctcgcctatgaggtcgctggggctcggccggcgattgtcccttcccggaccccgtctcgatgcggtgactgccgctgtcaacccgagcctgagcgatcatggcaacgggctcgggcggggaacgcgtggcagcggctgcagcggcggcagtttggtggcggactggggcggcggagcggcggcggcggcggcggtggcactggcactggccccggccctgagcaccatgcggcggggcagctccgagagcgagctggcggcccggtgggaggcggaggcggtggctgcggccaaagcggcggccaaagctgaggccgaggccacagcggagacggtggcggaacaggtccgcgtggacgcgggcgcggccggggaaccggagtgcaaggcaggggaggagcagcccaaggtcctggccccggccccggcgcagcccagtgcggctgaggaggggaacacccaggtccttcagcggccgccgcccacgctgcccccgtccaagccgaagccggtgcagggcctctgcccgcacgggaagccccgggacaagggccgaagctgcaagcggagctcgggccacggttccggcgagaacggctcccagcggccggtcaccgtggacagctccaaggccaggacctccctggatgccctgaagatcagcatccgccagctcaagtggaaggagttcccatttggccggcgcttgccttgtgacatctactggcatggagtttcatttcacgacaatgacatattctccggtcaagtgaacaagtttccaggcatgacggagatggtgcgtaaaattactctgagcagagcagtgagaaccatgcagaatctctttcctgaggagtacaacttctaccctcgctcatggattctgcctgacgagttccagctctttgttgctcaggttcaaatggtgaaagacgatgacccctcctggaagcccacttttatcgtgaaacctgatggtggttgtcagggtgatggaatctacctcattaaagaccccagtgacatccgcctggcagggaccctccagagcaggccagcggtggtccaggagtacatctgcaaacctctccttatcgacaagctcaagtttgatattcgtctgtatgtcttactcaagtccttagaccccttagagatttatatagccaaagacggactctctaggttttgtaccgagccatatcaggagcccacccccaaaaacctgcaccgcatctttatgcacttaaccaactattcactgaacatccacagcggcaacttcatccactcggacagtgctagcactggcagcaaaaggactttttccagcatcctttgtagactgtcttccaaaggcgttgacatcaagaaggtctggtctgacatcatctccgtggtgattaagacggtcatcgcgctgactccagagctcaaagtcttctaccagtcagacatccccacggggaggccgggccccacgtgcttccaggtaaccattgccagttcccagcctgcgtttccagccttgaccggcctcaagagggctctctggcttcgtgtaggatgagtgatcggggtgggatggccagaggaggggacagtgttggtggtgctgtgggcttgggtgttaaacctgggcccaacttccaagctttctgtttgctccctgtgtgatttggggcaagctacttcccctctgttacctgtaaaatgaaatgaagaatacctatcttaaaaggttcttgtaagaattaaatgagataacacatgtaaa

SEQ ID NO: 258279 - DNA, 1617 bp, Artificial Sequence
  derived and/or modified sequence
atggctgctgctgcctctgtgacaggccgggtgacctgggccgccagccccatgaggagcctgggcctgggccgccgcctgagcctgcccggcccccggctggatgctgtgacagctgctgtgaaccccagcctgagtgaccacggcaatggcctgggccggggcacccggggcagcggctgcagcggcggcagcctggtggccgactggggcggcggcgctgctgctgctgctgctgtggccctggccctggccccagccctgagcaccatgaggcggggcagcagcgagagcgagctggccgcccgctgggaggccgaggccgtggccgccgccaaggctgctgccaaggccgaggccgaggccacagctgagaccgtggccgagcaggtgcgggtggatgctggagctgctggggagcctgagtgcaaggccggggaggagcagcccaaggtgctggccccagccccagcccagcccagcgctgctgaggagggcaacacccaggtgctgcagaggcccccacccaccctgccccccagcaagcccaagcctgtgcagggcctgtgcccccacggcaagccccgggacaagggccgcagctgcaagaggagcagcggccacggcagcggggagaatggcagccagaggcctgtgacagtggacagcagcaaggcccggaccagcctggatgccctgaagatcagcatccggcagctgaagtggaaggagttcccctttggaagaaggctgccctgtgacatctactggcacggcgtgtccttccatgacaatgacatcttcagcggccaggtgaacaagtttcctggcatgacagagatggtgaggaagatcaccctgagcagagctgtgaggaccatgcagaacctcttccctgaggagtacaacttctaccccaggtcctggatcctgcctgatgagttccagctgtttgtggcccaggtgcagatggtgaaggatgatgaccccagctggaagcccaccttcatcgtgaagccagatggcggctgccagggagatggcatctacctgatcaaggaccccagcgacatccggctggccggcaccctgcagagcaggcctgctgtggtgcaggagtacatctgcaagcccctgctgattgacaagctgaagtttgacatccggctgtatgtgctgctgaagagcctggaccccctggagatctacatcgccaaggatggcctgagccgcttctgcacagagccctaccaggagcccacccccaagaacctgcaccgcatcttcatgcacctgaccaactacagcctgaacatccacagcggcaacttcatccacagcgacagcgccagcacaggcagcaagaggaccttcagcagcatcctgtgccgcctgagcagcaagggcgtggacatcaagaaggtgtggagcgacatcatctctgtggtgatcaagacagtcatcgccctgaccccagagctgaaggtgttctaccagagcgacatccccaccggccggcccggccccacctgcttccaggtgaccatcgccagcagccagcctgccttccctgccctgaccggcctgaagagggccctgtggctgcgggtgggctag

SEQ ID NO: 258280 - DNA, 1617 bp, Artificial Sequence
  derived and/or modified sequence
atggccgccgccgccagcgtgaccggccgggtgacctgggccgcctcaccgatgcgtagcctcggtttagggaggaggctgtcacttccaggaccaaggttggacgccgtcactgctgccgtaaatcccagtttgagtgatcatggcaatggactgggaagggggacgcgtggcagcggatgctctggtggcagtctcgtagcagattggggtggtggggctgccgccgctgcagcagtggcactcgctctggccccagccctgagtactatgcggcgaggtagctccgagtcagagctagctgctaggtgggaggcggaagcagtggccgctgctaaggctgccgcgaaggccgaggctgaagccactgctgaaacagtcgccgaacaggttcgggtggacgctggcgccgctggagaaccggagtgtaaagccggggaggaacaacccaaagttctcgcacccgcgcctgcccagccatccgccgccgaagagggcaacactcaggtgctgcaacgccctccgccgacgctgccacccagtaagcccaaacccgtgcaaggactgtgtccccacgggaagccacgcgacaaaggaaggtcatgtaagcgaagcagcggccacggcagtggtgaaaatgggtctcagcgtccggtaaccgtggactcttcaaaggcacggactagcctggacgctcttaaaatcagtataaggcagctgaagtggaaggagtttcctttcgggcggcgacttccttgcgatatttactggcacggagtgagtttccacgacaacgacatcttttcaggtcaggtgaacaagtttcccgggatgacagagatggtgagaaaaattaccctctctagagccgtgaggacgatgcagaacctttttcccgaagaatataacttttacccccgctcttggattctgcccgacgaattccaactgttcgtggcacaggttcagatggtgaaggacgacgatccctcttggaagcctaccttcatcgttaagcctgatggaggttgccagggggatggaatctacctcataaaggatcccagcgatatcagattggccggcaccctccagtcccgtccagctgtcgtgcaggagtatatatgcaagcctctcctgattgacaaactcaagtttgacattagactttatgtcctgctaaagagcctagacccgctcgaaatctacatcgccaaagatggtttgtctcggttttgtaccgaaccctatcaggaaccgacacctaaaaatctgcacagaatattcatgcacctcaccaactacagcctaaacattcatagcggcaactttattcacagcgactctgcatcaaccggcagcaagaggaccttttcatccatcctctgcaggctaagctctaaaggggtcgacatcaagaaggtgtggtctgacatcatttccgtcgtgattaagacagtgatcgctcttactcccgagctcaaggtgttctatcaatcagatattccgacaggcaggcccgggccaacatgtttccaggtgactattgcctcttcacaacctgcctttccagctctaacgggactgaaaagagctctgtggctgcgtgttgggtag

SEQ ID NO: 258281 - DNA, 1617 bp, Artificial Sequence
  derived and/or modified sequence
atggccgctgctgcctcagtcacaggacgtgtcacctgggctgcttcaccgatgcgtagtttaggccttggccgtcgcctgagtctgcctggaccccgactggacgcggtgactgcagccgtaaacccatctctgtcggatcacggaaacggcctaggccgaggcaccaggggctctggttgctctgggggatctctggttgctgactgggggggtggcgcagccgcagctgccgctgtggccctggctctggcgccagccctgtcaactatgagacgtgggtcttccgagagcgagctcgcagcaagatgggaggctgaagctgtcgccgctgctaaagcagcggctaaggccgaagcagaggctaccgccgagactgtagcagagcaggtgagagtggatgcaggagctgcgggagagccagagtgcaaagccggagaagaacagccgaaggtactggcccctgctcccgcacaacccagtgcagccgaagaggggaatactcaggtcctgcagaggccgccaccaacactcccgccaagcaagccaaaacctgttcaggggctctgcccccatggcaagcccagagataaggggcgtagctgtaagcgttccagcggccatgggtccggcgagaatggatcccaaaggccggtgaccgtggactcgagcaaggctcggacgtcgctcgatgccttaaagatctcaataaggcaactcaaatggaaggaattccccttcggcaggcggctgccctgtgatatctattggcacggggtctcatttcacgacaacgacatcttctctggacaggtaaataaatttcccggaatgaccgagatggtcaggaagatcaccctctcccgggcagtgcgaaccatgcagaacctgtttccagaggaatacaacttttatcccagatcatggattctccctgatgagttccagttgtttgttgcccaggtgcagatggttaaggatgacgaccccagctggaagcccaccttcatcgtaaagcctgacggcggatgccagggtgacggcatctatctcattaaagacccgagtgatattcgccttgccggtacgctacagtcccggccagcagtggttcaagaatacatctgtaaaccgctgttgattgacaaacttaagttcgatatccgcctatatgtcctgttgaaatcactggatccactcgagatctacattgccaaagacgggctttccaggttttgcacagaaccgtaccaggagcctacacctaaaaacctccaccgcatattcatgcacctgacaaattatagtcttaacattcacagcggtaactttattcactcagacagtgcctctacggggtctaaaagaacattttcatccattctgtgtcgactatcgtccaaaggcgtcgacatcaagaaagtctggtcagacattatctcagttgtaattaagactgtaatcgctctgactccggaactgaaggtgttctatcagtccgacatcccaacaggacgcccaggaccaacttgctttcaggtaactattgcgtcatctcagccagcattccctgctctgacaggactcaaacgtgcattgtggctgcgggtgggatag

SEQ ID NO: 258282 - protein, 373 aa, Artificial Sequence
  derived and/or modified sequence
MRKAGATSMWASCCGLLNEVMGTGAVRGQQSAFAGATGPFRFTPNPEFSTYPPAATEGPNIVCKACGLSFSVFRKKHVCCDCKKDFCSVCSVLQENLRRCSTCHLLQETAFQRPQLMRLKVKDLRQYLILRNIPIDTCREKEDLVDLVLCHHGLGSEDDMDTSSLNSSRSQTSSFFTRSFFSNYTAPSATMSSFQGELMDGDQTSRSGVPAQVQSEITSANTEDDDDDDDEDDDDEEENAEDRNPGLSKERVRASLSDLSSLDDVEGMSVRQLKEILARNFVNYSGCCEKWELVEKVNRLYKENEENQKSYGERLQLQDEEDDSLCRICMDAVIDCVLLECGHMVTCTKCGKRMSECPICRQYVVRAVHVFKS

SEQ ID NO: 258283 - DNA, 1122 bp, Artificial Sequence
  derived and/or modified sequence
atgcggaaggcgggcgcgacctcaatgtgggctagctgctgcggcttgctgaacgaagtgatgggaactggcgccgtcagaggccagcagtctgctttcgccggcgccacaggaccattccgatttacccccaacccggagttttctacatacccacccgccgcaaccgagggccctaacatcgtgtgtaaggcctgtgggttaagcttctcagtgttccggaagaaacatgtctgttgtgactgcaagaaagatttctgcagtgtctgctcagtgcttcaggagaacttaagacgctgctcgacttgccaccttctccaagaaaccgcattccagcggccacagcttatgcgtctgaaggtgaaggatctacggcagtatctgatactgcggaatattcctatcgatacttgtcgggaaaaggaagaccttgtggatttggtgctgtgccatcacggattgggatcggaggacgacatggatacatcgtcactaaacagctctagatctcaaacatcctcatttttcactcggagcttcttcagtaactatactgctccatccgccactatgagcagtttccagggtgagctgatggacggagaccaaacatctcggtcaggagttccagctcaggttcagtccgagatcacgtccgctaacacagaagatgacgacgacgacgacgacgaagacgatgatgacgaggaagagaacgctgaggacagaaatccggggttatcaaaggaacgcgtccgggccagcctgtccgacctttccagcctcgatgacgtagagggcatgagtgtgaggcagctcaaagaaatactggctaggaacttcgtgaattatagcggatgctgtgaaaagtgggagcttgtagagaaagtgaacagactgtataaggagaatgaggaaaaccagaagtcttacggggaaaggctgcagttgcaggacgaggaggatgactccctttgtcgaatctgtatggatgcagtaattgattgcgtgctgttggagtgcgggcacatggtgacctgcactaagtgtggcaagaggatgtccgagtgccccatatgcaggcagtacgttgtccgggccgtacatgtcttcaagtcttag

SEQ ID NO: 258284 - DNA, 1122 bp, Artificial Sequence
  derived and/or modified sequence
atgcgcaaggctggcgcgacatcaatgtgggcttcctgttgtgggcttctcaatgaggtcatgggcacaggtgcagtcaggggccaacaatctgcattcgcgggagccacaggccccttccgcttcacccccaatcccgagttctcaacttacccgcctgcagctaccgagggccccaacatcgtctgcaaggcgtgcggattatcattcagtgtgttcaggaagaagcacgtatgttgcgattgtaaaaaggatttctgctcagtgtgcagtgttctccaggaaaacctgcgtaggtgctccacctgccatttgctgcaagagaccgcgttccaaagaccacagctgatgaggctgaaggttaaggacctcagacagtatcttatactcagaaacattcctatcgacacttgccgcgagaaggaggacctagtggacctcgtgttatgccaccatggcctcggttccgaagacgatatggacaccagttccctcaatagtagccgatcccagacaagttcattcttcacgaggagctttttctctaactacaccgcccccagcgctacaatgagtagttttcaaggcgaactgatggatggcgaccaaactagccggtcaggggtgcctgcccaggtgcagtccgaaatcacatcggctaacaccgaggatgacgacgatgatgatgatgaagacgacgatgatgaagaggagaacgcagaggaccgaaatcctgggttgtccaaggaaagggttcgcgctagcctgagcgacctctcctccttggatgacgtggagggaatgagcgtgcggcagttgaaagagatacttgcccggaatttcgttaactactcaggctgttgtgagaagtgggaattggtggagaaagtgaataggctgtacaaagaaaatgaggagaatcagaagtcctacggggagcgcttgcagctgcaagacgaggaagacgactccctctgtcgcatctgcatggatgcagttatcgattgcgttctgctcgagtgcggccacatggttacatgcacgaagtgtggtaaacgaatgtccgaatgtcctatctgtaggcagtatgtagtcagggcagttcacgtctttaagagctag

SEQ ID NO: 258285 - DNA, 1122 bp, Artificial Sequence
  derived and/or modified sequence
atgaggaaggccggggccacctccatgtgggccagctgctgcggcctgctgaatgaggtgatgggcactggagctgtgcggggccagcagagcgcctttgctggggccaccggccccttccgcttcacccccaaccctgagttcagcacctaccccccagctgccacagagggccccaacatcgtgtgcaaggcctgtggcctgtccttctctgtgttcaggaagaagcacgtgtgctgtgactgcaagaaggacttctgcagcgtgtgcagcgtgctgcaggagaacctgcggcgctgcagcacctgccacctgctgcaggagacagccttccagaggccccagctgatgaggctgaaggtgaaggacctgcggcagtacctgatcctgaggaacatccccatcgacacctgccgggagaaggaggacctggtggacctggtgctgtgccaccacggcctgggctctgaagatgacatggacaccagcagcctgaacagcagccgcagccagaccagcagcttcttcaccaggagcttcttcagcaactacacagcccccagcgccaccatgagcagcttccagggcgagctgatggatggagaccagaccagccgctctggagtgcctgcccaggtgcagagcgagatcaccagcgccaacacagaagatgatgatgatgatgatgatgaagatgatgatgatgaggaggagaatgcagaagatagaaatcctggcctgagcaaggagcgggtgcgggccagcctgagtgacctgagcagcctggatgatgtggagggcatgtctgtgcggcagctgaaggagatcctggccaggaactttgtgaactacagcggctgctgtgagaagtgggagctggtggagaaggtgaaccggctgtacaaggaaaatgaggagaaccagaagagctatggagagcggctgcagctgcaggatgaagaagatgacagcctgtgccgcatctgcatggatgctgtgattgactgtgtgctgctggagtgtggccacatggtgacctgcaccaagtgtgggaagaggatgtctgagtgccccatctgccggcagtatgtggtgcgggctgtgcacgtgttcaagagctag

SEQ ID NO: 258286 - DNA, 1122 bp, Artificial Sequence
  derived and/or modified sequence
atgcggaaggccggcgccaccagcatgtgggccagctgctgcggcctattgaatgaggtgatgggcaccggcgctgtgcgagggcagcagtctgctttcgctggggcgaccggtccattccgatttactcctaatccagaattttccacttacccacctgctgccacagaagggcctaacatcgtatgtaaggcttgcggtctttcatttagcgtttttaggaagaaacatgtatgctgtgattgcaaaaaggacttctgctcagtctgttctgtcttgcaggaaaatctgagacgctgttccacctgccatctcttacaggagaccgcatttcaaaggccacagctcatgcggcttaaggttaaggacctcagacagtaccttattctgcgcaacattccaattgacacgtgtagagagaaggaggacctcgtggatctcgtcctctgccaccatggcctaggctccgaggacgacatggacacatccagcctcaactcatctaggagtcagacttcaagcttctttacgcgctcattcttcagtaattacactgccccttctgccacaatgagcagtttccaaggcgagctgatggatggtgatcagacgtcacgctctggggtgccagcccaggttcagagcgaaatcacctctgccaacacagaagacgacgacgacgatgatgatgaggatgatgacgatgaggaggagaatgccgaggatagaaatccaggcctgagcaaagaacgtgtgcgtgcgagtctctccgatttgtcgtcccttgacgacgtggaaggcatgtccgttcgccagctgaaggaaatcctggcccgaaacttcgtcaactatagcggttgttgtgagaagtgggaattggtcgagaaagtgaaccgtttatataaagaaaatgaagaaaatcagaaaagctacggagagaggctgcagctgcaggatgaggaggatgattctctctgccgtatctgtatggacgccgtcatcgactgcgtgttactggaatgcggccacatggtaacttgcacaaagtgtgggaagcgaatgagtgagtgtccaatatgccggcagtacgtggttcgtgcggttcacgtgtttaagtcctag

SEQ ID NO: 258287 - DNA, 1122 bp, Artificial Sequence
  derived and/or modified sequence
atgcggaaggccggcgccaccagcatgtgggccagctgctgcggcttgctaaacgaggtgatggggactggggcagtgagaggtcagcagtcagcatttgcgggggcaactgggccgttccgcttcacgcctaaccctgaattcagcacctaccccccggccgcaactgaaggtcctaacatcgtctgtaaagcttgcggtctctcattcagcgtctttaggaaaaaacacgtttgttgcgactgcaaaaaagatttctgctctgtgtgcagcgtcctgcaggagaacctgcgacgatgtagcacttgtcacctgctccaggaaacagcatttcaacgcccccagttaatgcggcttaaggtgaaagacctcagacagtatcttatcctgagaaatatcccaattgacacctgcagggagaaggaggatctggtggatctggtcctttgccatcacggattggggtccgaagacgatatggatacatccagtctgaactcttcccgtagtcagacctccagcttcttcacaagatcttttttttcaaactatactgccccttcagcaactatgtcctcgttccagggagagctgatggatggagatcagacctccaggtccggtgtgccagcacaggtccagtctgagatcactagcgcaaatacagaggatgatgatgacgacgacgatgaggacgacgatgacgaggaggagaatgctgaagaccgcaacccaggtttatccaaagagagggtcagagccagtttgtctgacctgagctcactcgatgatgtggaagggatgtccgtacggcaactgaaggagatcctggcccgcaatttcgtaaactactctgggtgttgcgaaaaatgggaactggtggagaaagtgaacagactgtacaaagaaaacgaggaaaaccaaaagtcctatggggaacgactccagttacaggacgaggaggatgactcactgtgtcgcatatgtatggatgctgtcatcgactgcgtcctactcgaatgcgggcacatggtcacttgcacgaagtgcggtaaaagaatgtcggagtgcccaatttgcagacaatatgtggtgcgagccgtccacgtctttaaatcatag

SEQ ID NO: 258288 - DNA, 1122 bp, Artificial Sequence
  derived and/or modified sequence
atgcgcaaggcaggggcaacatcaatgtgggccagttgttgcgggcttttaaatgaagtcatgggcacgggcgctgtgcgcggacaacagagtgcctttgcaggagctacagggccttttagattcacacctaatcctgagtttagcacatatccacccgcagctaccgaaggaccgaacatcgtatgtaaagcatgtgggttgagcttctcggtcttccgtaaaaagcacgtctgctgcgactgcaagaaagacttctgtagtgtgtgttcagtgttgcaggaaaacctgaggaggtgtagtacctgtcatcttcttcaagagacggcctttcagcgaccacaactgatgcggttgaaagtaaaggatctgaggcagtaccttattctgaggaacattcctatcgatacttgtcgggagaaggaagacctcgttgatctcgtgctgtgtcatcacggcctaggatcagaggacgatatggacacttcatctctcaatagcagtaggtctcaaacatcaagcttctttactagatccttcttcagtaactatacggcgcctagtgcaaccatgtcgagctttcagggggaacttatggatggcgatcaaacttctcggtccggagtaccagctcaggttcagtctgaaattaccagtgcaaatacggaggatgacgacgacgacgacgacgaggacgatgatgatgaggaggaaaacgcagaggatcgaaatcccggtctgtccaaggagagggtccgagcgtccttgtctgacctcagttcactggacgacgtagagggcatgtccgtcaggcagcttaaggaaatcctcgcccgtaactttgtgaactactccggttgttgtgagaagtgggagctagtcgagaaggtgaacagactgtataaggaaaacgaagaaaaccaaaaatcatatggcgaacggttacagctccaggatgaggaagatgacagtctctgtaggatttgtatggacgctgtgatcgattgtgtattgctcgagtgtggccatatggtaacctgcaccaagtgcggcaagagaatgtcagagtgcccaatctgcaggcagtatgtggtgcgtgcggtccatgtattcaaaagctag

SEQ ID NO: 258289 - DNA, 1122 bp, Artificial Sequence
  derived and/or modified sequence
atgaggaaggccggtgccacatccatgtgggccagctgctgtgggctgctcaacgaggtcatgggcacaggagcagtgaggggtcagcagtccgccttcgccggtgccacgggccctttccggtttacaccaaaccctgagttttctacataccccccagcggcaacagaaggccctaacatcgtctgcaaggcctgcgggctctcctttagcgtctttcggaaaaagcatgtctgttgtgactgtaaaaaagacttttgttccgtgtgttcagtgctgcaggaaaacctgaggcgttgcagtacttgccacctcctgcaagaaacagcctttcaacgaccgcaactcatgcgcctgaaggtcaaagacttaagacagtacttgatcctgcggaacattcccattgacacgtgcagggaaaaagaggatttagttgacttggttttgtgccatcatggattgggctctgaggacgacatggacacaagttcccttaactccagcagatcccagacatcatcctttttcacacgtagtttttttagcaattataccgcaccatctgcgaccatgtcatctttccaaggagaactcatggatggggaccagacatcccggtcaggtgtgccagcgcaagtccagtccgagattacttccgccaatacggaggacgatgatgatgatgacgacgaagatgatgacgacgaagaggagaatgccgaggacagaaacccgggattgagtaaagaaagagtgcgagcctcactgtctgacttatcttcactcgacgatgtcgaaggaatgtctgtcagacagctcaaagagatcctggctagaaatttcgtaaactatagtgggtgttgtgagaagtgggaacttgtggagaaagtgaacaggctgtacaaagagaatgaggagaaccagaagagctacggagagcggctccagttacaggacgaggaggatgattcactatgccgtatttgtatggacgccgtgatcgactgtgtgctgctggagtgcgggcacatggtgacttgtaccaagtgtggtaagcgtatgagtgaatgccccatctgtcgacaatacgtggtgagggctgtccacgtttttaagtcctag

SEQ ID NO: 258290 - DNA, 1898 bp, Artificial Sequence
  derived and/or modified sequence
atgcgaaaagcgggtgccacgtctatgtgggcttcgtgctgtgggctgctgaatgaagtcatgggaactggagctgtcaggggccagcagtcagcatttgcaggagccaccggtccattcagatttacaccaaaccctgagttttccacctacccaccagcagctacggaagggcccaacatagtttgtaaagcctgtgggctttcattttcagtctttagaaagaagcatgtttgctgtgactgcaagaaggatttttgctccgtttgttcagtcttacaagaaaatctccgtagatgttctacttgtcacttattacaagagacagcatttcagcgccctcagttaatgcgactgaaggtgaaggacctgcggcagtatctcattctgagaaatatacccatagatacttgtcgtgagaaagaagacttggtggatctagtactgtgccatcatggactaggctctgaggacgacatggacacaagcagtctgaattcttcaaggtcccagacttctagcttttttacacgttcgtttttttcaaactatacagccccctctgctactatgtcttcgtttcagggagagcttatggatggagaccaaacatccagatctggagtgccggcacaggtacaaagtgaaatcacttcagcaaacacagaagatgatgatgacgacgatgatgaggatgatgatgatgaagaagaaaacgcagaggatcggaaccccgggctctccaaggagagagtgagagcttcactgtctgacttgtcaagccttgatgatgtggaaggaatgagcgtgcgccagctgaaggaaattctggctcggaattttgtcaactattctggctgttgtgaaaaatgggaactggtagagaaagtaaaccggttatacaaagagaatgaagaaaaccaaaagtcctatggcgagcggctgcagctgcaggatgaggaagacgacagcctgtgtcgcatctgcatggatgccgtcatcgactgtgtcctactggagtgtgggcacatggttacctgcaccaagtgcggcaagcgcatgagtgagtgtcccatctgccggcagtatgtggtgcgagccgtgcacgtgttcaagtcctgaaacaggctcccctcaccaggacagtcacccccaaacttgacccccaacatttcaatgcacagaagggactggaaagttatgttcaaaggctgaagctattttaaaacattattttgactactaagtggggacagaaagatccatcctgagttgtggaaacattggtccatgccgtgagcctgtctgcctgtggacacgtgagcttcccgggctcagctgggctttatcacacatcccgtgaacactcattgaagtcagcctgtttgcgccatgtgggcatcagccactgctgtcttgggaggacacttatcctgttctcttatttccccttcatcctatttttaacttaaactgctcagatgtttgaaacttctgtcctctttggatgagatcagtgtccacaagtggccgacatggaacatgctgagcagtggctcctctgaatgttcactttattagtcatgtatattttaaatgctaacatttgatgaatgtaagtttccacattgttgctgtttctgcatttaaacataattgggaacaactgacattctctagtcgactgccagggccttagactccacatgtccatttttgttcaggtatagctttttatagcaagggctgcatctagcttcttttattagaagtgtgtgtgctaaattccttattaatgtgtaatcagtttacattgttttgtatagtgaaggtgtattttcagtgctacccgctagctgattttaactttaggaataaaattagttttaaaagctttt

SEQ ID NO: 258291 - DNA, 2051 bp, Artificial Sequence
  derived and/or modified sequence
atcaccgcccagagggaaggaggtcggcagtgtgaggagctgctatggtgctgagtttcctggtagagccggccgagctgaggcggtcgcggccatgaaggtgggggagtggtactaaggatcaagtatactgttaaaagaaaacaaaaacccaagcatgaggaaggcgggtgccacgtctatgtgggcttcgtgctgtgggctgctgaatgaagtcatgggaactggagctgtcaggggccagcagtcagcatttgcaggagccaccggtccattcagatttacaccaaaccctgagttttccacctacccaccagcagctacggaagggcccaacatagtttgtaaagcctgtgggctttcattttcagtctttagaaagaagcatgtttgctgtgactgcaagaaggatttttgctccgtttgttcagtcttacaagaaaatctccgtagatgttctacttgtcacttattacaagagacagcatttcagcgccctcagttaatgcgactgaaggtgaaggacctgcggcagtatctcattctgagaaatatacccatagatacttgtcgtgagaaagaagacttggtggatctagtactgtgccatcatggactaggctctgaggacgacatggacacaagcagtctgaattcttcaaggtcccagacttctagcttttttacacgttcgtttttttcaaactatacagccccctctgctactatgtcttcgtttcagggagagcttatggatggagaccaaacatccagatctggagtgccggcacaggtacaaagtgaaatcacttcagcaaacacagaagatgatgatgacgacgatgatgaggatgatgatgatgaagaagaaaacgcagaggatcggaaccccgggctctccaaggagagagtgagagcttcactgtctgacttgtcaagccttgatgatgtggaaggaatgagcgtgcgccagctgaaggaaattctggctcggaattttgtcaactattctggctgttgtgaaaaatgggaactggtagagaaagtaaaccggttatacaaagagaatgaagaaaaccaaaagtcctatggcgagcggctgcagctgcaggatgaggaagacgacagcctgtgtcgcatctgcatggatgccgtcatcgactgtgtcctactggagtgtgggcacatggttacctgcaccaagtgcggcaagcgcatgagtgagtgtcccatctgccggcagtatgtggtgcgagccgtgcacgtgttcaagtcctgaaacaggctcccctcaccaggacagtcacccccaaacttgacccccaacatttcaatgcacagaagggactggaaagttatgttcaaaggctgaagctattttaaaacattattttgactactaagtggggacagaaagatccatcctgagttgtggaaacattggtccatgccgtgagcctgtctgcctgtggacacgtgagcttcccgggctcagctgggctttatcacacatcccgtgaacactcattgaagtcagcctgtttgcgccatgtgggcatcagccactgctgtcttgggaggacacttatcctgttctcttatttccccttcatcctatttttaacttaaactgctcagatgtttgaaacttctgtcctctttggatgagatcagtgtccacaagtggccgacatggaacatgctgagcagtggctcctctgaatgttcactttattagtcatgtatattttaaatgctaacatttgatgaatgtaagtttccacattgttgctgtttctgcatttaaacataattgggaacaactgacattctctagtcgactgccagggccttagactccacatgtccatttttgttcaggtatagctttttatagcaagggctgcatctagcttcttttattagaagtgtgtgtgctaaattccttattaatgtgtaatcagtttacattgttttgtatagtgaaggtgtattttcagtgctacccgctagctgattttaactttaggaataaaattagttttaaaagc

SEQ ID NO: 258292 - DNA, 1122 bp, Artificial Sequence
  derived and/or modified sequence
atgagaaaggccggcgccaccagcatgtgggccagctgctgcggcctgctgaacgaggtgatgggcaccggcgccgtgagaggccagcagagcgccttcgccggcgccaccggccccttcagattcacccccaaccccgagttcagcacctacccccccgccgccaccgagggccccaacatcgtgtgcaaggcctgcggcctgagcttcagcgtgttcagaaagaagcacgtgtgctgcgactgcaagaaggacttctgcagcgtgtgcagcgtgctgcaggagaacctgagaagatgcagcacctgccacctgctgcaggagaccgccttccagagaccccagctgatgagactgaaggtgaaggacctgagacagtacctgatcctgagaaacatccccatcgacacctgcagagagaaggaggacctggtggacctggtgctgtgccaccacggcctgggcagcgaggacgacatggacaccagcagcctgaacagcagcagaagccagaccagcagcttcttcaccagaagcttcttcagcaactacaccgcccccagcgccaccatgagcagcttccagggcgagctgatggacggcgaccagaccagcagaagcggcgtgcccgcccaggtgcagagcgagatcaccagcgccaacaccgaggacgacgacgacgacgacgacgaggacgacgacgacgaggaggagaacgccgaggacagaaaccccggcctgagcaaggagagagtgagagccagcctgagcgacctgagcagcctggacgacgtggagggcatgagcgtgagacagctgaaggagatcctggccagaaacttcgtgaactacagcggctgctgcgagaagtgggagctggtggagaaggtgaacagactgtacaaggagaacgaggagaaccagaagagctacggcgagagactgcagctgcaggacgaggaggacgacagcctgtgcagaatctgcatggacgccgtgatcgactgcgtgctgctggagtgcggccacatggtgacctgcaccaagtgcggcaagagaatgagcgagtgccccatctgcagacagtacgtggtgagagccgtgcacgtgttcaagagctag

SEQ ID NO: 258293 - protein, 209 aa, Artificial Sequence
  derived and/or modified sequence
MSNLKPDGEHGGSTGTGSGAGSGGALEEEVRTLFVSGLPVDIKPRELYLLFRPFKGYEGSLIKLTARQPVGFVIFDSRAGAEAAKNALNGIRFDPENPQTLRLEFAKANTKMAKSKLMATPNPSNVHPALGAHFIARDPYDLMGAALIPASPEAWAPYPLYTTELTPAISHAAFTYPTATAAAAALHAQVRWYPSSDTTQQGWKYRQFC

SEQ ID NO: 258294 - DNA, 2008 bp, Artificial Sequence
  derived and/or modified sequence
actcgccggtcgcagtgaaaaggcggaggcggcggcccctccggctcccactgcctcccccgccgcaccccctccccaccttccgcacccgccaaacttgatgtgaccctggcccgacgcggaggctgcccctctcactgccccgtgggtcccccgccacccgctccgcacccgcgagcgcaccgctccccgcgccccttcccacttcccgcggggccggcgccgcgctcgccctcgcgttccttcccgccgccccctcccccgcaccatgagcaacctgaagccggacggcgagcacggcggcagcaccggcaccggctccggcgcgggctccggcggcgccctggaggaggaggtccggacactgtttgtcagcggcctccctgtggacattaaacccagagaactctacttgctcttccggccgttcaaggggtatgaagggtccctgatcaagctcactgcaagacagcctgttggttttgtgatctttgacagccgtgcaggagcagaagcggccaagaatgcgctgaacggtattcgctttgatcccgaaaatccacagactctgaggctagagtttgccaaagccaacaccaagatggccaagagcaagctaatggcaactccaaatcccagcaacgtgcaccccgccctaggagcacacttcatcgcacgggacccctatgacctgatgggggctgctctgatccctgcatccccagaggcctgggccccctaccctttgtacaccacagagctgaccccagccatctcccatgctgcgttcacctacccaactgccactgccgctgccgccgccctccacgctcaggtgcgctggtacccttcctctgacaccacccagcaaggatggaagtaccgtcagttctgttagtttttcagtctggtcaccggggaggtggttctggtaatctgtggtggtgccgggacaggcgccccgagttcccactgcccccgggcggcctgcacagagctgctgccctccagagactgtgaatcccaagcctgactcagtggactgcttcctgttcccctccctcctcttcctcaccttgttctgcaccctcaagcctttctccaatgcctcccaggaggatttggggactttctccctggggcgcccagatccagctcggaggcctcactgggacctggcaaggcctgacctcccgcccaaacttgcttctgtagctccccctcgaggaagtgaggtgtttaattttgcatgttttctggcatgaattaagacacttatacttgtatatatgagtgtacagtttgttctcacactgtcaccatagcgacaggtcctggctcccagtggttcatcctgcctgcccctctctcctcgccccgcccctgcacccaccccgcttcagggaggcccaagttccgtggccccacacgcttccaggctcagctcccacctccacccaacagatagatggggtttgctttttcatttcacatggggctcctccgctcctgccttctcggatgggccaacagtcgtaagaaagccctctctgcccgttctgttcacctctccacagcgcaccccgcccgccgctgctcctcattctttccaaacctcgaaaccaaccaaaacgtgagaagtatttttgtaccctgtgtaacaaaatatttatgcatcataaaggatttttcatgtgcgtaccattaattattaaagcgacctcgttcgccctgtcagataagtttaatgtttagtttgaggcatgaagaagaaaagggtttccattcttcagcagtacgcctttgtgtctggcatttgtttaagaaaatgaaatgaaggaaacactgtgcaatgttttttgttttgagcatatcagtgctttactgtcagccgcagctgtgaccgtctggccatttcagacttgggagatgaggcggctgttgtcattgctgatcctgtgagaatgtgaaactggataatatatgaaatgcaaaataaaacaaaacc

SEQ ID NO: 258295 - DNA, 630 bp, Artificial Sequence
  derived and/or modified sequence
atgagcaacctgaagcccgacggcgagcacggcggcagcaccggcaccggcagcggcgccggcagcggcggcgccctggaggaggaggtgagaaccctgttcgtgagcggcctgcccgtggacatcaagcccagagagctgtacctgctgttcagacccttcaagggctacgagggcagcctgatcaagctgaccgccagacagcccgtgggcttcgtgatcttcgacagcagagccggcgccgaggccgccaagaacgccctgaacggcatcagattcgaccccgagaacccccagaccctgagactggagttcgccaaggccaacaccaagatggccaagagcaagctgatggccacccccaaccccagcaacgtgcaccccgccctgggcgcccacttcatcgccagagacccctacgacctgatgggcgccgccctgatccccgccagccccgaggcctgggccccctaccccctgtacaccaccgagctgacccccgccatcagccacgccgccttcacctaccccaccgccaccgccgccgccgccgccctgcacgcccaggtgagatggtaccccagcagcgacaccacccagcagggctggaagtacagacagttctgctag

SEQ ID NO: 258296 - DNA, 630 bp, Artificial Sequence
  derived and/or modified sequence
atgtcaaatctgaaaccagacggtgaacacggcggctccaccggcactggatccggcgctggctccggtggcgcccttgaggaggaagtgcgaacgctgtttgtgtcagggctgcccgttgacattaaacccagagagctctacctcctgttccgcccctttaagggttatgagggctcactcatcaagttgaccgcccgtcagccagtcggattcgtgatattcgatagcagagctggagccgaggccgccaaaaacgctctgaatgggattcgattcgaccctgagaatccacagaccttgaggcttgagttcgccaaggctaataccaaaatggcaaaatctaaactgatggccacacctaacccttctaatgtgcatcctgctctaggtgctcattttatcgccagggatccttatgacctgatgggcgccgcgctgatacctgccagtcccgaggcatgggctccttaccctctgtatactactgagctgacccctgcgatctctcatgctgccttcacctacccaacggccaccgccgctgccgccgcgttacatgcccaagtgcgctggtacccttctagcgatacaactcagcagggatggaaatacagacagttctgttag

SEQ ID NO: 258297 - DNA, 630 bp, Artificial Sequence
  derived and/or modified sequence
atgagcaacctgaagccagatggagagcacggcggcagcacaggcaccggcagcggggccggcagcggcggggccctggaggaggaggtgaggaccctgtttgtgtctggcctgcctgtggacatcaagccccgggagctgtacctgctcttccggcccttcaagggctatgagggcagcctcatcaagctgacagcccggcagcctgtgggcttcgtcatctttgacagcagagctggagctgaggccgccaagaatgccctgaatggcatccgctttgatcctgagaacccccagaccctgcggctggagtttgccaaggccaacaccaagatggccaagagcaagctgatggccacccccaaccccagcaatgtgcacccagccctgggcgcccacttcatcgcccgggacccctatgacctgatgggcgccgccctgatcccagccagccctgaggcctgggccccctaccccctgtacaccacagagctgaccccagccatcagccacgccgccttcacctaccccacagccacagctgctgctgctgccctgcacgcccaggtgcgctggtaccccagcagtgacaccacccagcagggctggaagtaccggcagttctgctag

SEQ ID NO: 258298 - DNA, 630 bp, Artificial Sequence
  derived and/or modified sequence
atgagcaacctgaagcccgacggcgagcacggcggcagcaccggcacgggtagcggagctgggagcggcggtgcactggaggaggaggttcgcactctctttgtgtccggtttgcccgttgacataaagcctcgggagctgtacttactgttccggcctttcaagggatacgaggggagcctgatcaaactcactgcacgccaaccagtgggctttgtaatattcgactcgcgtgccggcgcagaggccgccaaaaacgctctcaacggcatccgatttgaccccgagaaccctcagacactgcgcttggagtttgcgaaagcgaacaccaagatggctaagagcaaactgatggctacacccaatccctcaaacgttcaccccgccctgggcgcacacttcattgctagagacccatacgatctgatgggagctgcactgattcccgcctcccctgaggcttgggcaccgtacccactatacacaactgaactgacgcccgcaatctctcatgctgccttcacttatcccaccgccacagcagcagcagctgccctccacgcccaggtccgctggtacccaagctcagatacaactcagcaggggtggaaatacaggcaattctgttag

SEQ ID NO: 258299 - DNA, 630 bp, Artificial Sequence
  derived and/or modified sequence
atgtccaatttgaagccagacggagagcatggtggcagcaccggaactggcagtggggctggatcaggaggtgcacttgaagaggaggttcggacccttttcgttagtgggctgccagtagatattaagccacgtgagttatatcttttgttccgcccattcaaaggctacgaagggagcctgattaagctgacagcacgacagccagtcgggtttgtgattttcgactcccgtgcaggggctgaggcagcaaaaaacgccctgaatgggattcgctttgatccagagaatccccaaacgctgcggctcgagtttgctaaggccaacactaagatggcaaaatctaaacttatggccaccccaaacccctctaacgtacaccccgctctgggcgctcattttattgcccgagatccatatgacctcatgggtgcagcattgatacctgcctcgccagaggcctgggctccttaccccctgtacaccaccgagctcacaccagcaatcagtcatgccgcatttacttaccccacggccactgccgcagccgctgccctccacgcccaagtgcgatggtacccaagctccgataccacccagcagggatggaagtatcgtcagttctgttag

SEQ ID NO: 258300 - protein, 714 aa, Artificial Sequence
  derived and/or modified sequence
MLHLKVQFLDDSQKIFVVDQKSSGKALFNLSCSHLNLAEKEYFGLEFCSHSGNNVWLELLKPITKQVKNPKEIVFKFMVKFFPVDPGHLREELTRYLFTLQIKKDLALGRLPCSDNCTALMVSHILQSELGDFHEETDRKHLAQTRYLPNQDCLEGKIMHFHQKHIGRSPAESDILLLDIARKLDMYGIRPHPASDGEGMQIHLAVAHMGVLVLRGNTKINTFNWAKIRKLSFKRKHFLIKLHANILVLCKDTLEFTMASRDACKAFWKTCVEYHAFFRLSEEPKSKPKTLLCSKGSSFRYSGRTQRQLLEYGRKGRLKSLPFERKHYPSQYHERQCRSSPDLLSDVSKQVEDLRLAYGGGYYQNVNGVHASEPVLESRRRNSALEVTFATELEHSKPEADPTLLHQSQSSSSFPFIYMDPVFNTEPNPNPDPRDIFSERSSLSSFQTSCKFSGNHMSIYSGLTSKVRPAKQLTYTDVPYIPCTGQQVGIMPPQVFFYVDKPPQVPRWSPIRAEERTSPHSYVEPTAMKPAERSPRNIRMKSFQQDLQVLQEAIARTSGRSNINVGLEEEDPNLEDAFVCNIQEQTPKRSQSQSDMKTIRFPFGSEFRPLGPCPALSHKADLFTDMFAEQELPAVLMDQSTAERYVASESSDSESEILKPDYYALYGKEIRSPMARIRLSSGSLQLDEEDEDAYFNTPTAEDRTSLKPCNYFLA

SEQ ID NO: 258301 - DNA, 3198 bp, Artificial Sequence
  derived and/or modified sequence
aaatgcccttgggtgtgcattacttcaagcaaacggaagtgtgccccgctgacagtgggaatgcctggctgggggtgggggggcccgagtgcaccacatccagctgggagtgaaattcctggagaaagcacccacagcactctgagcctgcttgcagcccaacggcctcgctgagaatgctacatttaaaagtgcagtttttggatgattcccagaagatttttgtggttgatcaaaagtcatccgggaaggcattgtttaacctgagttgcagccatctaaatcttgctgaaaaggaatattttggattagaattctgcagccattctggaaataatgtttggctggagcttttgaagcccataacaaagcaggtaaaaaatcctaaggagattgttttcaaatttatggtgaaatttttcccagtggaccctggacatctgcgggaagaacttacaaggtatctttttactcttcaaataaagaaggatttggctctaggaaggcttccatgcagtgacaactgtacagcgttgatggtatctcacatcttacaatcagaacttggagactttcatgaagaaacagataggaagcatctggcacaaactcggtacttaccaaaccaagactgtttagagggcaagatcatgcactttcatcagaagcacattggcaggagcccagctgaatctgacattctgctactggacatagcaaggaagctggatatgtatggcatcaggcctcaccccgccagtgatggtgaagggatgcagattcacctggctgttgctcacatgggagtactggtgttacggggaaatacaaagatcaatacttttaactgggctaaaatccgcaagttgagttttaagagaaagcattttctcatcaaacttcatgccaatatcttggtgttgtgcaaggataccttggagttcaccatggccagccgagatgcctgcaaggctttctggaagacttgtgtggaataccatgctttcttcaggctttcggaagagcccaaatcaaagcccaaaaccctactctgcagcaagggttccagtttccgctatagtggacgaacccaaaggcaacttttggaatatgggagaaaagggaggctgaagagcttgccatttgaaaggaaacattacccatctcagtaccatgaacgacagtgcaggtcctcaccagacctcctctctgatgtgtcaaaacaagtggaagatttgagactagcatatggtggtggctactaccaaaatgtgaatggagtgcacgcatctgagccagtgctggagagtaggaggaggaattctgcattggaggtgacatttgcaactgagctggagcattccaaaccagaggcggatcccacattgctacatcagtcccaaagcagttcctctttcccttttatttatatggaccctgtctttaacactgagcccaatcctaaccctgatcccagagacattttttcagagaggagttctctaagctccttccaaacaagctgtaagttttctggtaatcacatgagcatatattctggcctcacaagcaaagtgcgtccagcaaagcagctaacttacacggatgtgccctatattccttgtacaggtcagcaggttggtattatgcctccccaggtctttttttatgtggacaagccaccccaggtgcccagatggtccccaattagagcagaggaaaggacaagtccacatagctatgtagagcccactgcaatgaagccagctgaaagaagcccaaggaatatcagaatgaagagctttcagcaagacctgcaagtactccaagaagctatagccaggactagcggtaggagcaacatcaatgtaggtctagaagaggaagacccaaatttggaagatgcatttgtatgtaacattcaagagcaaacccctaaaaggtcccagagccaatcagacatgaaaactattcgttttccttttgggtcagaatttagacctttagggccttgtcctgctctcagtcataaagcagacctgtttacggatatgtttgcagagcaggagttgccagcagttctaatggatcaaagtacagcagaaaggtatgtagctagtgaatccagtgattctgaatcagagattcttaaaccagactactatgctttgtatggcaaagaaataaggtcacccatggccagaatccgcctgtcttctggtagtctacagttagatgaagaagatgaagatgcttatttcaacacaccaactgctgaagacaggacttcactaaaaccatgtaattactttttagcttaaaagtgtgaacctatggacatttctgagccagttccatgttaccgacttaggcagaaaataatgaagttgtagaaaccattttcttggttactacatattcattggtattaaggaaatctcattttggatgcctgccttatgaaagatccagctgttgcctcattccttgagtttcactcttccattacctctgaagggactttagaacatgccctctcctcaccagcactgtggcaaggcaaggtgggtatttgtcatctccactgcatacttcctcatagagacattgtgagtgaaggtcaggctcttcaatgctgaagaatggtgacagtatgggttggcatatggaattagcgtctaatggcatttagtgatttagtagattgtgactgtgttgatctttgtgctcttaaacaacactgaacaaatatttcagtctttactatttgtgtggggcccagtagaaatggtcttgtaatatgctaaatacttccatttttataacatataaaagcagagcatggccctcctacagcctcaggaaggaggtggtggcatagatcctctcaagagaatacaggtttagaattaatctaggacttggcagaattctaaacctaggaaattcatgaattaaatcaatttctagagccagacataaaccagatgaaagtatcatgttgttttacttataacttctatattcttatctactatatctagtaaaagagaaacattatcaggtcagtttgtttatctaatatttcctgccagaatttattttttgtcatagcttcttgcatgtatgcaggccaggaaatgaatgttattgtaataaagtgtgatggaaaatccaggtaattaaaaaataaattat

SEQ ID NO: 258302 - DNA, 2145 bp, Artificial Sequence
  derived and/or modified sequence
atgctgcacctcaaagtacagtttctggatgatagccaaaagatattcgtagtcgaccaaaaatcaagcgggaaggccctctttaacctgtcttgcagtcacctgaacctggccgaaaaagaatatttcggcctggagttttgttcccattctgggaataatgtatggctggagttgctgaagccaatcaccaaacaggtcaagaaccctaaagagatcgtgttcaaattcatggtcaaattctttccagtggacccaggacatctgagggaggagttaactcggtacctcttcaccctgcagatcaagaaggacctcgctttaggcaggcttccctgttcagacaactgcacagctctaatggtgtctcacatcctccaatccgagctcggagatttccatgaggaaactgacaggaagcatctggcccagacccggtatctgccgaaccaagattgcctcgaagggaagattatgcactttcaccaaaaacatatcgggcggtctcctgccgaatcagatattttgcttctcgatatagctaggaagttggacatgtatgggattagaccccaccccgccagtgacggagagggtatgcaaatccatttggctgtggctcatatgggagttcttgtgcttaggggcaatacaaaaatcaatacgttcaattgggcaaagatacgcaagctgtcatttaagcgcaaacatttcctcattaagctgcacgccaacatcctggtcctgtgtaaggacacattggaattcacaatggcgtctagggatgcctgcaaggcattttggaaaacttgcgtcgaataccatgcattttttcgtctcagcgaagaacctaaaagcaagccaaaaacgttactgtgcagcaaggggtctagttttcgctatagcggtcgcacccaaaggcagctgctcgagtacggccgcaagggccggttaaaatccctgcccttcgaaagaaagcattatccaagccaatatcatgaacgtcaatgcaggtcctctcccgatctgctgagtgatgtctctaagcaggtcgaggatctgaggctcgcatacggtggcgggtattaccagaacgtgaatggcgtgcatgcctccgagccagtgctagagtctagacggcgtaactccgccctagaggtgacttttgcaacagaacttgaacacagcaagcctgaagctgacccaaccctcctacaccagtcccagtcaagctcttcctttccattcatatacatggatccagtgtttaatacagagcccaatcctaacccagaccccagggacattttcagcgagcgctccagtttgagtagctttcagacgtcctgtaaattcagcggaaaccacatgtcaatatacagtggcctcactagcaaagtgaggcctgcgaaacagttgacttatacagacgttccctacatcccatgcactggacagcaggtgggcataatgcctccacaagtcttcttttacgtcgacaagccaccacaagtgccccgatggtcccctattcgcgccgaggaacggactagtccccacagttacgtcgaacctaccgccatgaagccagcagaaagatctcctagaaatattcgcatgaagtcatttcagcaggatctccaagtgctacaagaggcaatcgccagaacctccggaagatcgaacatcaacgttggattggaagaggaggatccgaacctcgaagatgcatttgtatgcaacatccaggagcaaacccccaagcgtagccagagccaatcagacatgaagacaattcgattccccttcgggagcgaattccgacctttgggcccgtgccccgctctctcccataaagcagacctttttaccgatatgtttgcagaacaggagttgcctgccgtattaatggaccagtcaacggctgagaggtatgtcgcctcagaatcctcagatagtgaaagcgagattctgaaaccagactattatgcattgtatggaaaagaaatccgttcccccatggcacggatccgcctgtccagcggttccctgcagttggacgaggaggatgaggacgcctactttaacactcccactgccgaggatagaaccagcctgaagccatgcaattactttctcgcatag

SEQ ID NO: 258303 - DNA, 2145 bp, Artificial Sequence
  derived and/or modified sequence
atgctgcacctgaaggtgcagttcctggatgacagccagaagatctttgtggtggaccagaagagcagcggcaaggccctcttcaacctgagctgcagccacctgaacctggccgagaaggagtacttcggcctggagttctgcagccacagcggcaacaacgtgtggctggagctgctgaagcccatcaccaagcaggtgaagaaccccaaggagatcgtgttcaagttcatggtgaagttcttccctgtggaccccggccacctgcgggaggagctgacccgctacctgttcaccctgcagatcaagaaggacctggccctgggccgcctgccctgcagcgacaactgcacagccctgatggtgagccacatcctgcagagcgagctgggggacttccacgaggagacagacaggaagcacctggcccagacccgctacctgcccaaccaggactgcctggagggcaagatcatgcacttccaccagaagcacatcggccgcagccctgctgagagtgacatcctgctgctggacatcgccaggaagctggacatgtatggcatccggccccacccagccagtgatggagagggcatgcagatccacctggccgtggcccacatgggcgtgctggtgctgcggggcaacaccaagatcaacaccttcaactgggccaagatcaggaagctgtccttcaagaggaagcacttcctgatcaagctgcacgccaacatcctggtgctgtgcaaggacaccctggagttcaccatggccagcagagatgcctgcaaggccttctggaagacctgtgtggagtaccacgccttcttccggctgtctgaggagcccaagagcaagcccaagaccctgctgtgcagcaagggcagcagcttccgctacagcggccgcacccagaggcagctgctggagtatggcaggaagggccgcctgaagagcctgccctttgagaggaagcactaccccagccagtaccacgagcggcagtgccgcagcagcccagacctgctgagtgatgtgtccaagcaggtggaggacctgcggctggcctacggcggcggctactaccagaatgtgaatggagtgcacgccagcgagcctgtgctggagagcagaagaagaaattctgccctggaggtgacctttgccacagagctggagcacagcaagccagaggccgaccccaccctgctgcaccagagccagagcagcagcagcttccccttcatctacatggaccctgtgttcaacacagagcccaaccccaacccagacccccgggacatcttcagcgagaggagcagcctgagcagcttccagaccagctgcaagttcagcggcaaccacatgagcatctacagcggcctgaccagcaaggtgcggcctgccaagcagctgacctacacagatgtgccctacatcccctgcaccggccagcaggtgggcatcatgccaccccaggtgttcttctacgtggacaagccaccccaggtgccccgctggagccccatccgggcagaggagaggaccagcccccacagctatgtggagcccacagccatgaagccagctgagaggagccccaggaacatccgcatgaagagcttccagcaggacctgcaggtgctgcaggaggccatcgcccggaccagcggccgcagcaacatcaacgtgggcctggaggaggaggaccccaacctggaggatgcctttgtgtgcaacatccaggagcagacccccaagaggagccagagccagagcgacatgaagaccatccgcttcccctttggaagtgagttccggcccctgggcccctgcccagccctgagccacaaggctgacctcttcacagacatgtttgctgagcaggagctgcctgctgtgctgatggaccagagcacagctgagagatatgtggccagcgagagcagtgacagcgagagcgagatcctgaagccagactactatgccctgtatggcaaggagatccgcagccccatggcccgcatccggctgagcagcggcagcctgcagctggatgaagaagatgaagatgcctacttcaacacccccacagctgaggacaggaccagcctgaagccctgcaactacttcctggcctag

SEQ ID NO: 258304 - DNA, 2145 bp, Artificial Sequence
  derived and/or modified sequence
atgctgcacctgaaggtgcagttcctggacgacagccagaagatcttcgtcgtcgaccagaagagctctggaaaggcactgtttaatctcagctgcagtcacttgaacctcgcagaaaaggagtatttcggcttagaattttgtagccattctggaaacaatgtctggcttgagttgctgaagcctattactaaacaggtgaagaacccgaaggaaattgtgtttaagtttatggtgaaattctttccggtagacccgggccacctgagggaagaattgacacgctatctattcacgctgcagatcaagaaagacctggctctcggacgcctaccctgtagtgacaattgtacagcactgatggtctcccacattctgcaatctgagctgggggactttcacgaggagacggaccgtaaacacttagcccaaacccgctacctgcccaatcaggattgtctcgagggcaaaatcatgcacttccaccagaagcacatcggccgatctcccgccgaatccgacattctgctcctggacatcgcgcgaaagctggacatgtatggaatccgacctcatcctgcgtccgacggggagggaatgcagatacacttggcagtggcccacatgggagtcttggtgctgcgcggcaacacgaaaatcaatacattcaattgggccaaaattagaaagctgtcttttaagcgcaaacatttcctaattaagctccacgctaacattctagttctgtgcaaggacactctggaatttacgatggccagtcgcgacgcgtgtaaggctttctggaagacatgtgtggaatatcacgcctttttccgcttatctgaggagcccaaatcgaaaccaaagaccctgctctgtagcaagggctctagtttcaggtacagcgggagaacacaacgccagcttcttgaatacggcagaaaaggtcggctcaaaagcctgcccttcgagcggaaacactacccaagccagtaccacgagcggcagtgtcgaagctcccccgatctgctgtcggacgtgagcaagcaggtggaagacttgagactggcctatggaggcggatattaccagaacgttaacggtgtacacgccagcgagcctgtccttgagtccagacgacgtaactccgccctcgaagtaactttcgcgactgaactggaacactcaaagccagaggcagatccaacgctcctgcatcagtcccagtcatcgtccagttttccattcatttatatggatcccgtgttcaacaccgaacctaatcccaatccggatcccagggacatattttccgagcgctctagtctgagctcattccaaacgtcctgcaagtttagcggaaatcatatgtctatctactcagggctcaccagcaaggtaagaccagctaagcagctcacatacactgatgtgccctacatcccctgtacaggacaacaagtgggcataatgcccccccaggtgttcttctatgtagacaagcctccccaagtacctcgctggagtccaatacgcgccgaagaacgtacctccccacactcatatgtggagccaaccgcgatgaaaccagccgaaaggagcccaaggaacatcaggatgaagtcattccagcaggaccttcaggtgctgcaggaggcaattgcccggacctccggaagatctaacattaatgtagggttggaggaagaagaccctaacctggaagacgcattcgtatgcaacatccaggagcagacccccaaaaggagccagagccagtcggatatgaagaccatccgttttccctttgggtctgagtttagacctttgggcccatgtcctgccctttcacacaaggccgatctgttcacagacatgttcgccgagcaggaactgcccgccgttctgatggatcagtccactgccgagagatatgtggcttccgagagcagcgattcagagtctgagatcctgaaacccgattattacgccctttatgggaaagaaatcagaagtcctatggcccgaatacggttaagttcagggagcctgcaactggacgaggaggatgaagacgcctactttaacaccccaactgctgaggatcgcacatctctgaagccatgcaattactttctagcatag

SEQ ID NO: 258305 - DNA, 2145 bp, Artificial Sequence
  derived and/or modified sequence
atgctccatctgaaggtccaattcctcgatgacagccagaaaatctttgttgtcgatcagaagagcagtggcaaagcgctcttcaacctgagctgtagccaccttaatctggctgagaaagaatacttcggactagagttctgcagccatagcggaaacaatgtgtggttggagttgctgaagccaatcacaaaacaggtcaagaatcccaaggagattgtgttcaagttcatggtgaaatttttccctgtggaccccggacaccttcgagaagaactgactcgctacctgttcaccctgcagattaagaaagacctggcgctgggcaggctgccttgtagcgataattgtaccgccctcatggtgtctcacattttacagtccgaactgggtgatttccacgaggagaccgaccggaaacatctggctcagactcgttacctacctaatcaggattgcctggaggggaagattatgcactttcatcagaagcatattggaaggtcccctgctgagagcgatatactgttgttagacatcgcgagaaagttggatatgtatggcatcaggccacaccccgcatccgatggcgaaggcatgcaaattcatctggcagtggcacatatgggagtgctggtgctcagagggaatacaaaaattaacacctttaactgggctaagattcggaagctgtcatttaaaaggaagcactttctgattaagcttcatgctaacattctggtgctgtgcaaagataccctagaattcacaatggccagccgagacgcctgtaaggctttctggaagacgtgtgtggaataccacgccttctttagactgagtgaggagccgaagtctaagcctaagaccttgctgtgcagtaaggggagttcctttcgatattccgggcgaacacaacggcaactgttggaatacggcagaaagggtaggctcaagagtctgccatttgaacggaaacattatccttcccagtatcatgagcggcagtgtcgtagcagcccagaccttctgtccgacgtgagtaagcaggtggaggaccttcgtctggcttacggagggggatattatcaaaatgtaaatggcgtccatgctagcgaacctgtgctggaaagtcggaggagaaattctgcccttgaggtgactttcgccacagagttagaacactccaagcccgaggcagatccgacgttattgcaccaatcacagtctagctcaagctttccgttcatttatatggacccagtattcaacaccgaacccaatcctaatccggaccctagagatatcttttcagagcgctctagcctgtccagcttccagaccagctgtaagttctcagggaaccatatgtccatttactctggccttaccagcaaggtgcggccagctaaacaacttacatacaccgatgtgccctatatcccctgcacaggacaacaagttggcatcatgcccccacaggtgttcttctacgtcgataagcccccacaagtgccacgctggtcgccaattagagcagaggaacgaacctcaccacactcttacgtggaacccaccgctatgaaacccgctgagcgcagccccagaaacattcgaatgaaatcatttcagcaagatctccaggttctgcaagaggccattgcaagaaccagtggccgatcaaatattaacgtcgggcttgaggaagaggatcccaatttagaggacgccttcgtgtgtaacatccaggagcaaacccctaagaggtcacaaagtcaatcagatatgaagaccatccgattccctttcggctctgagtttagaccacttggaccctgtcccgcactctcacataaggcagacttgttcaccgacatgttcgctgaacaggagctgcctgccgttctcatggatcagtctaccgctgagcggtacgtcgccagtgagtccagcgattcagagtcagagattctgaaacctgattactacgccctctacggtaaggaaatcagaagcccgatggccaggatccgactttcatcgggatccctccagttggatgaagaagacgaggatgcatactttaatacccctacagccgaggatcgcaccagtttgaaaccctgcaattacttcttagcttag

SEQ ID NO: 258306 - DNA, 2145 bp, Artificial Sequence
  derived and/or modified sequence
atgctgcacctgaaggtgcagttcctggacgacagccagaagatcttcgtggtggaccagaagagcagcggcaaggccctgttcaacctgagctgcagccacctgaacctggccgagaaggagtacttcggcctggagttctgcagccacagcggcaacaacgtgtggctggagctgctgaagcccatcaccaagcaggtgaagaaccccaaggagatcgtgttcaagttcatggtgaagttcttccccgtggaccccggccacctgagagaggagctgaccagatacctgttcaccctgcagatcaagaaggacctggccctgggcagactgccctgcagcgacaactgcaccgccctgatggtgagccacatcctgcagagcgagctgggcgacttccacgaggagaccgacagaaagcacctggcccagaccagatacctgcccaaccaggactgcctggagggcaagatcatgcacttccaccagaagcacatcggcagaagccccgccgagagcgacatcctgctgctggacatcgccagaaagctggacatgtacggcatcagaccccaccccgccagcgacggcgagggcatgcagatccacctggccgtggcccacatgggcgtgctggtgctgagaggcaacaccaagatcaacaccttcaactgggccaagatcagaaagctgagcttcaagagaaagcacttcctgatcaagctgcacgccaacatcctggtgctgtgcaaggacaccctggagttcaccatggccagcagagacgcctgcaaggccttctggaagacctgcgtggagtaccacgccttcttcagactgagcgaggagcccaagagcaagcccaagaccctgctgtgcagcaagggcagcagcttcagatacagcggcagaacccagagacagctgctggagtacggcagaaagggcagactgaagagcctgcccttcgagagaaagcactaccccagccagtaccacgagagacagtgcagaagcagccccgacctgctgagcgacgtgagcaagcaggtggaggacctgagactggcctacggcggcggctactaccagaacgtgaacggcgtgcacgccagcgagcccgtgctggagagcagaagaagaaacagcgccctggaggtgaccttcgccaccgagctggagcacagcaagcccgaggccgaccccaccctgctgcaccagagccagagcagcagcagcttccccttcatctacatggaccccgtgttcaacaccgagcccaaccccaaccccgaccccagagacatcttcagcgagagaagcagcctgagcagcttccagaccagctgcaagttcagcggcaaccacatgagcatctacagcggcctgaccagcaaggtgagacccgccaagcagctgacctacaccgacgtgccctacatcccctgcaccggccagcaggtgggcatcatgcccccccaggtgttcttctacgtggacaagcccccccaggtgcccagatggagccccatcagagccgaggagagaaccagcccccacagctacgtggagcccaccgccatgaagcccgccgagagaagccccagaaacatcagaatgaagagcttccagcaggacctgcaggtgctgcaggaggccatcgccagaaccagcggcagaagcaacatcaacgtgggcctggaggaggaggaccccaacctggaggacgccttcgtgtgcaacatccaggagcagacccccaagagaagccagagccagagcgacatgaagaccatcagattccccttcggcagcgagttcagacccctgggcccctgccccgccctgagccacaaggccgacctgttcaccgacatgttcgccgagcaggagctgcccgccgtgctgatggaccagagcaccgccgagagatacgtggccagcgagagcagcgacagcgagagcgagatcctgaagcccgactactacgccctgtacggcaaggagatcagaagccccatggccagaatcagactgagcagcggcagcctgcagctggacgaggaggacgaggacgcctacttcaacacccccaccgccgaggacagaaccagcctgaagccctgcaactacttcctggcctag

SEQ ID NO: 258307 - DNA, 3138 bp, Artificial Sequence
  derived and/or modified sequence
atgaaccttcaggcacaaccaaaggcgcagaacaagaggaaacgctgtctgttcggaggtcaggaaccggcacccaaagagcaaccaccgccacttcaacctccccagcaaagcatccgcgttaaggaggagcagtacctcggacacgagggccccggtggcgccgtgtctactagccaaccagtggaactgcctccaccttcaagtttggcactgcttaattctgtggtctacgggccagagcgcacctcggccgcaatgctctcacaacaggtggcttccgtaaaatggcctaattccgtgatggccccaggaagaggcccagagaggggagggggtggtggggtgagtgactctagttggcaacagcagcctggacagccccctccccactcaacatggaattgccactccctaagtctctactcagcaaccaaaggttctccacacccaggagtcggggtccctacatactacaaccaccctgaagcgctgaagagagaaaaggcagggggtccccagctagacaggtatgtgaggcccatgatgccgcagaaagtacagctcgaggtgggcagacctcaagcacctctcaacagttttcatgccgcaaagaagccaccaaatcaatcgttacccctgcagccctttcagctggccttcggccaccaggtgaatcgccaggtcttccgccaggggccacctcctcccaatcccgtcgctgccttccccccacagaagcaacagcagcagcagcaaccgcagcaacaacagcagcagcagcaggctgcactgccccaaatgcctttattcgagaatttctactctatgccacagcagccctctcagcagcctcaggacttcggattgcagcctgcaggccctctggggcagagtcacttggcccatcactccatggctccctatccctttccccccaatcctgacatgaatcctgaactgagaaaggcactactacaggattccgcgccccagcccgcactgcctcaagtccagattccattcccgaggaggagccggaggcttagcaaggaaggaattctgccaccgtccgcccttgatggggctggcacacagcccgggcaagaagccacaggcaatctttttttgcatcattggcccctgcaacagcccccacctggatcgttaggtcagccgcatcctgaggcattgggcttccctctcgaactgcgcgaatctcaattgctcccagacggggagcgattggctccaaatggcagagagcgcgaggcccccgcaatgggcagcgaagaaggcatgcgcgcggttagcacaggcgactgcggccaggtattgcgcggcggcgtcatacagagtactcgcaggaggaggagggctagtcaggaggcaaatctgcttactctagcacagaaggctgtggaactcgcgtctctgcagaacgctaaggacggatccgggagtgaagaaaaaaggaaatctgtgctggcctcaaccactaagtgcggagtggagttctcggaaccatctcttgcgactaagcgggcccgcgaggatagtggaatggttcctcttatcatccctgtgtccgtcccagtccgcaccgtggatcctacagaagcggcacaggcaggaggcctggatgaagacggaaaggggcccgaacaaaacccagccgagcacaagcccagcgtgatagtgacaaggcgtagaagcacaaggatccctggcacagatgcgcaggcccaggccgaagatatgaatgtgaagctggaaggagaaccatctgttcggaaaccaaagcagaggcccaggccagagcctttgatcattccaactaaggccggaaccttcattgctccaccagtatactctaatattaccccctatcagtctcatctgcgtagccctgttaggctcgccgaccacccttccgaaaggagctttgagctccccccgtatacgccccctcccatcctgagtcctgtgagggaaggatcagggctttattttaacgctatcatctctacctctaccatccctgcgcccccccccatcactcccaagtctgcccataggacgctgctgaggaccaactcggctgaagtcaccccacccgtgttgtccgttatgggcgaagcgaccccagtgagtattgaaccgcgaattaatgttggcagtcgatttcaggctgaaattccgcttatgcgagatagagctctagcagcagcagatccacacaaagccgaccttgtttggcaaccctgggaagatctcgaatcaagcagggaaaaacagcggcaggtggaagacttattgaccgccgcatgctcttctatcttccctggtgcggggacaaaccaggaactggctctgcattgtctgcacgagtctcggggcgacatccttgagacactgaacaagctcctgcttaagaagcctcttagaccccacaaccatcccctggcaacttatcactatacgggcagtgaccagtggaagatggccgaaaggaagcttttcaataaggggatcgcgatttacaaaaaagattttttccttgtgcagaaattaattcagaccaaaaccgttgcgcagtgtgtcgaattctactacacctataaaaaacaggtgaagattggacggaacggtacattgaccttcggtgacgtggacactagcgacgagaagagcgcccaggaggaggtcgaagtggacatcaagacatctcagaagttccccagagtacctttaccacggagggagagtccttcggaggagcgattggagccaaaacgggaggtcaaagagcctcgtaaagagggggaggaagaggtgccagaaatccaagagaaagaagaacaggaagagggccgtgaacgctcccgccgcgccgccgccgtgaaggcgacacagactctgcaggcaaatgaatcagcaagcgacatcctcattctaagatcccatgagagcaatgccccaggttccgccgggggtcaagcgtccgagaaaccacgcgaggggaccggcaaatcccggcgtgccttaccattttccgaaaaaaagaagaagacagagaccttttccaaaactcagaatcaggagaacacatttccatgtaaaaaatgcggtcggtag

SEQ ID NO: 258308 - DNA, 3138 bp, Artificial Sequence
  derived and/or modified sequence
atgaacctgcaggcacagcccaaggcacagaataagagaaagaggtgcctgttcggaggtcaagagcccgcacctaaggaacaacctcctcctctgcagcccccccagcagtctatacgagtgaaggaagagcaatacctcgggcatgagggtccgggcggagcagtcagcacatcccaacctgtagagttaccaccaccctcttcactcgcactacttaattcagtcgtgtacggaccagaaagaacctcagctgccatgctgtctcagcaggtggcgtcagtgaagtggcccaacagcgtgatggctcctggtcgtggccccgaacggggcgggggtgggggggtttcagactcttcttggcagcagcagcccggccagccaccaccccattccacgtggaactgccactccctatcactgtactccgcgacgaaagggagcccacacccaggggtaggcgttccaacgtactacaatcaccccgaggccctgaaacgagaaaaggccggcggcccacagctggaccgttatgttaggccgatgatgccccagaaggtgcagcttgaggtcggtagaccacaggcgcccctcaattccttccatgccgccaagaagccaccgaatcagtccttgccattgcagcccttccagctggccttcgggcaccaggttaacaggcaggtgttcagacaggggccaccaccgcctaaccccgtggccgctttcccacctcagaagcagcagcagcagcagcaacctcagcagcagcaacagcagcagcaggccgcattaccccagatgcccctgtttgagaatttttattcgatgccgcagcaaccaagccagcaacctcaggattttggtttgcagcccgccggaccgcttgggcagagccatctcgcccaccacagtatggctccttatcccttccccccaaatcccgacatgaaccccgagttgcgcaaggccctcctgcaggatagcgccccacagcccgctctgcctcaggtccagattcctttcccccggagaagcagaagactctctaaggaaggcattctgccgcctagcgcactcgacggggctggaacccagcctggccaggaggcaacgggaaatctcttcctgcatcattggccccttcagcaaccaccacccgggtcattgggccagccccacccagaggccctcggatttcccctggaactgcgcgagtctcaactactgcccgatggagaacggctggctcctaacggacgagaaagggaggcgcctgctatgggatccgaggaaggaatgcgcgctgtatccactggggattgtggccaggtccttcgggggggagtgattcagtctacccggcgaaggagacgcgccagccaagaggctaatctgttgaccctggcccaaaaagcagtggagcttgccagcctccagaacgctaaagatggtagcgggagcgaagaaaaaaggaagtcagtgctggcgagcactacaaagtgcggggtggagttcagtgagccatccctcgccacaaaacgggcccgcgaggattccggcatggtgcctcttatcatcccggtgtctgtaccggtgcgaaccgtggatcctaccgaggctgcccaggccggcggactggatgaggatggaaaagggccagaacaaaatccggcagagcataagccttcggttatcgtcactagacgccgatctactcgaattcctgggacggatgctcaagcgcaggcagaggatatgaacgtgaagctggagggggaaccctcagttcggaaacctaagcagcgaccacgacccgagccgctgataattccaactaaggcagggaccttcatcgctccccccgtctatagtaatattacaccataccagagccatctcagatcaccagtacgattagctgatcacccgtctgaacggagcttcgagctgcccccttacacacctccgcccatcctgtcacccgtgcgcgaaggctcgggactctacttcaatgctatcatctcaacttctactatacccgccccgccaccaattacgcctaaatctgcacacaggacgcttcttaggactaacagcgccgaagttacgccacctgtgctatccgttatgggtgaggcaaccccagtgtctatcgaaccgaggataaatgtggggtctcgcttccaggctgaaattcctctcatgagagaccgagccctggccgctgctgacccccacaaggctgatttggtttggcagccttgggaggacctcgagagcagcagggagaagcagcgtcaagttgaagaccttttgacggccgcttgtagtagcatctttccaggtgcaggcacgaaccaggagcttgctctgcattgtctgcatgagtcacggggtgacatcttagaaaccctgaacaagctattactgaagaaacccctgcgccctcacaatcatcctctggccacataccactacactggctcagatcagtggaaaatggctgaaagaaagcttttcaataagggcatcgcaatctacaagaaggatttttttttggtccagaagctgatacagaccaagactgttgcccagtgtgttgaattctactacacttataagaaacaggtcaaaatcggtaggaacggaacgctgacttttggagacgttgacaccagcgacgagaagagcgctcaggaggaggtggaggtggacatcaagacatctcagaaattcccaagggtgcctctcccaagacgggagagcccctccgaggaaagactcgagcctaagcgagaagttaaggagcccaggaaggagggggaagaggaggttccagagatccaggaaaaagaggagcaggaggaggggcgggaaagatctcgcagagctgctgccgtcaaagcgacacagacactgcaggccaacgagagtgcgtccgacatcttgatcctccgttctcatgagagcaatgctcccggctccgccgggggacaggcgagcgaaaaaccacgggagggaaccgggaaatcaaggagggccctaccattttccgagaaaaaaaagaaaaccgaaaccttttctaagacccagaatcaggagaatacctttccctgtaagaagtgcggccggtag

SEQ ID NO: 258309 - DNA, 3138 bp, Artificial Sequence
  derived and/or modified sequence
atgaatctgcaagcgcagcctaaagcccaaaacaaaaggaagagatgtctttttgggggccaggagcccgctcctaaggaacagccacctcctttacagcccccccagcagtcgatccgagttaaagaagaacagtatctaggtcatgagggacctggaggggcggtgtctacttcccagccggtggagctgccgccgccaagtagcctggcactcctcaacagcgtcgtttatggaccagagagaaccagcgccgctatgttgagtcaacaggtcgccagcgtcaaatggccaaattctgtaatggcaccaggacgcggacccgaacggggcggtggagggggggtttccgatagtagctggcagcagcagcctgggcagccgcccccccatagcacctggaactgtcattcattatccctgtactcggcaaccaaaggcagccctcatcctggagtgggggtgccaacttactacaaccatccagaagccctgaagcgtgaaaaggcagggggtcctcagctggatcgttacgtgcgccccatgatgccccagaaagtgcagttagaggtgggaagacctcaggcccccctgaactcatttcacgcggcgaaaaagccaccgaatcagtcccttccactgcaacccttccaactcgctttcggccatcaagtgaataggcaggtgtttcgccagggaccaccgccgcctaatcctgtggccgctttccccccacagaagcaacagcagcagcagcagccgcagcagcagcagcaacagcaacaggcagctctcccacagatgcctctgtttgaaaacttttactccatgccacagcaaccatcacagcagccccaggattttggtttgcagccagctgggccacttggccaaagtcacctagcacaccattccatggccccctatcctttcccgccgaatcctgacatgaacccagaattacggaaggccttgctgcaggactctgctccgcagcccgctctgccccaagtccagatccccttcccgcgcagaagtcgcaggctgtccaaagaggggattctgcctcctagcgcgctcgatggggccggaacacagcctggccaggaagctaccggcaacctgtttttgcaccactggccactgcagcaaccaccacctggtagcctggggcagccacatcccgaggcactcggtttccccctggaattacgggaatcccagctgctccccgatggcgagcgactggcccccaatggccgcgaaagagaagcacccgctatgggatcagaggaaggaatgagagcggttagcacaggtgattgcggacaggtgttaagggggggggtcattcagagtacgcgcagaagacggagggcatctcaggaggctaatcttctgaccctggctcaaaaggctgtggagctcgcttccctgcagaatgccaaggatggcagcggaagcgaagagaagagaaaatctgtccttgcttccactactaagtgtggagtggaattttccgagcccagtttggcaacaaagcgggcccgcgaggattcagggatggttcccttgattattccagtgagcgtccccgtcaggacggttgaccccaccgaggctgcccaggctggcggcttggacgaggacggtaaagggccagaacagaaccccgccgagcacaaaccttcagtcatcgtgacccgacggcgttccactcgcatccccgggacagacgcgcaggcccaggccgaggacatgaacgtcaagctggaaggggagcccagcgtgcgaaagccaaagcagcgcccccggcccgagcccctgatcattccaaccaaggcgggcacgtttattgccccacctgtgtattccaatattacaccataccagtcccatctgagaagtcccgtgaggctggccgatcacccgagcgaaagaagtttcgagctgccgccttacacccccccccctatcctctcacccgttcgcgaggggtccggtctatatttcaatgccataattagcacaagtaccatcccagctccacctccaatcactcctaagagcgcacatcgcaccctcctgcgcacaaactcagccgaagtaacaccgcctgtactctctgtgatgggagaagcaactcccgtgtctatcgaaccccggattaatgtgggttcgagattccaggctgaaatccctctcatgagggatagggctctggctgcggccgatcctcacaaagccgatctggtgtggcagccatgggaagatctcgaatcctccagggaaaagcagcgacaggtcgaggatctgctcactgccgcatgctcaagcatatttcctggggctggcacaaaccaggaattagcacttcactgcttacatgaaagccgtggcgatatccttgagaccctgaacaaactgctgctcaagaaaccgcttcgccctcacaaccatcccttagctacatatcactacacaggaagtgaccagtggaagatggccgagcgtaagctgttcaacaagggtatagccatctacaaaaaagatttcttcctcgtgcagaagttgatccagaccaaaaccgtggcacaatgtgtggagttttactatacctacaaaaagcaggtgaagataggtaggaacggcactcttacttttggtgacgtggatacaagtgacgaaaaatccgcacaggaggaggtggaagtcgacatcaaaacgtcgcagaagtttccccgcgtacccctgccccgtagagagtcaccttctgaggaaagactggagccaaagcgagaagtgaaagaaccccggaaggagggcgaggaggaagtccccgagatccaggaaaaagaggagcaggaagagggccgtgagcggtccagacgggctgccgcggttaaagccacccagacattgcaggccaacgagtctgcctccgacatactgatccttagaagtcacgagagcaatgctccgggaagcgccggcggacaagcctctgagaaaccccgagaaggcactggtaagagcagaagagctttgccattttccgaaaagaaaaaaaaaacagaaacctttagtaagacacaaaaccaagaaaacacttttccatgcaagaagtgtggcagatag

SEQ ID NO: 258310 - DNA, 3060 bp, Artificial Sequence
  derived and/or modified sequence
atgaatctgcaagcccagcctaaggcgcagaacaagaggaagcgctgtctgtttggagggcaggagcctgctcccaaagagcagccacctcctctccagcctccccagcagagtattcgggtgaaagaagagcagtatctggggcacgagggacccgggggggcggtttccaccagccagcctgtagagctgccacccccatcttcattggctctgcttaactctgtagtctacgggccagaaaggacttccgccgccatgctctcccagcaagtggcatctgtgaagtggccgaattctgtaatggctcctggccgcggccccgagcgaggagggggcgggggagtttcggacagctcgtggcagcaacagccgggccagccccctcctcacagcacttggaactgccacagtctgtcgctctattcggcaaccaaaggtagccctcacccaggcgtcggggtgccaacatattacaaccacccagaggccctgaagagggaaaaagcgggaggtcctcagctagatcggtacgtgcgacccatgatgccacagaaagtgcagctggaggttgggcggccacaagccccactgaactctttccatgcagctaaaaagcccccgaatcagtcactgccattgcagccctttcaacttgcgtttggccaccaagtgaatcggcaggtttttagacaggggcccccaccccccaatcccgtggctgcttttcctcctcagaagcaacagcagcaacaacagcctcagcagcaacagcagcagcagcaagctgcccttcctcagatgccattatttgaaaatttctactccatgcctcagcagccttcacaacagccgcaggacttcgggcttcagcccgcaggcccgctaggacagtctcacctggcgcaccattcaatggccccttatccttttccccccaaccctgatatgaacccggaactgagaaaggccttgctacaggacagcgctccacagccagctctaccccaagtgcagatcccatttcctagacgctcccgcagacttagcaaagaaggtatactgccaccaagtgccttagatggtgctggcactcagccaggacaggaagccacggggaacctgtttttgcatcactggccactgcaacaacctcctcctggatccttgggacaacctcacccagaggccctgggcttcccccttgagttgcgtgagtcacaactgttgccggatggagaacggttagcacccaacgggcgggagcgtgaagcccccgctatgggttctgaggaaggcatgcgcgccgtttcaacaggtgattgtggtcaggtgctgcgcggaggcgtcattcagtcaacacgtcgaaggcgacgtgcttctcaggaagccaatctcctgaccctggctcagaaagctgtggagttagcctctctccaaaatgcaaaggatggttccgggtcagaggagaagcggaaaagcgtgctagccagtacgaccaagtgcggcgtcgagtttagcgagcctagcctggcaacgaaaagagcaagggaggatagtggtatggtgcccctgattataccggtcagcgttcccgtaaggactgtggaccccaccgaggctgcacaagccggtggcctggacgaagacggcaaaggccctgagcaaaacccagccgagcacaagccatccgtgattgtgacacgtcgtcgcagcactagaattcctgggactgatgctcaggcccaagccgaagatatgaatgttaagcttgagggggagccatccgtgcggaagccaaagcagaggccaaggccagagcccctgatcatccctacgaaggcgggcacctttatagccccccccgtgtactcgaatatcacaccttatcagtcccatctgaggagtccggtgcgactggcagaccatccaagcgaaagatcctttgagctgcccccctacacccccccacccattctcagcccagttcgggagggatcgggcctttatttcaacgccattattagcaccagcaccattccagctcctcctcctattacacccaagtcagcccataggactttactacgtacgaattccgctgaggtgactcctcccgtgttaagcgtgatgggcgaggcgacccccgtctcaatcgagcctagaattaatgtgggctccagatttcaggccgaaatccccttgatgcgagaccgggccttggcagcagcagacccccacaaggctgaccttgtgtggcagccctgggaagaccttgagtcatcccgtgagaagcagcgccaagtcgaggatttactgactgcagcctgtagttctatcttccctggggccggcacaaaccaggaacttgctctgcattgtttacacgagtccaggggggacatcctggagactctgaacaagctgttgctgaaaaagccactgcgccctcataaccaccccctggctacataccactacacaggtagcgatcagtggaagatggctgaacgaaaactgtttaataaggggattgccatttacaagaaagatttcttcttggtacagaagttaattcagaccaagacagtcgcgcaatgtgtcgaattttactatacctataagaagcaggtcaaaattgggaggaacggcaccctcacttttggggacgtagatacttccgatgagaaaagcgcccaggaggaagttgaggttgacatcaaaacatcccaaaaattcccaagggtaccgctgcctcggagagaaagtccaagtgaggaacggttggagccaaagagggaggtcaaagaacccagaaaagaaggcgaggaagaggtgccagaaattcaggagaaggaagaacaggaggaagggagggagagatccaggcgagctgccgccgtgaaggccacccaaactctgcaagcaaatgagtctgcatcagatattttgattctgcgcagtcatgaatctaacgctcctggttctgccggcggccaagcaagcgaaaaacctcgggagggcaccggtaaatccaggagagcattgccgttttcatag

SEQ ID NO: 258311 - DNA, 3138 bp, Artificial Sequence
  derived and/or modified sequence
atgaacctgcaggcccagcccaaggcccagaacaagaggaagcgctgcctgtttggaggccaggagcccgcccccaaggagcagcccccacccctgcagcccccccagcagagcatccgggtgaaggaggagcagtacctgggccacgagggccctgggggcgctgtgtccaccagccagcctgtggagctgcccccacccagcagcctggccctgctgaacagcgtggtgtatggccctgagaggaccagcgctgccatgctgagccagcaggtggcctctgtgaagtggcccaacagcgtgatggcccctggccggggccctgagcggggcggcggcggcggcgtgtctgacagctcctggcagcagcagcccggccagcccccaccccacagcacctggaactgccacagcctgagcctgtacagcgccaccaagggcagcccccaccctggggtgggcgtgcccacctactacaaccaccctgaggccctgaagcgggagaaggccggcggcccccagctggaccgctacgtgcggcccatgatgccccagaaggtgcagctggaggtgggccggccccaggcccccctgaacagcttccacgccgccaagaagccacccaaccagagcctgcccctgcagcccttccagctggccttcggccaccaggtgaaccggcaggtgttccggcagggccccccaccacccaaccctgtggccgccttccccccccagaagcagcagcagcagcagcagccccagcagcagcagcagcagcagcaggccgccctgccccagatgcccctgtttgagaacttctacagcatgccccagcagcccagccagcagccccaggactttggcctgcagcctgctggccccctgggccagagccacctggcccaccacagcatggccccctaccccttcccccccaacccagacatgaaccctgagctgaggaaggccctgctgcaggacagcgccccccagcctgccctgccccaggtgcagatccccttcccccggcgcagccggcggctgagcaaggagggcatcctgccccccagcgccctggatggagctggcacccagcccggccaggaggccaccggcaacctcttcctgcaccactggcccctgcagcagcccccacctggcagcctgggccagccccaccctgaggccctgggcttccccctggagctgcgggagagccagctgctgcctgatggagagcggctggccccaaatggccgggagcgggaggccccagccatgggcagcgaggagggcatgagagctgtgtccactggagactgtggccaggtgctgcggggcggcgtcatccagagcaccaggagaagaagaagagccagccaggaggccaacctgctgaccctggcccagaaggctgtggagctggccagcctgcagaatgccaaggatggcagcggcagcgaggagaagaggaagtctgtgctggccagcaccaccaagtgtggggtggagttcagcgagcccagcctggccaccaagagggcccgggaggacagcggcatggtgcccctcatcatccctgtgtctgtgcctgtgaggacagtggaccccacagaagctgcccaggccggcggcctggatgaagatggcaagggccctgagcagaacccagctgagcacaagcccagcgtcatcgtgacccggcggcgcagcacccgcatccctggaacagatgcccaggcccaggccgaggacatgaatgtgaagctggagggggagcccagcgtgaggaagcccaagcagaggcccaggcctgagcccctcatcatccccaccaaggccggcaccttcatcgcccctcctgtgtacagcaacatcaccccctaccagagccacctgcggagccctgtgcggctggccgaccaccccagcgagaggagctttgagctgcccccctacaccccaccacccatcctgagccctgtgcgggagggcagcggcctgtacttcaatgccatcatcagcaccagcaccatcccagcccccccacccatcacccccaagagcgcccacaggaccctgctgcggaccaacagcgctgaggtgaccccacctgtgctgtctgtgatgggagaggccacccctgtgtccattgagccccgcatcaacgtgggcagccgcttccaggccgagatccccctgatgagggaccgggccctggccgctgctgacccccacaaggctgacctggtgtggcagccctgggaggacctggagagcagccgggagaagcagaggcaggtggaggacctgctgacagctgcctgcagcagcatcttccctggggccggcaccaaccaggagctggccctgcactgcctgcacgagagcagaggagacatcctggagaccctgaacaagctgctgctgaagaagcccctgcggccccacaaccaccccctggccacctaccactacacaggcagtgaccagtggaagatggccgagaggaagctgttcaacaagggcatcgccatctacaagaaggacttcttcctggtgcagaagctgatccagaccaagacagtggcccagtgtgtggagttctactacacctacaagaagcaggtgaagattggaagaaatggcaccctgacctttggagatgtggacaccagtgatgagaagagcgcccaggaggaggtggaggtggacatcaagaccagccagaagttcccccgggtgcccctgccccggcgggagagccccagcgaggagcggctggagcccaagcgggaggtgaaggagcccaggaaggagggggaggaggaggtgcctgagatccaggagaaggaggagcaggaggagggccgggagaggagcagaagagctgctgctgtgaaggccacccagaccctgcaggccaatgaaagtgccagtgacatcctgatcctgcggagccatgagagcaatgcccctggcagcgctgggggccaggccagcgagaagccccgggagggcaccgggaagagcagaagagccctgcccttcagcgagaagaagaagaagacagagaccttcagcaagacccagaaccaggagaacaccttcccctgcaagaagtgtggccgctag

SEQ ID NO: 258312 - DNA, 3060 bp, Artificial Sequence
  derived and/or modified sequence
atgaacctgcaggcccagcccaaggcccagaacaagaggaagcgctgcctgtttggaggccaggagcccgcccccaaggagcagcccccacccctgcagcccccccagcagagcatccgggtgaaggaggagcagtacctgggccacgagggccctgggggcgctgtgtccaccagccagcctgtggagctgcccccacccagcagcctggccctgctgaacagcgtggtgtatggccctgagaggaccagcgctgccatgctgagccagcaggtggcctctgtgaagtggcccaacagcgtgatggcccctggccggggccctgagcggggcggcggcggcggcgtgtctgacagctcctggcagcagcagcccggccagcccccaccccacagcacctggaactgccacagcctgagcctgtacagcgccaccaagggcagcccccaccctggggtgggcgtgcccacctactacaaccaccctgaggccctgaagcgggagaaggccggcggcccccagctggaccgctacgtgcggcccatgatgccccagaaggtgcagctggaggtgggccggccccaggcccccctgaacagcttccacgccgccaagaagccacccaaccagagcctgcccctgcagcccttccagctggccttcggccaccaggtgaaccggcaggtgttccggcagggccccccaccacccaaccctgtggccgccttccccccccagaagcagcagcagcagcagcagccccagcagcagcagcagcagcagcaggccgccctgccccagatgcccctgtttgagaacttctacagcatgccccagcagcccagccagcagccccaggactttggcctgcagcctgctggccccctgggccagagccacctggcccaccacagcatggccccctaccccttcccccccaacccagacatgaaccctgagctgaggaaggccctgctgcaggacagcgccccccagcctgccctgccccaggtgcagatccccttcccccggcgcagccggcggctgagcaaggagggcatcctgccccccagcgccctggatggagctggcacccagcccggccaggaggccaccggcaacctcttcctgcaccactggcccctgcagcagcccccacctggcagcctgggccagccccaccctgaggccctgggcttccccctggagctgcgggagagccagctgctgcctgatggagagcggctggccccaaatggccgggagcgggaggccccagccatgggcagcgaggagggcatgagagctgtgtccactggagactgtggccaggtgctgcggggcggcgtcatccagagcaccaggagaagaagaagagccagccaggaggccaacctgctgaccctggcccagaaggctgtggagctggccagcctgcagaatgccaaggatggcagcggcagcgaggagaagaggaagtctgtgctggccagcaccaccaagtgtggggtggagttcagcgagcccagcctggccaccaagagggcccgggaggacagcggcatggtgcccctcatcatccctgtgtctgtgcctgtgaggacagtggaccccacagaagctgcccaggccggcggcctggatgaagatggcaagggccctgagcagaacccagctgagcacaagcccagcgtcatcgtgacccggcggcgcagcacccgcatccctggaacagatgcccaggcccaggccgaggacatgaatgtgaagctggagggggagcccagcgtgaggaagcccaagcagaggcccaggcctgagcccctcatcatccccaccaaggccggcaccttcatcgcccctcctgtgtacagcaacatcaccccctaccagagccacctgcggagccctgtgcggctggccgaccaccccagcgagaggagctttgagctgcccccctacaccccaccacccatcctgagccctgtgcgggagggcagcggcctgtacttcaatgccatcatcagcaccagcaccatcccagcccccccacccatcacccccaagagcgcccacaggaccctgctgcggaccaacagcgctgaggtgaccccacctgtgctgtctgtgatgggagaggccacccctgtgtccattgagccccgcatcaacgtgggcagccgcttccaggccgagatccccctgatgagggaccgggccctggccgctgctgacccccacaaggctgacctggtgtggcagccctgggaggacctggagagcagccgggagaagcagaggcaggtggaggacctgctgacagctgcctgcagcagcatcttccctggggccggcaccaaccaggagctggccctgcactgcctgcacgagagcagaggagacatcctggagaccctgaacaagctgctgctgaagaagcccctgcggccccacaaccaccccctggccacctaccactacacaggcagtgaccagtggaagatggccgagaggaagctgttcaacaagggcatcgccatctacaagaaggacttcttcctggtgcagaagctgatccagaccaagacagtggcccagtgtgtggagttctactacacctacaagaagcaggtgaagattggaagaaatggcaccctgacctttggagatgtggacaccagtgatgagaagagcgcccaggaggaggtggaggtggacatcaagaccagccagaagttcccccgggtgcccctgccccggcgggagagccccagcgaggagcggctggagcccaagcgggaggtgaaggagcccaggaaggagggggaggaggaggtgcctgagatccaggagaaggaggagcaggaggagggccgggagaggagcagaagagctgctgctgtgaaggccacccagaccctgcaggccaatgaaagtgccagtgacatcctgatcctgcggagccatgagagcaatgcccctggcagcgctgggggccaggccagcgagaagccccgggagggcaccgggaagagcagaagagccctgcccttctcctag

SEQ ID NO: 258313 - DNA, 3138 bp, Artificial Sequence
  derived and/or modified sequence
atgaacctgcaggcccagcccaaggcccagaacaagcggaagcggtgcttgtttggcggccaggagccagctcccaaggagcaaccccccccattacagccaccccagcagagcatccgcgtcaaggaggagcagtatctcggccatgaaggacctggaggtgcggtgagcacgtcccagcccgtagagttgccaccaccatcttcgctggctctactaaactctgtcgtgtatggaccagagcggacatctgccgctatgctctcacagcaagttgctagtgtgaaatggccaaatagcgtgatggcaccaggcagagggccggagaggggcgggggcggcggcgtcagtgacagctcctggcaacagcaacccggccaacctccccctcactctacttggaactgtcactcactgagcctttactcagccaccaaaggctctcctcatcccggagttggagtgcccacatactacaatcatccggaggccctcaaaagggagaaggccggcggaccacagcttgataggtatgtacggcccatgatgccgcagaaagtccaattggaggtgggtcgtccacaggccccactgaactctttccatgccgcaaagaagcctcctaaccagtcgctgcctctgcagccttttcagctcgccttcgggcaccaggtgaaccgacaggtgtttcgccaggggccccctccccctaaccctgtggcggccttcccaccccagaaacaacagcagcagcagcagccccagcagcagcagcagcaacagcaggcggccttgccccagatgcctctgttcgaaaatttctactccatgccacagcaaccgtctcagcaacctcaggacttcggacttcagcctgccggtcctctcggacaaagccacctggctcaccactcaatggcgccctaccccttcccacctaaccctgatatgaaccctgagcttcgcaaggcgctcctgcaggattcagcccctcagcctgcccttccccaggttcaaattcccttcccgcgtcgttctcgccgtctctccaaggaaggtatcctgccaccttccgcactggacggagcaggaacccagccaggtcaagaagcaaccggcaacttgtttttgcatcattggccgctgcaacagcctcccccgggctccctggggcagccccaccctgaggctttaggattcccacttgagctcagggaaagtcagctgcttcctgatggagaacgccttgctcccaacggccgtgagcgggaggcacccgccatgggcagcgaggagggtatgcgcgctgtctcaacgggtgattgcggtcaggtgctgaggggcggggtgattcaatctactcgaaggaggaggagagcctcccaggaagccaacctattaacactcgcacagaaggccgtcgagctggcctctctacagaacgctaaagacggtagtggatcagaagagaaacgtaaatccgtgcttgcttcgacaacgaaatgtggtgtggaattttccgagccctcacttgctaccaagagggcaagagaagactctggaatggtcccactcattatccctgtgtccgtgccagtgagaaccgtagatcctacggaggcagctcaggccggtggtctagatgaagacggcaaaggacccgaacagaatccggctgagcacaagccctccgttattgtgaccagaagacggtccacccggattcctgggactgatgcccaggcccaggccgaggatatgaacgtgaagctcgaaggagagccaagcgttcgcaaacctaagcagcgaccccggccagaacccctgataatacctacaaaagccggtacattcatagccccccccgtttattcaaacattactccttatcagtcccatctgaggagccccgtgcgactagccgaccacccgtctgaaagaagtttcgaacttcccccctatactccgccaccaattttatcccccgtgcgcgagggatccggactatactttaacgctatcatttctacgagtactatcccagcacctccccccataacacccaagagtgcccaccggactctgctgcgcacgaattccgccgaggtgactccccccgtgctttccgtgatgggcgaggctacacccgtctctatcgaacctaggatcaacgtggggtccaggtttcaggctgaaatcccactgatgagagaccgagccctcgctgccgcagatccccataaagctgatttggtctggcaaccatgggaggatctggaaagttctagagaaaaacaaaggcaggtggaggatctactgaccgctgcttgttcctcaattttcccaggcgctggtaccaaccaggagttggcacttcattgcctgcatgagagcaggggtgatatcttagagacactcaataagcttttactgaaaaaacctctgagaccccataaccaccccctggccacctaccactacactggatcagaccagtggaaaatggcagaacgcaagctgttcaacaaaggaatcgctatctataaaaaagatttctttctcgttcagaagctgatccagacaaaaactgtcgcccagtgtgtagaattctattacacttataagaaacaggtgaaaattggcaggaatgggacgctcactttcggagacgtcgacactagcgatgagaagagtgcgcaggaggaggtcgaggttgatatcaagactagtcaaaagtttcctagagttccccttcccaggagagagagtccctcagaggagcgactggaacctaagcgagaggtcaaggagccgcggaaggaaggagaagaggaggtgcccgagatccaagagaaggaggaacaggaagaggggcgggaaagatccaggagggcggccgccgtgaaagccacccaaacactccaggccaacgaaagtgcttccgatatccttatccttcgctcccatgaatcaaacgcccctgggtccgccggcggccaggcctccgagaaaccaagagaaggtaccggaaagtctcggcgggccctccccttctcagagaagaaaaagaaaacagaaacatttagtaagacccaaaaccaagagaacactttcccctgcaagaagtgtggaagatag

SEQ ID NO: 258314 - DNA, 3138 bp, Artificial Sequence
  derived and/or modified sequence
atgaacctgcaggcccagcccaaggcccagaacaagcggaagcggtgtttgttcggcggacaagagccagcgcctaaggaacagccccctcccctgcagcctccccagcagagcatccgagtcaaggaggaacaatatctgggtcacgagggcccaggaggggctgtgagcacaagccaacctgtcgaactgccccctccatcatctcttgcactgcttaatagcgtggtttacgggcccgaaaggaccagcgcagccatgctttcacagcaggtcgcatctgtaaaatggccaaattcagtgatggcccccggcagaggaccagagcgtggtggaggcggcggtgtctcagactcctcatggcagcagcaaccaggacaaccaccaccacacagcacgtggaactgccactctctgagcttgtattccgctaccaagggtagtccccacccaggcgtaggagtgcccacatattacaaccatcctgaggccctcaagagggagaaggccggagggcctcagctggacagatacgtgagacccatgatgccccagaaggtgcagctggaggtgggtaggcctcaggcgccactgaacagcttccatgctgcaaagaaaccaccgaatcagtctctccctctgcagccctttcaactcgctttcggccaccaggtgaaccggcaagtgtttcggcagggtcctccccctccaaacccagtggccgcctttcctccacagaaacagcagcaacagcaacagccacagcaacagcagcagcagcagcaggccgcacttccacaaatgcccctgttcgagaacttctactcaatgccccagcagcccagtcagcagccacaggacttcggtctccagcctgctgggcctttaggccaaagccatctcgcccatcacagcatggctccctacccgtttcccccaaacccagacatgaaccccgaacttcgcaaggctctccttcaggattcagccccacaacctgccctgcctcaggttcagatcccttttccgaggcgtagtcggcgactcagcaaggaaggaattctgccaccgtcagcactggacggggctggaacacagccggggcaggaggctaccggaaatctatttctgcatcattggccactgcaacagcccccacccggttccctgggccagcctcacccagaggccttagggttcccactcgagcttcgcgagtcccagctgctgccagacggggagcggctagcgcccaatgggagagagagagaagccccagctatgggttccgaggaggggatgagagccgtttcaacaggcgattgcggccaggtgctcaggggcggagtcatacaaagcactaggcgccgcagaagggcctcacaggaagcgaatcttttgacactagcgcagaaggccgtggaacttgctagcttacagaatgccaaggacgggtccgggagcgaggaaaagagaaagagtgtgctggcttcaaccaccaaatgcggtgtggaattcagcgagccgtcacttgccactaagcgcgctcgggaggatagcggcatggttcctctcatcattcctgtgagtgtcccagtccggactgtggatcctactgaggcagctcaggctggcggacttgacgaagacggcaaggggcctgaacagaatccagccgaacataaaccctcagtgatcgttacgcgccggagatccacaagaattccagggaccgatgcccaggcccaagccgaggatatgaatgtgaaactcgaaggcgagcctagcgtgcggaagccgaagcagagaccacggccggagcccttgatcatacccactaaggcgggaacgttcattgccccaccggtgtactctaatatcacaccgtaccagtcacatttgcggtcgcctgtgcggctggctgaccatccttctgagcgttcttttgagctgccaccttatacacccccacccattttatccccagtcagggaaggaagcgggctctactttaatgctataatctcaacgtctaccattcctgctccacctccaattactcccaagtctgctcacagaacactcctgagaacaaatagcgcggaggtgactccccctgtgctgtccgttatgggagaggcaacaccagttagtatagaaccgagaattaacgtgggatccaggtttcaggccgaaatccctttaatgcgggatcgtgcactggccgcggccgatcctcacaaagccgatcttgtttggcagccctgggaggacctggaatcaagcagagaaaagcaacggcaggttgaggacctgcttaccgctgcctgctccagtatcttcccaggcgccggaaccaaccaggaattagcgctacactgcctccatgagagtcgaggagatatcttggagacattgaacaagctgcttctgaagaaacctctgcgtcctcataatcacccactggccacataccactacaccgggagtgatcagtggaagatggctgaaagaaagctttttaataagggaatcgccatctataagaaagatttcttccttgtgcagaagttgatccagactaagactgtggcccagtgtgtggaattctattatacgtacaaaaaacaggtcaagatcggccgaaacggcacactgacatttggagatgtggatacgagcgatgagaaaagcgctcaggaagaggtggaagtcgacatcaaaaccagccaaaaattccctcgggtacctttacctagacgggaatcaccatcagaagaaaggctggagcctaagagggaggtgaaagagcccagaaaagagggagaagaggaggtgcccgagatccaagaaaaagaagaacaagaagaaggccgggaacggtcccgccgtgctgcggctgtgaaggctacgcagaccctgcaggctaacgaatctgcatcggatatactgattttgaggagccacgagtcgaacgccccgggtagcgctggtggacaagcatccgaaaagcccagggagggcaccggcaagtctagaagggcacttcccttttccgaaaagaaaaaaaaaaccgagaccttctccaaaactcagaaccaggaaaatactttcccctgcaaaaaatgcgggcgatag

SEQ ID NO: 258315 - DNA, 3138 bp, Artificial Sequence
  derived and/or modified sequence
atgaacctgcaggcccagcccaaggcccagaacaagcggaagcggtgcctgttcgggggtcaggaaccagctccaaaggaacaaccacctccccttcagccacctcagcaaagtattagagtgaaggaggagcagtacctcgggcacgagggacccggaggggccgtgtccacttcacagcctgtcgagcttccaccaccgagctctctcgcccttttgaatagcgtagtgtacgggccagaacgtacaagcgcagccatgctgtcccagcaggtggctagcgttaaatggcctaacagcgtcatggcgccagggaggggacctgaaagaggcggcggcggtggtgtgtccgactcaagctggcagcagcagcctggacaacccccgccacactccacatggaactgccactcactgagcctgtactccgccaccaaggggtcgcctcatcccggggttggagtccctacatactacaaccacccagaagccctcaagagggaaaaggcgggtggcccgcagttggataggtacgtcaggccaatgatgccgcagaaagtacagctggaggtgggccgtccacaggcaccactaaacagctttcacgccgcaaagaagccacctaatcaatccttgccgctgcagcctttccagcttgcatttgggcaccaggtgaatagacaggtgtttcgtcaaggaccccctccgcccaacccagttgcagcctttccaccacagaagcaacaacagcaacaacagccacagcagcagcagcagcagcagcaggccgcgctcccacagatgcccctgttcgaaaacttctactctatgccgcagcagcccagtcagcaaccacaagactttggccttcagccagccggaccacttggacagtcgcatctcgcccaccattctatggctccatacccatttccaccaaatcctgatatgaaccctgaactgcgaaaggccttgctccaggattcagccccccagccagcattaccacaggtacagattcctttcccccggcggtccaggagattgagcaaggagggcatcttaccacctagcgcactggatggggctgggactcagccaggacaggaggccacgggcaatttgtttctacaccactggccattgcagcagcccccccctggctctcttgggcagccacaccccgaggccctgggttttcccttagagctgcgcgagagtcagttattacccgatggcgaacggttggccccgaacggaagagagcgggaggcgcctgcaatgggctcagaggaaggaatgagagccgtttccacgggagattgcggtcaggttttgcggggcggggtgatccaatccacccggcgtaggagacgagcctctcaagaggcaaatcttttgacactcgcacagaaggccgtcgaactggcctccctacagaacgccaaggatggatcaggtagcgaagaaaaacgcaaaagcgtgttagccagcactactaaatgcggggtggagttttccgagcccagcctcgcaacaaaacgcgccagggaggacagcggcatggtgcctcttatcattcctgtatctgttccagttcggaccgttgacccaacagaggcggcccaagccggaggcctggatgaggacggcaagggccccgagcagaatcctgctgaacacaagccatctgtcattgtgactaggcgtaggtccactcgcattccaggcaccgacgctcaagctcaggctgaggacatgaatgtgaaactagaaggtgaaccctccgtgcgcaaaccgaagcagaggcctcggcccgaacccttgataatccccacaaaggccggaacctttatagcacctccagtctacagcaacattacaccataccagtcacatttgagatcacctgtgcgccttgccgatcacccatctgaacggagtttcgaactgcccccttacacacccccccctatcctttcccccgtcagagaaggctcagggctctactttaatgcgattatttctactagtacgatcccagcaccccctccaataacacctaagtccgctcatcgcaccctgctccggactaactccgccgaagtgaccccacccgttctgtctgtgatgggggaggcaactcccgttagtatcgagcctagaattaacgtgggcagccggttccaggccgagatccccttaatgagagatagggctctcgctgccgctgacccacacaaggctgatttggtgtggcagccctgggaggatcttgaaagtagcagagagaaacagcgtcaggtggaggacttgcttacggctgcctgcagttccattttcccaggtgccggtacaaaccaggaactggcattacattgcttgcacgagtcaagaggtgatatcctcgagactctcaacaagcttctgttgaagaaacccctgcggccccacaatcatccgctggcaacttatcattacactggttcagatcagtggaagatggcagaacggaagctcttcaataaagggattgcaatctacaaaaaagacttttttctggtgcagaagctgatacaaaccaaaacggtggcccagtgcgtggagttttactatacctataaaaagcaagtgaaaattggccgcaacggaacacttacttttggtgatgtggacactagcgatgaaaagtctgcacaagaagaggtagaggtggatatcaagacttcgcaaaagttcccacgagtcccattgccaaggcgggaaagcccctctgaggaaaggctggaacccaaaagggaagtgaaggagccacgcaaggagggcgaggaggaagtcccagagattcaggaaaaagaggaacaggaagaaggaagagaacgcagtaggagagccgccgctgtgaaggctacgcagacgctccaggccaacgaaagcgcatccgatatactgatcctgcgtagtcacgaaagcaatgctcccgggtctgccggaggccaggctagcgagaagcctcgtgaagggaccggcaagtctcgtcgggcactgcctttctctgagaaaaagaaaaagacagagaccttctccaagacccagaaccaagagaatacgtttccatgcaaaaagtgtggccgttag

SEQ ID NO: 258316 - DNA, 3060 bp, Artificial Sequence
  derived and/or modified sequence
atgaacctgcaggcccagcccaaggcccagaacaagcggaagcggtgcctatttgggggtcaagagccagccccaaaggagcaacctccccctctccagccacctcagcaaagcatcagggtgaaagaggagcagtacctgggccacgagggccccgggggagcagtgtcaacctctcagcctgtggagctgcccccgccctcttcactagctctattgaactccgtcgtgtatgggcccgaacgtacgagcgcagccatgctgtctcaacaggtggcgagcgtcaagtggccaaacagtgtgatggcccccggtaggggaccagagcgtggagggggtggcggagtatcagactccagctggcagcagcagccagggcagccccctcctcattctacttggaactgtcacagtctctccttatacagtgccaccaagggctcgccacaccccggcgttggcgtgcccacatactataaccatccagaagctctcaaacgagaaaaagcggggggccctcagctggacagatacgtccgccccatgatgcctcaaaaagttcagctggaggtcggccgccctcaggctcccctcaacagctttcatgccgctaagaagcctccaaaccaatcactgcctctgcagcccttccaactcgcattcgggcatcaggtgaaccgccaggttttccgacaaggtcctccccctccaaatcccgtggccgcctttccacctcaaaagcaacagcaacagcagcagccccaacagcagcagcagcagcagcaagccgccctgcctcagatgcctctttttgagaatttctatagcatgccccagcaaccttcccagcagccccaggacttcggacttcaacctgcggggccgctgggtcagagccacctcgcccaccatagtatggccccctacccgttcccccctaacccggatatgaatcctgagttgaggaaggctcttttgcaggacagtgccccccagcccgcactgccccaagtccagattcccttccccagaagaagccggcgcctttccaaggagggaattctccctccatccgccctggacggagctgggactcaaccaggccaggaggccacaggcaatctattcttacatcactggcccctgcagcagcccccgcctggctccctgggtcaaccacacccagaggctctagggtttcccctggaacttcgggagagtcagttacttcctgacggcgagcgcctggcccccaatgggcgcgagcgtgaggcccccgctatgggttctgaagagggaatgagggccgtgagcaccggtgattgcggacaggtcttacgtggcggcgtaatacagtccactaggcgtcggcggcgggcctctcaggaagccaatctgcttaccttggcacagaaggccgtggaactagccagcctgcagaacgcaaaagacgggtctggaagtgaggagaaacgcaagtccgtattagcttccaccactaaatgcggtgtagagttctccgaaccgtctttggctacaaagagagcgcgggaggatagtggcatggtaccactgataatcccagtgtccgtcccagtgcggaccgttgacccaaccgaggctgcacaggcagggggacttgatgaggatgggaagggcccagagcagaacccagccgaacacaaaccctccgtgatagtaacgcgtcgacgcagcaccaggatcccaggcactgatgcccaggctcaggctgaggatatgaatgttaagttggagggggagcccagtgtgcgtaagccgaagcagcgccctcggcctgagccgctcataatccctaccaaggcaggaacctttatcgccccccccgtttacagtaatataacaccataccaatcccaccttaggtctccagtgcgtcttgcagatcacccgagtgagcgatccttcgaacttcctccttacactccgccccctatcctctcaccagttcgggaaggtagcggactctacttcaacgccatcatttcaacttctacgattccggcacccccccctatcactcctaaatctgcccatagaaccctcctgaggaccaattctgcagaggtgacaccacctgtgctatccgtaatgggcgaagccaccccagtatccattgagccgcgtattaacgtggggagccgattccaggctgagataccactgatgagggatcgggccctggcagcagcagaccctcacaaagctgatctcgtatggcagccctgggaggacttggagtcgagccgcgaaaaacagaggcaggtggaggacttacttacagccgcctgttcctctatctttccgggcgctgggactaaccaggaactggccctccactgcctccacgaaagtaggggagacattcttgaaacactgaacaagctgttgctgaaaaagcccttacggccacacaaccaccctcttgctacctaccactacacagggagtgaccagtggaagatggcagaaagaaagttgttcaataaaggaatagcaatttacaaaaaagacttctttctggtccagaaattaatccagacgaaaaccgtcgcccagtgcgtcgagttctattatacctacaagaagcaggttaaaatcggaaggaacggaacgttaacttttggcgacgtggatactagcgatgaaaagtctgcccaggaggaggtggaagtggatattaaaacttcgcaaaaattccccagagtccccctgcctcggcgcgagtcaccctcagaggaaagactggagcccaagcgcgaggtcaaagagccaaggaaggagggagaggaagaggtacccgaaatccaggagaaggaagaacaggaagaggggcgcgaacgtagccgtcgtgctgctgctgtcaaggccacccagaccctccaagctaacgagagcgcatcagacatcctcattctgagatcccatgagtccaacgcaccgggaagcgctgggggccaggcatcagaaaaaccacgggaaggcacggggaagtcacggagagccctcccattttcttag

SEQ ID NO: 258317 - DNA, 3138 bp, Artificial Sequence
  derived and/or modified sequence
atgaaccttcaggcacagcctaaagcccagaacaaaagaaagaggtgtctgttcgggggacaggaaccagccccaaaggagcagcctcctcctttgcagccccctcagcaaagcataagagtcaaagaggagcagtatctggggcatgaaggtcccggaggcgcagtgagtacaagccaacctgtagaacttccgcctcctagttcgctggccttactaaatagtgtggtgtacggaccagaacggacctctgccgcaatgctctctcaacaagttgcgagtgtcaagtggcctaactctgtaatggctccagggcgaggcccagaacgcggaggcggtggcggtgtttctgatagctcctggcagcagcagcccggtcagccgcctccccattcaacatggaactgccacagtctctcgctctactcagcaactaagggtagtccacatccaggagtgggcgtgcctacgtactataaccacccagaagccctgaaacgggagaaggcagggggtccccagctggaccggtacgtcagacccatgatgcctcagaaagttcagctagaggtagggcgtccacaggctccactgaactcgtttcacgctgcaaaaaagcctcctaatcagtcgctacctcttcagccctttcagctagccttcgggcatcaggtcaatcgacaggtcttcaggcagggaccgccaccccctaacccagtagccgcatttcccccacaaaagcaacagcagcagcagcagccacagcagcaacagcagcaacagcaggctgctctgcctcaaatgccactttttgagaatttctactccatgccacaacagccctcccagcagccgcaagacttcgggctgcagcccgcaggcccattaggccagtctcacttggctcaccacagtatggccccttatccctttcctcctaaccccgatatgaacccggagctgcgtaaggctctcctgcaagactccgcaccccagccagccttaccacaagtgcagattccatttccaaggagaagcaggcgcctttccaaagagggaatactgcctccctcagccctggacggagccggaacccagcctggtcaagaggcgactggcaacctctttctgcaccattggcccttgcagcagcctccgcctggctctttaggtcagcctcaccctgaggcattgggtttcccgctggagctccgagagtcccaattgcttcctgatggtgaacgactggccccaaatggacgggagagagaggcccctgcgatgggaagcgaagagggcatgagagccgtaagcactggtgattgtggccaggtacttcgcggtggtgtcatccagtccacaaggcggaggcgaagggcgtctcaggaagctaacctgctgaccctggctcagaaggcagtggaattggccagtttgcaaaacgccaaggatggatccggttcggaagaaaaacgcaaatctgtgctggctagtactacaaagtgcggcgtggagttctccgagccctcactcgccacgaagcgagcccgtgaggattccgggatggtgcctcttatcatcccagtatctgtgcccgtcaggacagtggacccgactgaggccgcacaggctggaggtctggacgaagacggaaaaggccctgaacagaaccccgcagaacataagcccagcgtgattgtgacccgaagaaggtccactcggatccccggaactgacgcacaggcacaggccgaggacatgaacgtgaagctggagggagaacctagcgtacgcaaacctaagcagcgacccaggcccgaacctttaatcatccccacaaaggcgggtactttcatcgccccacctgtctattccaacatcaccccctatcaatcccatttgcgttctccagtcaggctcgccgatcacccctccgaacggagctttgagttgcctccctacaccccacctccaatactatctcctgtgagagaggggtccggcctctatttcaacgccattatctcaacctccacaattccagcccctccacctattactccaaagagtgcccatagaacgttgttgaggacaaattcggccgaggtgactccacccgtgttgagcgttatgggtgaggccacccccgtgagcatcgagcctcggattaacgtcgggtcgcgttttcaggcagaaattcctctgatgcgggaccgcgcactggccgctgccgacccccacaaggctgacctggtttggcagccgtgggaagatctggaatcctcccgggaaaaacaaagacaggttgaggatctacttaccgccgcttgttcctccatcttcccaggggcaggcactaatcaagagctggccctccattgcctgcatgagagcaggggcgatattctggaaacactcaataagctcctgctcaaaaagccactgaggccacacaatcatcccttggcaacttaccactatacagggagcgatcaatggaaaatggcagagagaaaattgtttaataaaggcattgcaatttacaagaaggattttttcctcgtgcagaagctcattcaaacaaagaccgtagcccagtgcgtcgaattctactatacttacaagaaacaagttaagattgggaggaatggaacactgacgtttggtgacgtggacaccagtgatgaaaaaagcgctcaagaggaagttgaggtggatatcaagacgagccagaaattccccagagtgccccttcccaggagggaatccccctccgaggagagattggagcccaagcgcgaggtgaaagaaccccgaaaagaaggggaggaggaagttccggaaatccaggagaaagaggagcaggaggagggcagagagaggtctcgacgggcagcagctgtcaaagcaacccagacgctgcaagcaaatgagtcagctagcgacatcctgatactgcgcagtcacgaaagcaacgcaccaggaagtgccggtggccaggcttcagaaaagccaagggagggtacgggaaagtctagaagagccctcccattcagcgagaaaaagaaaaaaactgagactttttccaaaacacagaatcaggagaacacctttccttgcaagaaatgtggtcgctag

SEQ ID NO: 258318 - DNA, 3138 bp, Artificial Sequence
  derived and/or modified sequence
atgaacctgcaagcgcagccaaaagcacagaacaagaggaagcgctgtctgttcggagggcaggagcctgcacccaaagaacaaccacccccactccagcctcctcaacagtccatccgtgtgaaagaggaacagtacctaggtcacgagggcccaggaggtgccgtgtccacctctcagccggtcgagttaccgcctccctcatctctcgcactacttaatagcgtggtttacgggcctgaacgaacaagtgccgctatgctgtctcagcaggtggctagcgtgaagtggccaaattcggttatggcccctggacgtggtcctgagcgtggtggaggaggcggtgtaagcgatagctcttggcagcagcagccgggtcagccaccgccacacagtacttggaattgccattctttaagtctatactcggccacgaaagggtcccctcaccccggagtaggagtgccaacttattacaaccacccagaggcgctgaagagggagaaagcagggggaccccagctggatcggtacgtacggcctatgatgcctcagaaagtgcagctcgaagttggtagaccacaggctccgctcaactcgtttcatgcagccaagaagccgccaaaccagagtctgccccttcaacccttccaacttgcttttggtcaccaggttaatcggcaggtgtttcggcaaggacctcccccacccaatcctgtcgcggcatttcccccacagaagcagcagcagcagcagcagccacaacagcagcagcagcagcaacaggctgccctgccacagatgcctctgttcgaaaatttttacagcatgccccagcagccctcccaacagccccaggatttcggtctacaaccggcaggaccactcggccagagccacctcgctcaccactccatggctccttatcctttcccccctaatcccgacatgaatcctgagctgcgcaaagcactgcttcaagatagcgcaccacaacctgctcttccccaggtgcaaatcccttttcccaggaggagtcgccgactgtccaaggaggggatcctgccaccctcagcactggacggagcgggaacacaaccagggcaggaagcgacggggaacctcttcttgcatcattggccgttgcagcaaccaccgccaggctcccttggacaaccccaccccgaagccctggggttcccccttgaactccgggagtctcagctgctccctgatggggagcgcctggcccctaatggtcgggaaagagaagcacctgcgatggggagtgaggaggggatgcgagccgtgtctactggtgactgcgggcaggtcctgagaggcggagttattcaaagcactaggagacggagaagagcctcgcaggaagccaacctgttgacccttgcccagaaagcagttgagctggcttccctgcaaaacgcaaaggatggttctggctccgaagagaaacggaaatccgtgctggcttcaacgacaaaatgtggtgtggaatttagcgagccatccctggccaccaagagggccagagaggacagcggcatggtgcctctcataattcctgtgtcggttccagtaaggaccgtggatcctactgaagcggctcaagctggcggactagacgaagacggcaagggacccgagcagaacccagccgagcacaagcctagcgtaattgtgaccagacggaggtctactcgcatacccggaacagatgcacaagctcaagccgaggatatgaatgtgaaacttgagggagagccctccgttcggaaacctaaacagcggccaagaccagagccattgattattcccaccaaagccggtaccttcattgccccacctgtctactcaaacatcaccccctaccagagtcacctccgcagtcctgtgcgccttgccgaccacccgtccgagagatcttttgaactgcctccatatacaccacccccaattctctcccctgtccgcgagggcagtgggctgtactttaatgccattatttctacatccactattcccgctccaccgccaattacccccaagtcggcacaccgaactctcttgcgcaccaacagtgcagaggtgaccccaccggtcctaagcgtgatgggagaagctacccctgtgtcaatcgagccccgaattaatgtcgggagcaggtttcaggcggagattcccctgatgcgggaccgggcactggccgcagcggatccccacaaggcagacttagtgtggcagccatgggaagatctggaatcttccagagagaagcagcgtcaggtagaagacctcctgactgccgcatgttcttccatatttccaggggcaggcactaatcaggagctggcactccattgtctgcatgagagcagaggcgacattctggaaacacttaacaagcttctgctgaaaaagccacttagaccacataatcaccccctagcgacttaccactacactggcagcgatcagtggaagatggccgaaaggaagctgttcaacaaaggcattgccatttataagaaggatttctttctggttcagaaactcatacaaacaaagaccgttgctcaatgtgtggagttctattacacatacaagaaacaggtcaagatcggccgtaacggaacattgacttttggggatgtcgatacgagcgacgagaaaagcgctcaggaggaggtcgaagtggatatcaagacctcccagaagttccccagagtgccgctgccaaggagagaatctccatcagaagaacggctggagcccaagagagaagtgaaagagccacgtaaggagggtgaagaggaggtgccagagatccaggaaaaagaggaacaggaggaaggacgagaaaggagccgtcgtgcagccgctgttaaggccacccagacactgcaggcgaatgagagcgcatctgatattctcattctgagaagccacgaatccaatgcacccggatctgccggagggcaggcttccgaaaaacctcgggaggggaccggcaaatcacgacgggctcttcccttctctgagaaaaagaaaaagaccgagactttttctaagacccagaatcaggagaacacttttccatgtaagaaatgtggacgctag

SEQ ID NO: 258319 - DNA, 3138 bp, Artificial Sequence
  derived and/or modified sequence
atgaacctgcaggcccagccaaaagcccagaacaaacggaaacgctgcctttttggcggacaggaacccgcaccaaaagagcaaccgcctcccctccaacctccacagcaatctatcagagtgaaggaagaacagtatctgggacacgagggtcccggaggggcagtgagtaccagccagccagtggagctgccacccccatcttcactggctttgctgaactccgttgtctacggccctgaacgcacatctgccgcaatgctgtctcaacaggttgcctcagtgaaatggccaaactctgtgatggctcccggtcgcggacccgaacgcggaggtggcggtggcgtgagtgacagtagctggcagcaacagcccggacagcccccacctcactctacttggaactgtcactccctgtccctgtactccgccacaaagggcagtccacaccctggcgtgggggtaccgacttactacaatcatccagaagcgctgaagcgggagaaagctggcggtcctcagttggatagatacgtccgcccaatgatgcctcagaaagtacagctggaggttgggagaccacaggcccctttgaatagcttccacgctgcgaagaaaccccctaaccagtctctgcctctgcaaccatttcagctggccttcggacaccaggtgaatcgacaggtgttcagacagggtccaccaccgcctaacccagtggcagccttccctccacagaaacagcaacagcagcagcagcctcagcagcagcagcagcagcagcaggcggctctgcctcagatgcctctgttcgaaaacttttatagcatgccacagcagccttcgcagcagccacaggatttcggcctccagcccgctggcccactggggcaatcccatctggcccatcactccatggccccatatccatttccgcctaaccctgacatgaaccctgagctccggaaagccttattgcaggactcagctccgcagcctgctctcccccaggtacagatcccatttccacgacgatcgcgcagactgtccaaagaagggatcctacccccttcggctcttgacggcgcaggcacccagcccggacaggaagccaccggaaatttattcctgcaccactggcccttgcaacagcctccaccaggttcgctgggacaaccccaccctgaggcactcggattccccctcgagctgcgagagtcccagctcctccccgatggcgagaggttggccccaaacggacgcgagcgggaagcaccagccatggggtctgaggagggcatgagggctgtttccacaggcgactgcggacaggtcctgcgtggcggtgtgattcaaagcacaaggagacggagacgagcctcccaggaggccaaccttttgactctggcacagaaagctgtagaactggcctcactccagaacgctaaggacggctctgggtccgaggaaaagaggaagtctgtactcgcatccacgacgaagtgtggggtggagtttagcgaaccctctcttgctactaagagagcacgggaagactctggaatggtccctctgatcatccctgtgtcggtgccagtaaggacagtggatccgacagaagccgcacaggctgggggactcgacgaagatggcaagggccctgaacagaatcccgcagaacacaagcctagcgtaatcgtgaccagacggcgaagcacacgcataccaggtactgacgctcaagcccaagccgaggatatgaatgtgaagcttgagggagagccaagcgtaaggaagccaaagcaacgccctagaccggagcccttgatcatcccgactaaggctggcacatttatcgctccccctgtgtactccaacatcactccataccagtctcacttgaggtcccccgtcagacttgccgatcatcccagcgagagatcattcgagctccccccttatactcccccacccattctctcccccgtgagggagggcagtggcttgtattttaacgccattatatctacatcaactatccctgcgccacccccaatcacaccaaaatctgcccaccggaccctcctgagaaccaactccgccgaagtgacccctcctgtgttatcagtgatgggagaggctacaccggtctcgatagagcctaggattaatgtgggtagtaggtttcaagcagagattcccttgatgcgcgatagagccctggccgctgctgaccctcacaaggccgatctggtgtggcagccatgggaggacctggaatcatcacgagaaaaacagaggcaggttgaagacctgcttacagccgcatgcagttcgattttccccggagctggaaccaatcaagagctggcactgcattgcctgcatgagtctcgtggcgatatactcgagaccctcaacaaactactcttgaagaaacctctcagaccccataatcaccccctcgctacctaccactacaccggcagtgatcagtggaaaatggctgagcgaaaattattcaacaaaggcattgccatctacaagaaggactttttcctggtacagaagctcatccagacaaaaaccgtggctcaatgcgtagaattctattacacgtataagaagcaggtaaagattggtcgcaacgggacacttacatttggcgatgtagataccagcgatgaaaagagtgctcaggaagaggttgaagtggacatcaagaccagccagaagtttcctagggttcccctgccacgcagggaaagccccagcgaagaacggctggagcctaaacgcgaggttaaggaacccagaaaagagggagaagaggaagtcccggaaatccaggagaaagaggagcaggaagaaggacgagaacgtagtcgacgggctgccgctgtcaaagccacccaaactttgcaggccaatgagagtgcctctgatatcttaatcctgaggagtcacgagagcaacgctcctgggtcggctggtggacaggcatctgagaaacctagagaaggaaccgggaaaagtcgcagagccctgcccttcagtgagaaaaaaaagaaaaccgagaccttttctaagacacagaaccaggagaacacattcccttgcaagaaatgtggtcggtag

SEQ ID NO: 258320 - DNA, 3060 bp, Artificial Sequence
  derived and/or modified sequence
atgaacctccaggcccaacctaaggcacagaataaaagaaagaggtgtttgtttggagggcaggagcccgctcctaaggagcaaccaccgccactgcagccaccccagcagtcaataagggtaaaggaagagcaatatctggggcacgaagggcctggtggcgctgtgtccacttctcaacccgtcgagctgccccctccaagcagcctagcacttctcaattcggtcgtatatgggccagaacgcacgtctgctgcaatgctgtcgcaacaggttgcaagcgtgaagtggccaaacagtgttatggctccgggaaggggacccgagcggggagggggtggtggagtgagtgacagctcttggcagcagcagcccggacagcctccccctcatagcacctggaattgccacagcctcagtttatactccgcaacaaaaggatcaccccaccccggagtgggcgtcccaacatattacaaccatcctgaggccctaaagagagaaaaagctggagggccacaactggacaggtacgtgcgaccaatgatgccacagaaggttcagttggaagtcgggagaccacaggcccctcttaattcattccatgcagccaaaaaaccacccaaccagagcctgcccctgcagccattccaactcgcattcgggcaccaagtcaatcgacaggtctttaggcagggaccccctcctcctaatcctgttgcggcatttcctccccagaaacagcagcagcagcagcaacctcagcagcaacagcagcagcagcaggcagcactcccacagatgcccctatttgaaaatttttacagtatgccacagcagccaagccagcagccgcaggatttcggactgcagcctgccggtccattaggccagagtcatttagcacatcattccatggcgccttatcctttcccacctaaccccgacatgaacccagaactccgtaaggcactgctacaggatagtgcgcctcagccggctctgccccaagttcaaattccatttccaaggcggtcccgccgtttatcaaaggaaggaatcctgccgcctagtgccctggacggggctggtactcagcccggacaagaagctactggaaatctgttcctgcaccattggccgctgcagcagccacctcctggctctcttggacagccccatcctgaagccctgggattcccactcgaactcagagaatcgcagctgctgccagacggtgaaaggttagcccctaacggcagagaacgagaggcccctgcgatgggatccgaggaaggtatgagagcggtgtctaccggagactgcggccaagtcctgcggggaggcgtcatccaatcgacacgcagacgtagacgggcatctcaggaggcaaatcttttgacgctggctcaaaaggccgttgaactcgccagtttgcagaacgcaaaggatgggtctgggtcagaagaaaagagaaaatcagttctggcctctacgacgaagtgcggggttgagttctctgaaccttcactggctactaaaagagctagagaagactctgggatggtaccccttatcatacctgtgagcgttccagtcagaactgtagaccctacagaagcagcccaggctggtgggttggacgaggacgggaaaggcccagagcagaaccctgccgaacacaaaccaagcgttatcgtcacgcgcagacgtagtacccggatcccaggcactgatgctcaggcccaggctgaggatatgaatgtgaagttagaaggcgagcctagtgtgcgaaagcctaaacagcgccctcggccagagcctctcatcataccgacaaaagccggtacatttatcgcccctcccgtatatagcaacatcaccccttaccagagccatcttagatcccccgtgagactggccgaccacccctctgagcgcagttttgaactgcccccttacactccacctcctatcttgtcccctgttagagaaggcagcggtctctactttaacgctatcatctcaactagtactattcctgcacccccacccattacacctaaaagcgcccaccgcaccctgctacggacgaactcagcagaggttacgccgccagtacttagtgtgatgggtgaagcaactccagtctcaatcgaaccaagaattaatgtgggcagccgcttccaggccgaaatccctctgatgagggatcgcgcactcgctgctgcggacccacacaaagccgatctggtgtggcagccgtgggaggatttagagtcttcccgggaaaaacagcgccaagtggaggacctgctgaccgccgcatgtagctctatttttcccggtgcaggcactaatcaggaattagcccttcactgtttacacgagtcccggggagacatactcgagaccctcaacaagttgttgttaaaaaagcctcttcgccctcataaccatccactggcaacttaccactatacaggcagtgatcagtggaaaatggcagagagaaagctgtttaacaagggcattgccatctacaaaaaagatttcttcctggtccagaagctaatccagactaaaaccgtagctcagtgcgtagaattttattacacctacaaaaaacaggtcaaaatcggacgcaatggaactctgacctttggagatgtggacactagcgacgagaagtctgcccaggaggaggtagaggtcgacattaaaacgtcccagaaattcccgagggtcccccttcctagaagagagagtcctagtgaagagcggttggagcccaagagggaggtgaaggaacctcgcaaagagggcgaagaagaagttcccgagatccaggaaaaggaggagcaggaagagggaagagagcggtcccggagggcagcagctgtgaaggccacccagaccttacaggctaatgaaagtgcctccgatatcctaatcctccgatcacacgagtccaatgcaccaggcagcgcaggagggcaggcatcagaaaagccacgtgaaggtacggggaagagtcgtagagcactgcccttttcctag

SEQ ID NO: 258321 - DNA, 8091 bp, Artificial Sequence
  derived and/or modified sequence
gatgaagtggtagagctggttcctgctcgccgcggtgccgcgcgcgccggccggccgctgggcgctccgcgctcccagcctcgagttgtgcaatcctttgtagcacgccagagtcctcctcctccgctgttgcctctcgccctctctctttttttttttttcaagctgtgagctcaaccgatgagtcagagccgtgcaatcctgacactgcatcgcaggactgggggtgacacggagggaggcagagcgctcgcgaggcggacggcacgggtgcggggcgcgccgaggctcctgcatcgcaagcggggggtgacagcccgcgcgtcccgcccgggccctgccagcaaacttctcagcctcgggaggcgcgggctggcggaagccccgcgagcgccgcggggaggcgacggcgcctgtttgtttttaaaatcgggagtgcgtgcaggcggctggagtcccggaggcgaccgaaggcggcgacccgcggcggaagggggacagccgagcccggagcccggagcccgggcaagagctgggtgccagaaccctgtggagcatcatgaactgggaagagtagctgagccccagagcctctctggaagagaaaggaagagccagcagttctttctcccagtgtccgacctcactgtccagcgtcttcctctgcccctgctctgccctccctggctcctggactagagcccggcttccagcaggacgtttccccaggggatgggcgactgttgaaggggatctcaccgccagggctcagttggccacatcatgaacctccaggcccagcccaaggctcagaacaagcggaagcgttgcctcttcgggggccaggaaccagctcccaaggagcagccccctcccctgcagcccccccagcagtccatcagagtgaaggaggagcagtacctcgggcacgagggtccaggaggggcagtctccacctctcagcctgtggaactgccccctcctagcagcctggccctgctgaactctgtggtatatgggcctgagcggacctcagcagccatgctgtcccagcaggtggcctcagtaaagtggcccaactctgtgatggctccagggcggggcccggagcgtggaggaggtgggggtgtcagtgacagcagctggcagcagcagccaggccagcctccaccccattcaacatggaactgccacagtctgtccctctacagtgcaaccaaggggagcccgcatcctggagtgggagtcccgacttactataaccaccctgaggcactgaagcgggagaaagcggggggcccacagctggaccgctatgtgcgaccaatgatgccacagaaggtgcagctggaggtagggcggccccaggcacccctgaattctttccacgcagccaagaaacccccaaaccagtcactgcccctgcaacccttccagctggcattcggccaccaggtgaaccggcaggtcttccggcagggcccaccgcccccaaacccggtggctgccttccctccacagaagcagcagcagcagcagcaaccacagcagcagcagcagcagcagcaggcagccctaccccagatgccgctctttgagaacttctattccatgccgcagcaaccctcgcagcaaccccaggactttggcctgcagccagctgggccactgggacagtcccacctggctcaccacagcatggcaccctaccccttcccccccaacccagatatgaacccagaactgcgcaaggcccttctgcaggactcagccccgcagccagcgctacctcaggtccagatccccttcccccgccgctcccgccgcctctctaaggagggtatcctgcctcccagcgccctggatggggctggcacccagcctgggcaggaggccactggcaacctgttcctacatcactggcccctgcagcagccgccacctggctccctggggcagccccatcctgaagctctgggattcccgctggagctgagggagtcgcagctactgcctgatggggagagactagcacccaatggccgggagcgagaggctcctgccatgggcagcgaggagggcatgagggcagtgagcacaggggactgtgggcaggtgctacggggcggagtgatccagagcacgcgacggaggcgccgggcatcccaggaggccaatttgctgaccctggcccagaaggctgtggagctggcctcactgcagaatgcaaaggatggcagtggttctgaagagaagcggaaaagtgtattggcctcaactaccaagtgtggggtggagttttctgagccttccttagccaccaagcgagcacgagaagacagtgggatggtacccctcatcatcccagtgtctgtgcctgtgcgaactgtggacccaactgaggcagcccaggctggaggtcttgatgaggacgggaagggtcctgaacagaaccctgctgagcacaagccatcagtcatcgtcacccgcaggcggtccacccgaatccccgggacagatgctcaagctcaggcagaggacatgaatgtcaagttggagggggagccttccgtgcggaaaccaaagcagcggcccaggcccgagcccctcatcatccccaccaaggcgggcactttcatcgcccctcccgtctactccaacatcaccccataccagagccacctgcgctctcccgtgcgcctagctgaccacccctctgagcggagctttgagctacctccctacacgccgccccccatcctcagccctgtgcgggaaggctctggcctctacttcaatgccatcatatcaaccagcaccatccctgcccctcctcccatcacgcctaagagtgcccatcgcacgctgctccggactaacagtgctgaagtaaccccgcctgtcctctctgtgatgggggaggccaccccagtgagcatcgagccacggatcaacgtgggctcccggttccaggcagaaatccccttgatgagggaccgtgccctggcagctgcagatccccacaaggctgacttggtgtggcagccatgggaggacctagagagcagccgggagaagcagaggcaagtggaagacctgctgacagccgcctgctccagcattttccctggtgctggcaccaaccaggagctggccctgcactgtctgcacgaatccagaggagacatcctggaaacgctgaataagctgctgctgaagaagcccctgcggccccacaaccatccgctggcaacttatcactacacaggctctgaccagtggaagatggccgagaggaagctgttcaacaaaggcattgccatctacaagaaggatttcttcctggtgcagaagctgatccagaccaagaccgtggcccagtgcgtggagttctactacacctacaagaagcaggtgaaaatcggccgcaatgggactctaacctttggggatgtggatacgagcgatgagaagtcggcccaggaagaggttgaagtggatattaagacttcccaaaagttcccaagggtgcctcttcccagaagagagtccccaagtgaagagaggctggagcccaagagggaggtgaaggagcccaggaaggagggggaggaggaggtgccagagatccaagagaaggaggagcaggaagaggggcgagagcgcagcaggcgggcagcggcagtcaaagccacgcagacactacaggccaatgagtcggccagtgacatcctcatcctccggagccacgagtccaacgcccctgggtctgccggtggccaggcctcggagaagccaagggaagggacagggaagtcacgaagggcactacctttttcagagaagaagaaaaaaacagagacattcagtaagacccagaatcaggagaacactttcccctgtaaaaaatgtggcaggtaaggtgggcagcgctgtccccgctgggacccccgcgggctggtgcgcggagggggcgggggtggggtggaggggagggggaagaggtacaggcggtgtccgcctcgtttctggttggctcagcgggtttctagggctgtgacgtcatggggcagctttcggaaaatgacgcgagctggccggccgcggctgtgcagcgtgggggtgaaggtgaaggctggggctcctcgcgcacccgcgctgggggcccccgggtgggctaggccggttctgagcaacccccacccggctgcagggtgttttacaaggtgaagagccgcagtgcgcatatgaagagccacgcagagcaggagaagaaggctgcagcgctgaggctgaaggagaaagaggccgctgctgccgccgccgccgcccaccagcaggccctgcgggaggagagcggtgcgggcgacaagggctgagcgcgggagccaggctggcccagtcctgggcctcggcccttcccgcaccgccgccagcgcccgcagacaccctggcatctcaagagggagtgaggagaggattgcagggacttttccctgcgaaacaaatgagacaatgacataaacggctcttttatttatgaaggccctgggagcagcgttaagggctccaggatccagctctctttgcatttggtctgtcggaagctgtcctcgtgctttcctggaccgggagagtcccggtcccctcgggagggactccaccgcctctcacactccgatttctgctgctctgctgccccgcagtcttttccctttatttgcttccccctcctcccctcggcctccaggaagccaccgtggccggccaagcacaagctcacccactttggagcagcatttctcctccccagaggacctcgaaggctgcaacggccctgccccaagccccagaaaaagaaactcttggagggagtctgcgggcttctctgagaaggggcgcagcctgacacctgtgctgtccctgcagtctctaggcctgtctgagctgctcccgtgaccgtgtcctgagtggccacctcctccttgggagggaggccgcggcaggtactctccctttgctgcttgctggcggccttgctagggctagaaagttttctcagcgttgggggaggggctagcgttcttgtccaaagcactcatcctgctgcagggaagggagctgtacggaggctggaagctgcagggttaggcccgagagagcttttgacaagcctggctcttcctgcttcccacctttttggctgaatacctttgggtcctggaggctgccaagggcgcttcgccttgagcaggtcccggagaggctcagcctgcccctcctggggccagcctccttgcctctgctctgacctcagcagctacacctaaccccaccgcaccctacccagtgtcgatatccacaacccagcccccaggcctgcactttggagatttctggatccttccctgggagggagaggtctcctaactcgattggacaggagccttcattccttgactcgtgtcatttgggagctatttatttattcttagtatttaatttttaacatcctctcagggaccaggggcctcctgcttttcagaggcccgagtgcatttatcccaaaacgaggcatcttgacatcccctatccccaccccctaaattcccaaggccctaaggtccctcacctggttgctctggaagctcttgctgataggaatgatagcaacactgaaagagcgtgggaaggtggagggtgtcaccagacccacacagagcaagggagattaaggcagttcttgctgccccttctctggctgtgctttgcctgagggaagagttggcaagaggccagaattctagtttggtttatggggcctggattctggcttgaagaagccatatttggcatgggtgaagtgaaagggccaggaggttctggaggccccttcacttccagtcccatagcggggctcagctatttttctgatcttattcaactttagttgtgcaaaagaaattctaagtgaatgcgcgtatgacaggtcaacgtattaggaaggagccagaaagtattcatactgctactccttatgagatagccaagaagcatcatgtcagtaactgggagtggagagggagttttgttttgaaactatgcaggtatttttcagcatccatttgtacattagtatggttctacaggaccccagctgtggaagtaacaaatttcttctccctccagactcttggatgactacctagatccccagcttaccggttagtttcctccacaggcttccatgagctcagtgtcccaagacagcaaaaatctggtataccctgtagaagcaggggggtagcaaatttaggctctcttcgaaattacttgtacaatacgagtgccttcgcagcttagccccaaagtgctacttatgtttcccaaggtcttttctattcaaatcatatttggtttcaggcccctttatgggcatacggtaacagaaacctccatcattcatatgagacccttttgtcagtggtaacatcttgtacttggaaaaaaaatttttttttttttttttttttttttttgagacagagtctcattctgtcgcccaggctggagtgcagtggtgtgatcttggctcactgcaacctccgcctcttgggttaaaagaattctcctgcctcagcctcctgagtagctgggattataggcacacaccaccacacccagctaatctttttgtatttttttttttagtagagacagggtttcgccatgtcggccaggctggtcttgaactcctgacctcaggtggtccacccgcctcggcctcccaaagtgctggcattacaggcgtgaaccaccgtgcctggccggaagtctttaaaaaataaagtgattctactcttctaagcttacagagaccagaccaggtgaatgtaactggggaaaatcaagatggtacctctctgcattatcccgccagacactgtattttatgcattcatgtctaggatacagtgtgaaaattaaaaagtttagagggcagatgcaattgtggcaagtgacctgccaataaagcaggtgcagctatagaagctggcataggtatatccttaatggtgctttctccctgggcttgtctttttgttgtttttttccccctatattcagagctccttgagaagtgataaacacctccagctttctaacatcctccccacaccatctcaccatatccatctcccagcatccatctgcattcagctaagggcgggaaactgacctagtgcctgtgttgcagaccatttctgaggtctccaccatccaaggaggcacagccgtcattactgtcctccatgccttcagcagcccccctcacagctaaggtacataccaccccttctgccgcgcctccacccctggcaccaaggtcttctgctgcttatgtctaaagggatcacctatatttaactgcctcagtgacctaacctctttcttctcatgtgccagatgttaagatgaaggaggaatacaacacatactcaagcctcagcctgtttagttgttttcactggggctcgcttttctgggacggtatttattatcagactggcaagcctaactccataggtttacaggaagtagggatatttttataaaacaattgtgtcctccccacattttgctatgttaatatttgcttctaacaatttgcagctgtttcactttttcctcatttgtctctaagttgaaggctttgttggaggggacagagcacaggaacagccttgacagtctgtaattattgtacagatattttaatagcatataaataagtatattccttttattttgaaacaaaaatgatcagacactgccttttgtgtgtttgctgcctgtggcatccttttttaaaaagactgttacatattaaaatagtgtacatatataaatattacctcttttgctgtacagttgtgatagagactgaagattttattttttgtgtgctttttataagaaaaaaattaatacactaaagaatcttgctgatgtgattgtaatgtacctatgtaacttatttacttttgaatgttcttctgtatctttaaaccttttattaaataaggtttt

SEQ ID NO: 258322 - DNA, 7721 bp, Artificial Sequence
  derived and/or modified sequence
gctgggtcacagcccgggccgcacagcccgggccgcaccgcccgctccgcgaggaagtgacgactgcgccgtcccgagagcaacaaagttagagtctgcgggccgcactcgcctgcgccccgcacccctccgagcagcccggggatccagcacgcaggtgccagaaccctgtggagcatcatgaactgggaagagtagctgagccccagagcctctctggaagagaaaggaagagccagcagttctttctcccagtgtccgacctcactgtccagcgtcttcctctgcccctgctctgccctccctggctcctggactagagcccggcttccagcaggacgtttccccaggggatgggcgactgttgaaggggatctcaccgccagggctcagttggccacatcatgaacctccaggcccagcccaaggctcagaacaagcggaagcgttgcctcttcgggggccaggaaccagctcccaaggagcagccccctcccctgcagcccccccagcagtccatcagagtgaaggaggagcagtacctcgggcacgagggtccaggaggggcagtctccacctctcagcctgtggaactgccccctcctagcagcctggccctgctgaactctgtggtatatgggcctgagcggacctcagcagccatgctgtcccagcaggtggcctcagtaaagtggcccaactctgtgatggctccagggcggggcccggagcgtggaggaggtgggggtgtcagtgacagcagctggcagcagcagccaggccagcctccaccccattcaacatggaactgccacagtctgtccctctacagtgcaaccaaggggagcccgcatcctggagtgggagtcccgacttactataaccaccctgaggcactgaagcgggagaaagcggggggcccacagctggaccgctatgtgcgaccaatgatgccacagaaggtgcagctggaggtagggcggccccaggcacccctgaattctttccacgcagccaagaaacccccaaaccagtcactgcccctgcaacccttccagctggcattcggccaccaggtgaaccggcaggtcttccggcagggcccaccgcccccaaacccggtggctgccttccctccacagaagcagcagcagcagcagcaaccacagcagcagcagcagcagcagcaggcagccctaccccagatgccgctctttgagaacttctattccatgccgcagcaaccctcgcagcaaccccaggactttggcctgcagccagctgggccactgggacagtcccacctggctcaccacagcatggcaccctaccccttcccccccaacccagatatgaacccagaactgcgcaaggcccttctgcaggactcagccccgcagccagcgctacctcaggtccagatccccttcccccgccgctcccgccgcctctctaaggagggtatcctgcctcccagcgccctggatggggctggcacccagcctgggcaggaggccactggcaacctgttcctacatcactggcccctgcagcagccgccacctggctccctggggcagccccatcctgaagctctgggattcccgctggagctgagggagtcgcagctactgcctgatggggagagactagcacccaatggccgggagcgagaggctcctgccatgggcagcgaggagggcatgagggcagtgagcacaggggactgtgggcaggtgctacggggcggagtgatccagagcacgcgacggaggcgccgggcatcccaggaggccaatttgctgaccctggcccagaaggctgtggagctggcctcactgcagaatgcaaaggatggcagtggttctgaagagaagcggaaaagtgtattggcctcaactaccaagtgtggggtggagttttctgagccttccttagccaccaagcgagcacgagaagacagtgggatggtacccctcatcatcccagtgtctgtgcctgtgcgaactgtggacccaactgaggcagcccaggctggaggtcttgatgaggacgggaagggtcctgaacagaaccctgctgagcacaagccatcagtcatcgtcacccgcaggcggtccacccgaatccccgggacagatgctcaagctcaggcagaggacatgaatgtcaagttggagggggagccttccgtgcggaaaccaaagcagcggcccaggcccgagcccctcatcatccccaccaaggcgggcactttcatcgcccctcccgtctactccaacatcaccccataccagagccacctgcgctctcccgtgcgcctagctgaccacccctctgagcggagctttgagctacctccctacacgccgccccccatcctcagccctgtgcgggaaggctctggcctctacttcaatgccatcatatcaaccagcaccatccctgcccctcctcccatcacgcctaagagtgcccatcgcacgctgctccggactaacagtgctgaagtaaccccgcctgtcctctctgtgatgggggaggccaccccagtgagcatcgagccacggatcaacgtgggctcccggttccaggcagaaatccccttgatgagggaccgtgccctggcagctgcagatccccacaaggctgacttggtgtggcagccatgggaggacctagagagcagccgggagaagcagaggcaagtggaagacctgctgacagccgcctgctccagcattttccctggtgctggcaccaaccaggagctggccctgcactgtctgcacgaatccagaggagacatcctggaaacgctgaataagctgctgctgaagaagcccctgcggccccacaaccatccgctggcaacttatcactacacaggctctgaccagtggaagatggccgagaggaagctgttcaacaaaggcattgccatctacaagaaggatttcttcctggtgcagaagctgatccagaccaagaccgtggcccagtgcgtggagttctactacacctacaagaagcaggtgaaaatcggccgcaatgggactctaacctttggggatgtggatacgagcgatgagaagtcggcccaggaagaggttgaagtggatattaagacttcccaaaagttcccaagggtgcctcttcccagaagagagtccccaagtgaagagaggctggagcccaagagggaggtgaaggagcccaggaaggagggggaggaggaggtgccagagatccaagagaaggaggagcaggaagaggggcgagagcgcagcaggcgggcagcggcagtcaaagccacgcagacactacaggccaatgagtcggccagtgacatcctcatcctccggagccacgagtccaacgcccctgggtctgccggtggccaggcctcggagaagccaagggaagggacagggaagtcacgaagggcactacctttttcagagaagaagaaaaaaacagagacattcagtaagacccagaatcaggagaacactttcccctgtaaaaaatgtggcaggtaaggtgggcagcgctgtccccgctgggacccccgcgggctggtgcgcggagggggcgggggtggggtggaggggagggggaagaggtacaggcggtgtccgcctcgtttctggttggctcagcgggtttctagggctgtgacgtcatggggcagctttcggaaaatgacgcgagctggccggccgcggctgtgcagcgtgggggtgaaggtgaaggctggggctcctcgcgcacccgcgctgggggcccccgggtgggctaggccggttctgagcaacccccacccggctgcagggtgttttacaaggtgaagagccgcagtgcgcatatgaagagccacgcagagcaggagaagaaggctgcagcgctgaggctgaaggagaaagaggccgctgctgccgccgccgccgcccaccagcaggccctgcgggaggagagcggtgcgggcgacaagggctgagcgcgggagccaggctggcccagtcctgggcctcggcccttcccgcaccgccgccagcgcccgcagacaccctggcatctcaagagggagtgaggagaggattgcagggacttttccctgcgaaacaaatgagacaatgacataaacggctcttttatttatgaaggccctgggagcagcgttaagggctccaggatccagctctctttgcatttggtctgtcggaagctgtcctcgtgctttcctggaccgggagagtcccggtcccctcgggagggactccaccgcctctcacactccgatttctgctgctctgctgccccgcagtcttttccctttatttgcttccccctcctcccctcggcctccaggaagccaccgtggccggccaagcacaagctcacccactttggagcagcatttctcctccccagaggacctcgaaggctgcaacggccctgccccaagccccagaaaaagaaactcttggagggagtctgcgggcttctctgagaaggggcgcagcctgacacctgtgctgtccctgcagtctctaggcctgtctgagctgctcccgtgaccgtgtcctgagtggccacctcctccttgggagggaggccgcggcaggtactctccctttgctgcttgctggcggccttgctagggctagaaagttttctcagcgttgggggaggggctagcgttcttgtccaaagcactcatcctgctgcagggaagggagctgtacggaggctggaagctgcagggttaggcccgagagagcttttgacaagcctggctcttcctgcttcccacctttttggctgaatacctttgggtcctggaggctgccaagggcgcttcgccttgagcaggtcccggagaggctcagcctgcccctcctggggccagcctccttgcctctgctctgacctcagcagctacacctaaccccaccgcaccctacccagtgtcgatatccacaacccagcccccaggcctgcactttggagatttctggatccttccctgggagggagaggtctcctaactcgattggacaggagccttcattccttgactcgtgtcatttgggagctatttatttattcttagtatttaatttttaacatcctctcagggaccaggggcctcctgcttttcagaggcccgagtgcatttatcccaaaacgaggcatcttgacatcccctatccccaccccctaaattcccaaggccctaaggtccctcacctggttgctctggaagctcttgctgataggaatgatagcaacactgaaagagcgtgggaaggtggagggtgtcaccagacccacacagagcaagggagattaaggcagttcttgctgccccttctctggctgtgctttgcctgagggaagagttggcaagaggccagaattctagtttggtttatggggcctggattctggcttgaagaagccatatttggcatgggtgaagtgaaagggccaggaggttctggaggccccttcacttccagtcccatagcggggctcagctatttttctgatcttattcaactttagttgtgcaaaagaaattctaagtgaatgcgcgtatgacaggtcaacgtattaggaaggagccagaaagtattcatactgctactccttatgagatagccaagaagcatcatgtcagtaactgggagtggagagggagttttgttttgaaactatgcaggtatttttcagcatccatttgtacattagtatggttctacaggaccccagctgtggaagtaacaaatttcttctccctccagactcttggatgactacctagatccccagcttaccggttagtttcctccacaggcttccatgagctcagtgtcccaagacagcaaaaatctggtataccctgtagaagcaggggggtagcaaatttaggctctcttcgaaattacttgtacaatacgagtgccttcgcagcttagccccaaagtgctacttatgtttcccaaggtcttttctattcaaatcatatttggtttcaggcccctttatgggcatacggtaacagaaacctccatcattcatatgagacccttttgtcagtggtaacatcttgtacttggaaaaaaaatttttttttttttttttttttttttttgagacagagtctcattctgtcgcccaggctggagtgcagtggtgtgatcttggctcactgcaacctccgcctcttgggttaaaagaattctcctgcctcagcctcctgagtagctgggattataggcacacaccaccacacccagctaatctttttgtatttttttttttagtagagacagggtttcgccatgtcggccaggctggtcttgaactcctgacctcaggtggtccacccgcctcggcctcccaaagtgctggcattacaggcgtgaaccaccgtgcctggccggaagtctttaaaaaataaagtgattctactcttctaagcttacagagaccagaccaggtgaatgtaactggggaaaatcaagatggtacctctctgcattatcccgccagacactgtattttatgcattcatgtctaggatacagtgtgaaaattaaaaagtttagagggcagatgcaattgtggcaagtgacctgccaataaagcaggtgcagctatagaagctggcataggtatatccttaatggtgctttctccctgggcttgtctttttgttgtttttttccccctatattcagagctccttgagaagtgataaacacctccagctttctaacatcctccccacaccatctcaccatatccatctcccagcatccatctgcattcagctaagggcgggaaactgacctagtgcctgtgttgcagaccatttctgaggtctccaccatccaaggaggcacagccgtcattactgtcctccatgccttcagcagcccccctcacagctaaggtacataccaccccttctgccgcgcctccacccctggcaccaaggtcttctgctgcttatgtctaaagggatcacctatatttaactgcctcagtgacctaacctctttcttctcatgtgccagatgttaagatgaaggaggaatacaacacatactcaagcctcagcctgtttagttgttttcactggggctcgcttttctgggacggtatttattatcagactggcaagcctaactccataggtttacaggaagtagggatatttttataaaacaattgtgtcctccccacattttgctatgttaatatttgcttctaacaatttgcagctgtttcactttttcctcatttgtctctaagttgaaggctttgttggaggggacagagcacaggaacagccttgacagtctgtaattattgtacagatattttaatagcatataaataagtatattccttttattttgaaacaaaaatgatcagacactgccttttgtgtgtttgctgcctgtggcatccttttttaaaaagactgttacatattaaaatagtgtacatatataaatattacctcttttgctgtacagttgtgatagagactgaagattttattttttgtgtgctttttataagaaaaaaattaatacactaaagaatcttgctgatgtgattgtaatgtacctatgtaacttatttacttttgaatgttcttctgtatctttaaaccttttattaaataaggttttaaaaattca

SEQ ID NO: 258323 - DNA, 3839 bp, Artificial Sequence
  derived and/or modified sequence
gatgaagtggtagagctggttcctgctcgccgcggtgccgcgcgcgccggccggccgctgggcgctccgcgctcccagcctcgagttgtgcaatcctttgtagcacgccagagtcctcctcctccgctgttgcctctcgccctctctctttttttttttttcaagctgtgagctcaaccgatgagtcagagccgtgcaatcctgacactgcatcgcaggactgggggtgacacggagggaggcagagcgctcgcgaggcggacggcacgggtgcggggcgcgccgaggctcctgcatcgcaagcggggggtgacagcccgcgcgtcccgcccgggccctgccagcaaacttctcagcctcgggaggcgcgggctggcggaagccccgcgagcgccgcggggaggcgacggcgcctgtttgtttttaaaatcgggagtgcgtgcaggcggctggagtcccggaggcgaccgaaggcggcgacccgcggcggaagggggacagccgagcccggagcccggagcccgggcaagagctgggtgccagaaccctgtggagcatcatgaactgggaagagtagctgagccccagagcctctctggaagagaaaggaagagccagcagttctttctcccagtgtccgacctcactgtccagcgtcttcctctgcccctgctctgccctccctggctcctggactagagcccggcttccagcaggacgtttccccaggggatgggcgactgttgaaggggatctcaccgccagggctcagttggccacatcatgaacctccaggcccagcccaaggctcagaacaagcggaagcgttgcctcttcgggggccaggaaccagctcccaaggagcagccccctcccctgcagcccccccagcagtccatcagagtgaaggaggagcagtacctcgggcacgagggtccaggaggggcagtctccacctctcagcctgtggaactgccccctcctagcagcctggccctgctgaactctgtggtatatgggcctgagcggacctcagcagccatgctgtcccagcaggtggcctcagtaaagtggcccaactctgtgatggctccagggcggggcccggagcgtggaggaggtgggggtgtcagtgacagcagctggcagcagcagccaggccagcctccaccccattcaacatggaactgccacagtctgtccctctacagtgcaaccaaggggagcccgcatcctggagtgggagtcccgacttactataaccaccctgaggcactgaagcgggagaaagcggggggcccacagctggaccgctatgtgcgaccaatgatgccacagaaggtgcagctggaggtagggcggccccaggcacccctgaattctttccacgcagccaagaaacccccaaaccagtcactgcccctgcaacccttccagctggcattcggccaccaggtgaaccggcaggtcttccggcagggcccaccgcccccaaacccggtggctgccttccctccacagaagcagcagcagcagcagcaaccacagcagcagcagcagcagcagcaggcagccctaccccagatgccgctctttgagaacttctattccatgccgcagcaaccctcgcagcaaccccaggactttggcctgcagccagctgggccactgggacagtcccacctggctcaccacagcatggcaccctaccccttcccccccaacccagatatgaacccagaactgcgcaaggcccttctgcaggactcagccccgcagccagcgctacctcaggtccagatccccttcccccgccgctcccgccgcctctctaaggagggtatcctgcctcccagcgccctggatggggctggcacccagcctgggcaggaggccactggcaacctgttcctacatcactggcccctgcagcagccgccacctggctccctggggcagccccatcctgaagctctgggattcccgctggagctgagggagtcgcagctactgcctgatggggagagactagcacccaatggccgggagcgagaggctcctgccatgggcagcgaggagggcatgagggcagtgagcacaggggactgtgggcaggtgctacggggcggagtgatccagagcacgcgacggaggcgccgggcatcccaggaggccaatttgctgaccctggcccagaaggctgtggagctggcctcactgcagaatgcaaaggatggcagtggttctgaagagaagcggaaaagtgtattggcctcaactaccaagtgtggggtggagttttctgagccttccttagccaccaagcgagcacgagaagacagtgggatggtacccctcatcatcccagtgtctgtgcctgtgcgaactgtggacccaactgaggcagcccaggctggaggtcttgatgaggacgggaagggtcctgaacagaaccctgctgagcacaagccatcagtcatcgtcacccgcaggcggtccacccgaatccccgggacagatgctcaagctcaggcagaggacatgaatgtcaagttggagggggagccttccgtgcggaaaccaaagcagcggcccaggcccgagcccctcatcatccccaccaaggcgggcactttcatcgcccctcccgtctactccaacatcaccccataccagagccacctgcgctctcccgtgcgcctagctgaccacccctctgagcggagctttgagctacctccctacacgccgccccccatcctcagccctgtgcgggaaggctctggcctctacttcaatgccatcatatcaaccagcaccatccctgcccctcctcccatcacgcctaagagtgcccatcgcacgctgctccggactaacagtgctgaagtaaccccgcctgtcctctctgtgatgggggaggccaccccagtgagcatcgagccacggatcaacgtgggctcccggttccaggcagaaatccccttgatgagggaccgtgccctggcagctgcagatccccacaaggctgacttggtgtggcagccatgggaggacctagagagcagccgggagaagcagaggcaagtggaagacctgctgacagccgcctgctccagcattttccctggtgctggcaccaaccaggagctggccctgcactgtctgcacgaatccagaggagacatcctggaaacgctgaataagctgctgctgaagaagcccctgcggccccacaaccatccgctggcaacttatcactacacaggctctgaccagtggaagatggccgagaggaagctgttcaacaaaggcattgccatctacaagaaggatttcttcctggtgcagaagctgatccagaccaagaccgtggcccagtgcgtggagttctactacacctacaagaagcaggtgaaaatcggccgcaatgggactctaacctttggggatgtggatacgagcgatgagaagtcggcccaggaagaggttgaagtggatattaagacttcccaaaagttcccaagggtgcctcttcccagaagagagtccccaagtgaagagaggctggagcccaagagggaggtgaaggagcccaggaaggagggggaggaggaggtgccagagatccaagagaaggaggagcaggaagaggggcgagagcgcagcaggcgggcagcggcagtcaaagccacgcagacactacaggccaatgagtcggccagtgacatcctcatcctccggagccacgagtccaacgcccctgggtctgccggtggccaggcctcggagaagccaagggaagggacagggaagtcacgaagggcactacctttttc

SEQ ID NO: 258324 - DNA, 3138 bp, Artificial Sequence
  derived and/or modified sequence
atgaacctgcaggcccagcccaaggcccagaacaagagaaagagatgcctgttcggcggccaggagcccgcccccaaggagcagcccccccccctgcagcccccccagcagagcatcagagtgaaggaggagcagtacctgggccacgagggccccggcggcgccgtgagcaccagccagcccgtggagctgcccccccccagcagcctggccctgctgaacagcgtggtgtacggccccgagagaaccagcgccgccatgctgagccagcaggtggccagcgtgaagtggcccaacagcgtgatggcccccggcagaggccccgagagaggcggcggcggcggcgtgagcgacagcagctggcagcagcagcccggccagccccccccccacagcacctggaactgccacagcctgagcctgtacagcgccaccaagggcagcccccaccccggcgtgggcgtgcccacctactacaaccaccccgaggccctgaagagagagaaggccggcggcccccagctggacagatacgtgagacccatgatgccccagaaggtgcagctggaggtgggcagaccccaggcccccctgaacagcttccacgccgccaagaagccccccaaccagagcctgcccctgcagcccttccagctggccttcggccaccaggtgaacagacaggtgttcagacagggcccccccccccccaaccccgtggccgccttccccccccagaagcagcagcagcagcagcagccccagcagcagcagcagcagcagcaggccgccctgccccagatgcccctgttcgagaacttctacagcatgccccagcagcccagccagcagccccaggacttcggcctgcagcccgccggccccctgggccagagccacctggcccaccacagcatggccccctaccccttcccccccaaccccgacatgaaccccgagctgagaaaggccctgctgcaggacagcgccccccagcccgccctgccccaggtgcagatccccttccccagaagaagcagaagactgagcaaggagggcatcctgccccccagcgccctggacggcgccggcacccagcccggccaggaggccaccggcaacctgttcctgcaccactggcccctgcagcagcccccccccggcagcctgggccagccccaccccgaggccctgggcttccccctggagctgagagagagccagctgctgcccgacggcgagagactggcccccaacggcagagagagagaggcccccgccatgggcagcgaggagggcatgagagccgtgagcaccggcgactgcggccaggtgctgagaggcggcgtgatccagagcaccagaagaagaagaagagccagccaggaggccaacctgctgaccctggcccagaaggccgtggagctggccagcctgcagaacgccaaggacggcagcggcagcgaggagaagagaaagagcgtgctggccagcaccaccaagtgcggcgtggagttcagcgagcccagcctggccaccaagagagccagagaggacagcggcatggtgcccctgatcatccccgtgagcgtgcccgtgagaaccgtggaccccaccgaggccgcccaggccggcggcctggacgaggacggcaagggccccgagcagaaccccgccgagcacaagcccagcgtgatcgtgaccagaagaagaagcaccagaatccccggcaccgacgcccaggcccaggccgaggacatgaacgtgaagctggagggcgagcccagcgtgagaaagcccaagcagagacccagacccgagcccctgatcatccccaccaaggccggcaccttcatcgccccccccgtgtacagcaacatcaccccctaccagagccacctgagaagccccgtgagactggccgaccaccccagcgagagaagcttcgagctgcccccctacacccccccccccatcctgagccccgtgagagagggcagcggcctgtacttcaacgccatcatcagcaccagcaccatccccgcccccccccccatcacccccaagagcgcccacagaaccctgctgagaaccaacagcgccgaggtgaccccccccgtgctgagcgtgatgggcgaggccacccccgtgagcatcgagcccagaatcaacgtgggcagcagattccaggccgagatccccctgatgagagacagagccctggccgccgccgacccccacaaggccgacctggtgtggcagccctgggaggacctggagagcagcagagagaagcagagacaggtggaggacctgctgaccgccgcctgcagcagcatcttccccggcgccggcaccaaccaggagctggccctgcactgcctgcacgagagcagaggcgacatcctggagaccctgaacaagctgctgctgaagaagcccctgagaccccacaaccaccccctggccacctaccactacaccggcagcgaccagtggaagatggccgagagaaagctgttcaacaagggcatcgccatctacaagaaggacttcttcctggtgcagaagctgatccagaccaagaccgtggcccagtgcgtggagttctactacacctacaagaagcaggtgaagatcggcagaaacggcaccctgaccttcggcgacgtggacaccagcgacgagaagagcgcccaggaggaggtggaggtggacatcaagaccagccagaagttccccagagtgcccctgcccagaagagagagccccagcgaggagagactggagcccaagagagaggtgaaggagcccagaaaggagggcgaggaggaggtgcccgagatccaggagaaggaggagcaggaggagggcagagagagaagcagaagagccgccgccgtgaaggccacccagaccctgcaggccaacgagagcgccagcgacatcctgatcctgagaagccacgagagcaacgcccccggcagcgccggcggccaggccagcgagaagcccagagagggcaccggcaagagcagaagagccctgcccttcagcgagaagaagaagaagaccgagaccttcagcaagacccagaaccaggagaacaccttcccctgcaagaagtgcggcagatag

SEQ ID NO: 258325 - DNA, 3060 bp, Artificial Sequence
  derived and/or modified sequence
atgaacctgcaggcccagcccaaggcccagaacaagagaaagagatgcctgttcggcggccaggagcccgcccccaaggagcagcccccccccctgcagcccccccagcagagcatcagagtgaaggaggagcagtacctgggccacgagggccccggcggcgccgtgagcaccagccagcccgtggagctgcccccccccagcagcctggccctgctgaacagcgtggtgtacggccccgagagaaccagcgccgccatgctgagccagcaggtggccagcgtgaagtggcccaacagcgtgatggcccccggcagaggccccgagagaggcggcggcggcggcgtgagcgacagcagctggcagcagcagcccggccagccccccccccacagcacctggaactgccacagcctgagcctgtacagcgccaccaagggcagcccccaccccggcgtgggcgtgcccacctactacaaccaccccgaggccctgaagagagagaaggccggcggcccccagctggacagatacgtgagacccatgatgccccagaaggtgcagctggaggtgggcagaccccaggcccccctgaacagcttccacgccgccaagaagccccccaaccagagcctgcccctgcagcccttccagctggccttcggccaccaggtgaacagacaggtgttcagacagggcccccccccccccaaccccgtggccgccttccccccccagaagcagcagcagcagcagcagccccagcagcagcagcagcagcagcaggccgccctgccccagatgcccctgttcgagaacttctacagcatgccccagcagcccagccagcagccccaggacttcggcctgcagcccgccggccccctgggccagagccacctggcccaccacagcatggccccctaccccttcccccccaaccccgacatgaaccccgagctgagaaaggccctgctgcaggacagcgccccccagcccgccctgccccaggtgcagatccccttccccagaagaagcagaagactgagcaaggagggcatcctgccccccagcgccctggacggcgccggcacccagcccggccaggaggccaccggcaacctgttcctgcaccactggcccctgcagcagcccccccccggcagcctgggccagccccaccccgaggccctgggcttccccctggagctgagagagagccagctgctgcccgacggcgagagactggcccccaacggcagagagagagaggcccccgccatgggcagcgaggagggcatgagagccgtgagcaccggcgactgcggccaggtgctgagaggcggcgtgatccagagcaccagaagaagaagaagagccagccaggaggccaacctgctgaccctggcccagaaggccgtggagctggccagcctgcagaacgccaaggacggcagcggcagcgaggagaagagaaagagcgtgctggccagcaccaccaagtgcggcgtggagttcagcgagcccagcctggccaccaagagagccagagaggacagcggcatggtgcccctgatcatccccgtgagcgtgcccgtgagaaccgtggaccccaccgaggccgcccaggccggcggcctggacgaggacggcaagggccccgagcagaaccccgccgagcacaagcccagcgtgatcgtgaccagaagaagaagcaccagaatccccggcaccgacgcccaggcccaggccgaggacatgaacgtgaagctggagggcgagcccagcgtgagaaagcccaagcagagacccagacccgagcccctgatcatccccaccaaggccggcaccttcatcgccccccccgtgtacagcaacatcaccccctaccagagccacctgagaagccccgtgagactggccgaccaccccagcgagagaagcttcgagctgcccccctacacccccccccccatcctgagccccgtgagagagggcagcggcctgtacttcaacgccatcatcagcaccagcaccatccccgcccccccccccatcacccccaagagcgcccacagaaccctgctgagaaccaacagcgccgaggtgaccccccccgtgctgagcgtgatgggcgaggccacccccgtgagcatcgagcccagaatcaacgtgggcagcagattccaggccgagatccccctgatgagagacagagccctggccgccgccgacccccacaaggccgacctggtgtggcagccctgggaggacctggagagcagcagagagaagcagagacaggtggaggacctgctgaccgccgcctgcagcagcatcttccccggcgccggcaccaaccaggagctggccctgcactgcctgcacgagagcagaggcgacatcctggagaccctgaacaagctgctgctgaagaagcccctgagaccccacaaccaccccctggccacctaccactacaccggcagcgaccagtggaagatggccgagagaaagctgttcaacaagggcatcgccatctacaagaaggacttcttcctggtgcagaagctgatccagaccaagaccgtggcccagtgcgtggagttctactacacctacaagaagcaggtgaagatcggcagaaacggcaccctgaccttcggcgacgtggacaccagcgacgagaagagcgcccaggaggaggtggaggtggacatcaagaccagccagaagttccccagagtgcccctgcccagaagagagagccccagcgaggagagactggagcccaagagagaggtgaaggagcccagaaaggagggcgaggaggaggtgcccgagatccaggagaaggaggagcaggaggagggcagagagagaagcagaagagccgccgccgtgaaggccacccagaccctgcaggccaacgagagcgccagcgacatcctgatcctgagaagccacgagagcaacgcccccggcagcgccggcggccaggccagcgagaagcccagagagggcaccggcaagagcagaagagccctgcccttcagctag

SEQ ID NO: 258326 - protein, 292 aa, Artificial Sequence
  derived and/or modified sequence
MRTPVVMTLGMVLAPCGLLLNLTGTLAPGWRLVKGFLNQPVDVELYQGLWDMCREQSSRERECGQTDQWGYFEAQPVLVARALMVTSLAATVLGLLLASLGVRCWQDEPNFVLAGLSGVVLFVAGLLGLIPVSWYNHFLGDRDVLPAPASPVTVQVSYSLVLGYLGSCLLLLGGFSLALSFAPWCDERCRRRRKGPSAGPRRSSVSTIQVEWPEPDLAPAIKYYSDGQHRPPPAQHRKPKPKPKVGFPMPRPRPKAYTNSVDVLDGEGWESQDAPSCSTHPCDSSLPCDSDL

SEQ ID NO: 258327 - DNA, 2169 bp, Artificial Sequence
  derived and/or modified sequence
ggcgtggcccagccgcccggctgcaaggtggggtgtccccgccgctcggatccccatctcacctgccgcgggcgaggtggccccgccgcttcctgcgctcacctcgggtccctccctcccgggccaggtttggccgcggcagccgcccctgggcgcccgcgcccggacccgcggtttcggtcagacccgcccgcgggctggtttcgattagggccagtaggagggcggagcggccgggacgccaggagggaactagcctaagtggggacggtccccgtgcaggagacaaagagcgtccctggagcgatcagggctcaggagcccgacccggagcccggggcgtccgcgctgacttcgggtccccggagcctggggcacggcagggagaagacgacggcggagaaggcgacagcggagaaggaaggcaggctgcaggggcgccgtcggcgcggcgggccgggatgcggacgccggtggtgatgacgctgggcatggtgttggcgccctgcgggctcctgctcaacctgaccggcaccctggcgcccggctggcggctggtgaagggcttcctgaaccagccagtggacgtggagttgtaccagggcctgtgggacatgtgtcgcgagcagagcagccgcgagcgcgagtgcggccagacggaccagtggggctacttcgaggcccagcccgtgctggtggcgcgggcactcatggtcacctcgctggccgccacggtcctggggcttctgctggcgtcgctgggcgtgcgctgctggcaggacgagcccaacttcgtgctggcagggctctcgggcgtcgtgctcttcgtcgctggcctcctcggcctcatcccggtgtcctggtacaaccacttcttgggggaccgcgacgtgctgcccgccccggccagcccggtcacggtgcaggtcagctacagcctggtcctgggctacctgggcagctgcctcctgctgctgggcggcttctcgctggcgctcagcttcgcgccctggtgcgacgagcgttgtcgccgccgccgcaagggaccctccgccgggcctcgccgcagcagcgtcagcaccatccaagtggagtggcccgagcccgacctggcgcccgccatcaagtactacagcgacggccagcaccgaccgccgcctgcccagcaccgcaagcccaagcccaagcccaaggtcggcttccccatgccgcggccgcggcccaaggcctacaccaactcggtggacgtcctcgacggggaggggtgggagtcccaggacgctccctcgtgcagcacccacccctgcgacagctcgctgccctgcgactccgacctctagacgcttgtagagcctggggggcgccgggtggcaaaggactcacccccgcacaggcccgcctggcttcgagttggaacccggacacttgcccctcactggtgtggatggaaatctgcctttcgtgggaccaaacaggactccttggacgattagttcaggttgggtttggttttcttcttaaagagtttagttttcctctccagagggatcagggtcctcttagggagtgacgggcttttcatatatttttgctgaagaatatatggaaagggtggcatttgcgtcacgtggaccagggacagtgctgaaatcagcagtgctcagaaacaatttaacatgttgaaacgacaatattctaaaatactgatgaatcttgcatcaatataattattgggttttttttctttttcctgctgtataactccttgccatgcaaactctcaagaggccaatatattcctggccatgtttgaatgagcctcttaaaataaacttagagccatgcaaatgccagcagcttaatggatttcatggaatgaaataccgtgattaactcatagctacatatcattgcataaatgggatttatcttttttctcacttatttttgcggtgaaagtcgagggcatgcaagagtttctcttccagaagccaagaggagaacaaaggtcctaatgctgtactattccaccctttggacgcctcatccaggacgcagaggactctaggtttaacattttgtacaaaatggaacctgttaatcatattaaagcacatatgtatatatcttttatttataaataaaattttaaaacaatagtttcagtat

SEQ ID NO: 258328 - DNA, 879 bp, Artificial Sequence
  derived and/or modified sequence
atgagaacccccgtggtgatgaccctgggcatggtgctggccccctgcggcctgctgctgaacctgaccggcaccctggcccccggctggagactggtgaagggcttcctgaaccagcccgtggacgtggagctgtaccagggcctgtgggacatgtgcagagagcagagcagcagagagagagagtgcggccagaccgaccagtggggctacttcgaggcccagcccgtgctggtggccagagccctgatggtgaccagcctggccgccaccgtgctgggcctgctgctggccagcctgggcgtgagatgctggcaggacgagcccaacttcgtgctggccggcctgagcggcgtggtgctgttcgtggccggcctgctgggcctgatccccgtgagctggtacaaccacttcctgggcgacagagacgtgctgcccgcccccgccagccccgtgaccgtgcaggtgagctacagcctggtgctgggctacctgggcagctgcctgctgctgctgggcggcttcagcctggccctgagcttcgccccctggtgcgacgagagatgcagaagaagaagaaagggccccagcgccggccccagaagaagcagcgtgagcaccatccaggtggagtggcccgagcccgacctggcccccgccatcaagtactacagcgacggccagcacagacccccccccgcccagcacagaaagcccaagcccaagcccaaggtgggcttccccatgcccagacccagacccaaggcctacaccaacagcgtggacgtgctggacggcgagggctgggagagccaggacgcccccagctgcagcacccacccctgcgacagcagcctgccctgcgacagcgacctgtag

SEQ ID NO: 258329 - DNA, 879 bp, Artificial Sequence
  derived and/or modified sequence
atgcggaccccggtggtaatgactctagggatggtgctagccccttgcgggcttctcctgaatctcaccggaacccttgcccctgggtggagactggttaaaggctttttgaaccaacccgttgacgtcgaactttaccagggcctgtgggatatgtgtcgggagcagtcctcccgagaacgggaatgcggacagaccgaccaatggggctactttgaggctcagccggtgctggtggcacgggctctgatggtgacctccctcgccgccaccgtgctcggcctcctcctggccagcttgggggtgcgctgttggcaggacgagccaaacttcgtgcttgccgggctaagcggcgtggtgctttttgtagctggactcctcgggctcattcctgtgtcctggtacaaccacttcctgggggatcgggatgtacttccagctcctgcctctcccgttaccgtgcaagtatcctactctctggtgctcggctacctgggatcttgcctgctgcttctgggcggcttcagcctggctcttagctttgccccatggtgtgacgagcgatgccgccgcagaaggaagggcccatcggctggcccacgtcggtcgtcagtgtccacaattcaggtggaatggcctgagccagatttggctcctgctattaagtattacagcgatggtcagcaccgcccaccacccgcccagcacaggaagcccaaacctaagccgaaagttgggttccctatgccacgtccccggccaaaggcctataccaattccgtggacgtcctcgatggcgagggttgggaaagccaggacgccccctcgtgttctacccacccctgtgactctagcctgccttgtgattcggatctgtag

SEQ ID NO: 258330 - DNA, 879 bp, Artificial Sequence
  derived and/or modified sequence
atgaggacccctgtggtgatgaccctgggcatggtgctggccccctgtggcctgctgctgaacctgaccggcaccctggcccctggctggaggctggtgaagggcttcctgaaccagcctgtggatgtggagctgtaccagggcctgtgggacatgtgccgggagcagagcagccgggagcgggagtgtggccagacagaccagtggggctactttgaggcccagcctgtgctggtggcccgggccctgatggtgaccagcctggccgccaccgtgctgggcctgctgctggccagcctgggcgtgcgctgctggcaggatgagcccaactttgtgctggccggcctgtctggagtggtgctgtttgtggccggcctgctgggcctcatccctgtgtcctggtacaaccacttcctgggggacagagatgtgctgcctgccccagccagccctgtgacagtgcaggtgtcctacagcctggtgctgggctacctgggcagctgcctgctgctgctgggcggcttcagcctggccctgagctttgccccctggtgtgatgagcgctgcagaagaagaaggaagggccccagcgctggccccaggaggagctctgtgtccaccatccaggtggagtggccagagccagacctggccccagccatcaagtactacagtgatggccagcacaggcctcctccagcccagcacaggaagcccaagcccaagcccaaggtgggcttccccatgccccggccccggcccaaggcctacaccaacagcgtggatgtgctggatggagagggctgggagagccaggatgcccccagctgcagcacccacccctgtgacagcagcctgccctgtgacagcgacctgtag

SEQ ID NO: 258331 - DNA, 879 bp, Artificial Sequence
  derived and/or modified sequence
atgcggacccccgtggtgatgaccctgggcatggtgctggccccctgcggacttctgcttaacctcactgggactctggcaccaggatggagactggtgaaagggtttcttaaccagcctgttgacgtggagctctatcagggcctctgggacatgtgcagagaacagtcttctcgtgagcgcgagtgcggccagacagatcagtggggctactttgaagcccagcccgtcctggtcgccagggctctgatggtaacgagtctcgcagccactgtcctgggacttcttctcgcctcccttggggtgaggtgttggcaggacgagccgaacttcgtgttggcagggttaagtggtgtggtcttgtttgtcgccggtcttctcgggctaatccctgtttcgtggtataaccattttcttggcgacagagatgttctacctgcccctgcctcccccgtcaccgtccaggtgagctattcgctggtcttagggtacctggggtcttgtctcctgctgcttggtggattcagcttggccctttccttcgccccctggtgcgatgaacggtgtcgccgccgccggaaaggccctagcgccggaccgcggaggtcgtctgtgtccaccatccaggtggagtggcctgaaccagacctcgcccctgcgatcaagtactacagcgacggccaacacaggcctccgcccgcccagcatagaaagcctaagccaaagcctaaagtgggctttcccatgcccaggccacgccccaaggcatacacaaacagcgtggacgtgctggacggcgaggggtgggagagtcaggacgccccgagctgcagtacacatccttgcgatagtagtctgccgtgcgatagcgatctttag

SEQ ID NO: 258332 - DNA, 879 bp, Artificial Sequence
  derived and/or modified sequence
atgaggacccccgtggtgatgactctggggatggttttggccccttgtggtctgcttctaaaccttacgggaacacttgctcctggctggcgtttagtcaaaggttttctcaaccagcccgtcgatgtcgagctgtatcagggtttgtgggacatgtgtcgggaacagagttcccgtgaacgtgagtgtggtcagactgaccagtgggggtatttcgaggcccaacccgtgctggtcgcacgcgctctgatggtgacctccctcgccgctacagtcctggggctgctactggcatccctcggagttcgatgttggcaggatgagcccaactttgtactggccggactttctggggtcgttctgtttgtcgcaggcttattaggccttatccccgtttcgtggtataatcactttctgggagatcgtgatgtgttacccgcacctgcctctcctgtaacagtccaggtttcatatagcctggtcctaggctatctggggtcatgcctcctcctgctcgggggtttcagcctggccctgtcttttgctccttggtgcgatgaacgctgtcgtagacgaagaaaaggaccaagtgccggaccgagaaggtccagcgtttccactattcaggtagaatggcctgagccagacctggccccagctatcaaatactactctgacggacagcataggccccctccagcacaacaccgcaaacctaaacccaaaccaaaggtcggcttcccgatgcctcgtcccagaccgaaagcctatacaaacagtgtcgacgttctggatggtgaaggatgggaatcacaggacgcaccttcgtgttctacccatccttgcgactccagcctgccatgcgactccgacttgtag

SEQ ID NO: 258333 - protein, 352 aa, Artificial Sequence
  derived and/or modified sequence
MDFREILMIASKGQGVNNVPKRYSLAVGPPKKDPKVKGVQSAAVQAFLKRKEEELRRKALEEKRRKEELVKKRIELKHDKKARAMAKRTKDNFHGYNGIPIEEKSKKRQATESHTSQGTDREYEMEEENEFLEYNHAESEQEYEEEQEPPKVESKPKVPLKSAPPPMNFTDLLRLAEKKQFEPVEIKVVKKSEERPMTAEELREREFLERKHRRKKLETDGKLPPTVSKKAPSQKESVGTKLSKGSGDRHPSSKGMPLPHAEKKSRPSMANEKHLALSSSKSMPGERIKAGSGNSSQPSLREGHDKPVFNGAGKPHSSTSSPKHVWKENKYMKRDWLFYFQCIEYIRLLFIF

SEQ ID NO: 258334 - protein, 685 aa, Artificial Sequence
  derived and/or modified sequence
MDFREILMIASKGQGVNNVPKRYSLAVGPPKKDPKVKGVQSAAVQAFLKRKEEELRRKALEEKRRKEELVKKRIELKHDKKARAMAKRTKDNFHGYNGIPIEEKSKKRQATESHTSQGTDREYEMEEENEFLEYNHAESEQEYEEEQEPPKVESKPKVPLKSAPPPMNFTDLLRLAEKKQFEPVEIKVVKKSEERPMTAEELREREFLERKHRRKKLETDGKLPPTVSKKAPSQKESVGTKLSKGSGDRHPSSKGMPLPHAEKKSRPSMANEKHLALSSSKSMPGERIKAGSGNSSQPSLREGHDKPVFNGAGKPHSSTSSPSVPKTSASRTQKSAVEHKAKKSLSHPSHSRPGPMVTPHNKAKSPGVRQPGSSSSSAPGQPSTGVARPTVSSGPVPRRQNGSSSSGPERSISGSKKPTNDSNPSRRTVSGTCGPGQPASSSGGPGRPISGSVSSARPLGSSRGPGRPVSSPHELRRPVSGLGPPGRSVSGPGRSISGSIPAGRTVSNSVPGRPVSSLGPGQTVSSSGPTIKPKCTVVSETISSKNIISRSSNGQMNGMKPPLSGYRAAQGPQRLPFPTGYKRQREYEEEDDDDDEYDSEMEDFIEDEGEPQEEISKHIREIFGYDRKKYKDESDYALRYMESSWKEQQKEEAKSLRLGMQEDLEEMRREEEEMQRRRAKKLKRR

SEQ ID NO: 258335 - DNA, 1059 bp, Artificial Sequence
  derived and/or modified sequence
atggacttcagagagatcctgatgatcgccagcaagggccagggcgtgaacaacgtgcccaagagatacagcctggccgtgggcccccccaagaaggaccccaaggtgaagggcgtgcagagcgccgccgtgcaggccttcctgaagagaaaggaggaggagctgagaagaaaggccctggaggagaagagaagaaaggaggagctggtgaagaagagaatcgagctgaagcacgacaagaaggccagagccatggccaagagaaccaaggacaacttccacggctacaacggcatccccatcgaggagaagagcaagaagagacaggccaccgagagccacaccagccagggcaccgacagagagtacgagatggaggaggagaacgagttcctggagtacaaccacgccgagagcgagcaggagtacgaggaggagcaggagccccccaaggtggagagcaagcccaaggtgcccctgaagagcgcccccccccccatgaacttcaccgacctgctgagactggccgagaagaagcagttcgagcccgtggagatcaaggtggtgaagaagagcgaggagagacccatgaccgccgaggagctgagagagagagagttcctggagagaaagcacagaagaaagaagctggagaccgacggcaagctgccccccaccgtgagcaagaaggcccccagccagaaggagagcgtgggcaccaagctgagcaagggcagcggcgacagacaccccagcagcaagggcatgcccctgccccacgccgagaagaagagcagacccagcatggccaacgagaagcacctggccctgagcagcagcaagagcatgcccggcgagagaatcaaggccggcagcggcaacagcagccagcccagcctgagagagggccacgacaagcccgtgttcaacggcgccggcaagccccacagcagcaccagcagccccaagcacgtgtggaaggagaacaagtacatgaagagagactggctgttctacttccagtgcatcgagtacatcagactgctgttcatcttctag

SEQ ID NO: 258336 - DNA, 2058 bp, Artificial Sequence
  derived and/or modified sequence
atggacttcagagagatcctgatgatcgccagcaagggccagggcgtgaacaacgtgcccaagagatacagcctggccgtgggcccccccaagaaggaccccaaggtgaagggcgtgcagagcgccgccgtgcaggccttcctgaagagaaaggaggaggagctgagaagaaaggccctggaggagaagagaagaaaggaggagctggtgaagaagagaatcgagctgaagcacgacaagaaggccagagccatggccaagagaaccaaggacaacttccacggctacaacggcatccccatcgaggagaagagcaagaagagacaggccaccgagagccacaccagccagggcaccgacagagagtacgagatggaggaggagaacgagttcctggagtacaaccacgccgagagcgagcaggagtacgaggaggagcaggagccccccaaggtggagagcaagcccaaggtgcccctgaagagcgcccccccccccatgaacttcaccgacctgctgagactggccgagaagaagcagttcgagcccgtggagatcaaggtggtgaagaagagcgaggagagacccatgaccgccgaggagctgagagagagagagttcctggagagaaagcacagaagaaagaagctggagaccgacggcaagctgccccccaccgtgagcaagaaggcccccagccagaaggagagcgtgggcaccaagctgagcaagggcagcggcgacagacaccccagcagcaagggcatgcccctgccccacgccgagaagaagagcagacccagcatggccaacgagaagcacctggccctgagcagcagcaagagcatgcccggcgagagaatcaaggccggcagcggcaacagcagccagcccagcctgagagagggccacgacaagcccgtgttcaacggcgccggcaagccccacagcagcaccagcagccccagcgtgcccaagaccagcgccagcagaacccagaagagcgccgtggagcacaaggccaagaagagcctgagccaccccagccacagcagacccggccccatggtgaccccccacaacaaggccaagagccccggcgtgagacagcccggcagcagcagcagcagcgcccccggccagcccagcaccggcgtggccagacccaccgtgagcagcggccccgtgcccagaagacagaacggcagcagcagcagcggccccgagagaagcatcagcggcagcaagaagcccaccaacgacagcaaccccagcagaagaaccgtgagcggcacctgcggccccggccagcccgccagcagcagcggcggccccggcagacccatcagcggcagcgtgagcagcgccagacccctgggcagcagcagaggccccggcagacccgtgagcagcccccacgagctgagaagacccgtgagcggcctgggcccccccggcagaagcgtgagcggccccggcagaagcatcagcggcagcatccccgccggcagaaccgtgagcaacagcgtgcccggcagacccgtgagcagcctgggccccggccagaccgtgagcagcagcggccccaccatcaagcccaagtgcaccgtggtgagcgagaccatcagcagcaagaacatcatcagcagaagcagcaacggccagatgaacggcatgaagccccccctgagcggctacagagccgcccagggcccccagagactgcccttccccaccggctacaagagacagagagagtacgaggaggaggacgacgacgacgacgagtacgacagcgagatggaggacttcatcgaggacgagggcgagccccaggaggagatcagcaagcacatcagagagatcttcggctacgacagaaagaagtacaaggacgagagcgactacgccctgagatacatggagagcagctggaaggagcagcagaaggaggaggccaagagcctgagactgggcatgcaggaggacctggaggagatgagaagagaggaggaggagatgcagagaagaagagccaagaagctgaagagaagatag

SEQ ID NO: 258337 - DNA, 1059 bp, Artificial Sequence
  derived and/or modified sequence
atggacttcagggagattcttatgattgcgagcaagggccaaggcgtgaacaacgtacctaagcgttactctctggccgtgggaccacctaagaaggatcccaaagtgaagggagtccagagcgcggccgtgcaggccttcttgaagcgcaaagaagaggaactgaggcggaaagccctcgaagaaaaaagacgcaaggaggaacttgtcaagaaacgcattgagctgaagcatgataagaaggccagggccatggccaaacgtaccaaggacaacttccacggatacaacgggattcctatagaggagaaatcaaagaagcgccaggcgaccgaaagccacacctcccaaggaactgaccgcgagtacgagatggaggaagagaatgaatttcttgaatacaatcacgcagagtcggagcaagagtacgaggaggagcaggagccgcctaaggtggaaagcaagccaaaggtgcctttaaaaagcgcccccccccctatgaactttacagacctgttgaggctggctgagaagaagcaattcgaaccggtggagattaaagtggttaaaaagtctgaggagaggcctatgacagcagaggagctgagagagagggagtttctggaaaggaagcataggaggaagaaactagaaacagacggaaagcttccaccaacggtgtctaaaaaggccccatcacagaaagaatccgtagggaccaagctaagcaaaggaagcggcgataggcacccttctagtaaggggatgcccctgccgcatgccgagaagaaatcgagaccctcaatggcaaatgagaaacacctcgcccttagtagctccaaatctatgcccggcgagagaattaaggccggctctgggaactcatctcagccctcactcagagaggggcacgacaaaccagtgttcaatggtgcgggcaagcctcatagtagtacatctagcccaaagcatgtctggaaggaaaacaaatatatgaaaagggactggctcttttattttcagtgcattgagtatattagactgctattcatcttttag

SEQ ID NO: 258338 - DNA, 2058 bp, Artificial Sequence
  derived and/or modified sequence
atggattttagggagattctaatgatagcttcaaaaggccagggggtaaataatgttccaaaaaggtatagcctcgccgttggtccccctaagaaagacccaaaagtgaaaggcgtgcagtcggccgccgtgcaggcgtttctaaagcggaaagaggaggaattgagacgtaaggcgttggaagagaagcgccgaaaggaggaactcgtgaaaaaacggatagagctgaagcatgacaaaaaagcacgggcaatggcaaaacgcaccaaggataatttccatggatacaatggcataccgattgaagagaaatctaagaaacgccaggctaccgaaagccacacgtctcagggaactgaccgcgaatacgaaatggaggaagagaacgaatttttggagtataaccatgcagaatccgagcaggagtacgaggaagaacaggaacctcccaaggtcgaatcaaagccaaaggtgcccctgaaaagcgcgcccccacccatgaacttcacagacctgctgaggctggccgaaaaaaaacagtttgaaccggtcgaaataaaagtggttaagaagtccgaagaacgcccaatgaccgctgaagagctacgggagcgggagtttttggagcgtaagcaccggcgcaagaagctcgaaactgacgggaagttacctcccacagtgtccaagaaagcaccttcccagaaggagagtgtgggtactaaactttcaaaaggatctggcgacagacatcctagtagtaaaggtatgccactgccacacgctgagaaaaaatctcggccttctatggccaacgagaaacacctggccttgagtagctcgaagtccatgcccggagaacgcatcaaggctggatctggaaactcatcccagccctccctgagggaggggcacgacaaacctgtgtttaacggtgccggaaaacctcactcaagcactagtagcccctctgtgccgaagaccagcgcaagtcgtacccagaagtctgctgtagaacacaaggcgaagaaatcactgtctcacccctcacactctcgtccaggtcctatggtaactccccataacaaggctaaaagtcctggcgtccgacagccaggatcatcgtcctcgagcgccccagggcagccatccacgggtgtagctcggcctacagtaagctcaggacccgtcccgaggaggcagaacgggtcctcctcatctgggccggaaagatctatttcggggtctaagaaacccaccaatgatagcaaccccagtcggagaaccgtttctggaacctgcgggccaggacagcctgccagcagtagcggagggccggggagaccgatttcaggatcagtgtcgtcggctagaccactggggtccagccgagggccagggcggcccgtgtctagcccccacgagctgcggcgccctgtcagcggcctaggcccgcccggacgcagtgtcagtggaccaggcaggagcatttctgggtctatccccgcaggccgaacagtctctaactcagtacctggtcgacctgtttccagtcttggaccagggcagactgttagttcatccggaccgacaattaaacccaagtgcaccgttgtgtctgaaaccatcagttccaagaatatcatctcgcgttcaagcaatggacagatgaacggcatgaaaccaccactgagcggctatagagccgcacaggggccacagaggttgccatttcctactggatacaaaaggcaacgagaatacgaagaagaggacgacgacgatgacgagtatgactccgagatggaggacttcatcgaagacgagggcgaaccccaagaggaaatctcaaaacacatcagagaaatttttggctatgatagaaaaaaatacaaggatgaaagcgattacgctctccggtacatggaatcctcttggaaggagcaacaaaaggaggaggctaagtccctgcgtctgggcatgcaggaggatctagaagaaatgcgccgcgaggaggaagaaatgcagcggcgccgggcaaagaaactgaagcgaagatag

SEQ ID NO: 258339 - DNA, 1059 bp, Artificial Sequence
  derived and/or modified sequence
atggacttccgggagatcctgatgattgccagcaagggccagggcgtgaacaacgtgcccaagcgctacagcctggccgtgggcccccccaagaaggaccccaaggtgaagggcgtgcagagcgctgctgtgcaggccttcctgaagaggaaggaggaggagctgcggaggaaggccctggaggagaagaggaggaaggaggagctggtgaagaagagaattgagctgaagcatgacaagaaggcccgggccatggccaagaggaccaaggacaacttccacggctacaacggcatccccatcgaggagaagagcaagaagaggcaggccacagagagccacaccagccagggcacagaccgggagtatgagatggaggaggagaatgagttcctggagtacaaccacgccgagagcgagcaggagtatgaggaggagcaggagccccccaaggtggagagcaagcccaaggtgcccctgaagagcgcccccccacccatgaacttcacagacctgctgcggctggccgagaagaagcagtttgagcctgtggagatcaaggtggtgaagaagtctgaggagcggcccatgacagctgaggagctgcgggagcgggagttcctggagaggaagcacaggaggaagaagctggagacagatggcaagctgccccccaccgtgtccaagaaggcccccagccagaaggagagcgtgggcaccaagctgagcaagggcagcggggacagacaccccagcagcaagggcatgcccctgccccatgctgagaagaagagccggcccagcatggccaatgagaagcacctggccctgagcagcagcaagtccatgcctggagagcgcatcaaggccggcagcggcaacagcagccagcccagcctgcgggagggccatgacaagcctgtgttcaacggggccggcaagccccacagcagcaccagcagccccaagcacgtgtggaaggagaacaagtacatgaagagggactggctgttctacttccagtgcatcgagtacatccggctgctcttcatcttctag

SEQ ID NO: 258340 - DNA, 2058 bp, Artificial Sequence
  derived and/or modified sequence
atggacttccgggagatcctgatgattgccagcaagggccagggcgtgaacaacgtgcccaagcgctacagcctggccgtgggcccccccaagaaggaccccaaggtgaagggcgtgcagagcgctgctgtgcaggccttcctgaagaggaaggaggaggagctgcggaggaaggccctggaggagaagaggaggaaggaggagctggtgaagaagagaattgagctgaagcatgacaagaaggcccgggccatggccaagaggaccaaggacaacttccacggctacaacggcatccccatcgaggagaagagcaagaagaggcaggccacagagagccacaccagccagggcacagaccgggagtatgagatggaggaggagaatgagttcctggagtacaaccacgccgagagcgagcaggagtatgaggaggagcaggagccccccaaggtggagagcaagcccaaggtgcccctgaagagcgcccccccacccatgaacttcacagacctgctgcggctggccgagaagaagcagtttgagcctgtggagatcaaggtggtgaagaagtctgaggagcggcccatgacagctgaggagctgcgggagcgggagttcctggagaggaagcacaggaggaagaagctggagacagatggcaagctgccccccaccgtgtccaagaaggcccccagccagaaggagagcgtgggcaccaagctgagcaagggcagcggggacagacaccccagcagcaagggcatgcccctgccccatgctgagaagaagagccggcccagcatggccaatgagaagcacctggccctgagcagcagcaagtccatgcctggagagcgcatcaaggccggcagcggcaacagcagccagcccagcctgcgggagggccatgacaagcctgtgttcaacggggccggcaagccccacagcagcaccagcagccccagcgtgcccaagaccagcgccagcaggacccagaagtctgctgtggagcacaaggccaagaagagcctgagccaccccagccacagcaggcctggccccatggtgaccccccacaacaaggccaagagccctggggtgcggcagcccggcagcagcagcagcagcgcccctggccagcccagcactggagtggcccggcccaccgtgagcagcggccctgtgccccggcggcagaatggcagcagcagcagcggccctgagaggagcatcagcggcagcaagaagcccaccaatgacagcaaccccagcagaagaacagtgtctggcacctgtggccctggccagcctgccagcagcagcggcggccctggccggcccatcagcggctctgtgtcctctgcccggcccctgggcagcagccggggccctggccggcctgtgagcagcccccatgagctgcggcggcctgtgtctggcctgggccccccaggccgctctgtgtctggccctggccgcagcatcagcggcagcatcccagctggccgcacagtgagcaacagcgtgcccggccggcctgtgagcagcctgggccctggccagacagtgagcagcagcggccccaccatcaagcccaagtgcaccgtggtgtctgagaccatcagcagcaagaacatcatcagccgcagcagcaatggccagatgaatggcatgaagccacccctgagcggctaccgggccgcccagggcccccagaggctgcccttccccaccggctacaagaggcagcgggagtatgaggaggaggatgatgatgatgatgaatatgattctgagatggaggacttcattgaagatgaaggagagccccaggaggagatcagcaagcacatccgggagatcttcggctatgacaggaagaagtacaaggatgaaagtgactatgccctgcgctacatggagagctcctggaaggagcagcagaaggaggaggccaagagcctgcggctgggcatgcaggaggacctggaggagatgaggcgggaggaggaggagatgcagaggagaagagccaagaagctgaagagaagatag

SEQ ID NO: 258341 - DNA, 1059 bp, Artificial Sequence
  derived and/or modified sequence
atggacttccgggagatcctgatgatcgccagcaagggccagggcgtgaataatgtacctaaacgctatagtcttgctgtggggccaccgaaaaaagaccctaaagtgaagggcgtacagagcgcagccgtgcaagcttttctgaagaggaaagaggaggaactgcggcgaaaggctctcgaggagaaaagaagaaaagaagagctggtgaagaagagaatcgaactaaaacatgacaaaaaggcccgggccatggccaagaggactaaagacaattttcatggctataatgggattccaattgaggagaagtcgaagaaaagacaggccactgaaagccatacaagtcaaggtaccgatagagagtacgagatggaggaggaaaacgagttcctggaatataaccatgccgagtcagagcaggagtatgaggaggagcaagagcctcccaaggtggagtctaagcctaaagtgccactcaagtcagcgcctcccccaatgaacttcaccgatttgttgaggctcgcagaaaagaaacagttcgaacctgttgagatcaaggttgtcaagaagtcggaagagagacctatgactgccgaggagctccgtgagagagagttcctcgagcgcaagcacaggaggaagaaactcgagaccgacggcaagttacccccgacagtctccaagaaggctccaagccagaaggagtccgtggggaccaagcttagcaagggctctggggacagacaccctagttctaaaggaatgccactcccacatgccgaaaagaagagccgcccatctatggccaacgagaaacacctcgctttgtccagctctaaatccatgcctggggaacgcatcaaggccggcagcggaaacagttcccaaccaagcctcagagaagggcacgacaaaccagtgtttaacggagccggtaaaccacactcgtccacctcgagtccaaagcacgtgtggaaggaaaacaaatacatgaagagggattggctgttttattttcagtgtatcgagtatatccgcctactctttattttctag

SEQ ID NO: 258342 - DNA, 2058 bp, Artificial Sequence
  derived and/or modified sequence
atggacttccgggagatcctgatgatcgccagcaagggccagggcgtgaataatgtgcctaaacggtactctttagctgtggggccccccaaaaaggatccaaaggttaagggtgtgcagtcggctgccgtgcaggcatttttgaagcgcaaggaggaggagctgcgccggaaagcgctggaggaaaagagacgcaaagaagagttggtgaagaagaggatcgagctcaagcatgataagaaagcgcgagccatggcaaagcgtaccaaggataacttccatggctacaacggcatccctatcgaggagaaatctaagaagcgccaagccaccgagagccatacttcccaggggaccgaccgggagtacgaaatggaagaggagaacgagttcttggaatacaaccatgctgaaagtgaacaggagtacgaggaggagcaggagccaccaaaggtagaaagcaagccaaaggtccctttaaagtctgctcctccccctatgaacttcacagacctcctcaggctggctgagaaaaagcagttcgagcccgtggaaattaaggtagttaagaaaagcgaggagcgccccatgacagccgaagaactacgcgaacgggagttcctggaaagaaagcacaggcggaagaaactcgaaacagatgggaaattgcccccaaccgtgtccaaaaaagcaccatctcaaaaagagtctgtgggaactaagttatctaaaggttccggagaccggcatccatcctccaaaggaatgccactacctcatgccgaaaagaagtctcgccctagcatggcaaatgagaagcacctggccctttcctcatccaaaagcatgccaggtgaacgtatcaaggccggctccggcaacagctcccagccttcattacgagaagggcatgacaaacctgtttttaatggagccgggaagccccactcttccactagctccccctccgttccaaagacaagtgcctccaggacacagaaatcagcagttgaacacaaggctaagaaatctttgtcccatcctagtcattcacgtccgggaccgatggtaaccccacacaataaagccaagtcgcccggtgttaggcagcccggctcctcaagttcgtccgctcctggacaaccctctactggggtcgcaaggcctacagtcagctctgggcccgtaccccgcagacaaaacggatcgtcttcgagcggacccgagcgcagcatcagcgggtccaaaaaaccaacaaatgactcaaacccaagccgtcggaccgtctccggcacttgcgggcccggccagcccgcctctagctctggaggtcccggcaggcccatttcaggcagcgtttcctctgcaaggccgctaggaagcagtcgcggcccaggaagacccgtgtctagcccacatgagcttaggcggccagtatccggccttggcccaccaggaaggtctgtgagcgggccaggtaggtcgattagtggttcaatacccgccggccgcacagtgtctaattccgtgcctgggcgtccagtgagctctttgggccccgggcaaaccgtgagctccagtgggcccacaatcaaacctaagtgtactgtcgtgagcgagaccatctcctccaaaaacatcatctcaagaagctccaatgggcagatgaatggcatgaagccccctctatcggggtatagagcagcacagggacctcagaggttgccattccctaccggttacaagagacagagggagtacgaagaggaagatgacgatgacgacgagtatgacagcgaaatggaagattttatagaagatgagggggagccccaagaagaaattagcaaacacatcagagaaatattcggctatgaccgcaagaagtacaaagatgagtccgactacgcccttaggtacatggaaagtagctggaaggagcaacaaaaggaagaagccaaaagcctgcgattggggatgcaggaagatctggaagagatgagacgagaggaggaggagatgcagcggcgtcgtgcgaaaaaactcaaacggagatag

SEQ ID NO: 258343 - DNA, 1059 bp, Artificial Sequence
  derived and/or modified sequence
atggacttcagagagatcctaatgatagccagcaagggtcaaggggtgaataatgtccccaagagatactccttggcggtgggacccccaaagaaggatccaaaagtgaaaggcgtccaatccgccgcagtgcaagcctttctaaaacgcaaagaagaagagctccgcaggaaagccctcgaggagaagagaaggaaggaggaactggtcaaaaagaggattgaactcaagcatgataagaaagctcgcgctatggcaaagcggaccaaagacaattttcacggttataatggcatcccaatcgaggagaagtctaaaaagcggcaggcaacggagagtcacacatcccaggggacagacagagaatacgagatggaagaggagaacgagttcctagagtacaaccacgccgagagcgaacaggagtatgaggaggagcaggaacccccaaaagtagaatctaagccaaaagtgccactgaagtccgccccaccccctatgaatttcaccgacctgttgcggctggctgaaaaaaagcagtttgaaccagtggagattaaagtggtgaagaagtccgaggagaggccaatgactgcagaagagctccgtgaacgcgaattcctggaacgtaagcatcggcgtaaaaaactcgaaaccgacggaaagttgccccctacagtctcaaagaaggccccatcccagaaagagagcgtgggtactaagctgtcaaagggctcaggagaccggcatcctagctctaaaggtatgcctcttccgcacgccgagaagaaatctaggcctagcatggccaatgaaaagcacttggctctgagttcctccaaaagcatgcccggtgaacggataaaagctggaagcggaaactcaagtcagccaagtctacgagaaggacacgataagcctgtttttaacggagccggaaagccacatagctccacgtcctcccctaaacacgtatggaaggagaacaaatatatgaagcgtgactggctgttctatttccaatgcatcgagtacatcaggcttctcttcatcttctag

SEQ ID NO: 258344 - DNA, 2058 bp, Artificial Sequence
  derived and/or modified sequence
atggattttcgggagatactcatgatcgctagcaaagggcagggggtcaataacgtccccaagaggtatagtcttgctgtgggccctcccaaaaaggatcccaaagttaagggagtgcagagcgctgcggtccaggcattcctgaagagaaaagaagaggaattgcgtcggaaggcactcgaggagaaacgccgaaaagaagaactggttaaaaagcgaattgaactaaagcacgataagaaagctcgagccatggcaaaacggacgaaggacaactttcacgggtacaatggaattccaatagaagagaagagcaaaaaacgccaggccacagaatcccatactagccagggaaccgatcgggagtatgaaatggaagaagagaatgaattcctcgagtataatcacgccgaaagcgaacaagagtacgaagaggagcaggaaccaccaaaggtagaatctaaacccaaagtgccactgaaaagtgcaccgcctcccatgaactttacagatttactgcgactggcggagaaaaagcagttcgagcccgtcgagataaaagtggtcaaaaaaagcgaagagaggccgatgaccgccgaagaactgagggagagggagtttctcgagcgcaagcataggcgtaaaaagctcgaaactgacggtaaactaccacctactgtgagcaagaaagccccatcccagaaggagtccgtgggcacaaaactgagcaaagggagcggtgacaggcatccctcatcgaaaggcatgcccctgccgcatgcggaaaagaaatctagaccaagcatggccaacgaaaagcatctggcgctttctagtagtaagagcatgccaggtgaaaggatcaaggccggaagcgggaattcatcacagcccagcttacgtgaaggccacgacaagcctgtgtttaacggcgcagggaagcctcattcctccacttcctccccgtcggtgcctaagaccagcgctagtagaactcagaagagcgctgtggagcacaaagcaaaaaaaagtctgtcccaccccagtcacagccgccctggcccaatggtaacgcctcataacaaagctaagtctccgggagttcggcaacccggatcatcatcgagctccgccccagggcagccgtctaccggtgtggctcgtcctactgttagctcaggtccggtgccgaggcgacagaatgggtcctcttcttctggtcccgaacgttcaatcagcgggagcaagaagcccactaacgattccaacccaagcaggaggaccgttagtggcacttgcgggcctggtcaacccgcaagttcgtcaggcggacctggaaggccaatttcaggaagtgtttcctctgctagacccctcggctcttccaggggcccaggaagaccggtgagcagtccacatgaactcaggaggcccgtgagcggcttaggacctcctggcaggtcagtctctggccctggcaggtccatttcagggtctataccagcagggagaaccgtgtcaaactccgtgccgggtagacctgtgtcatccctgggtcctgggcagaccgtgagcagtagtggaccaactattaagcccaagtgcacagtggtgtccgagactataagtagcaagaacattatcagtcgctcctctaacgggcaaatgaacggcatgaagccacctctgagtggatacagagccgctcaggggccacagaggctgccatttcctaccggttataagcgccaacgcgagtacgaggaggaagatgatgatgatgacgagtacgattcggaaatggaggactttattgaagacgagggggaaccacaggaagaaatctctaaacatatcagggaaatctttggatatgaccgtaagaaatataaagacgaaagcgactacgcccttaggtatatggaatctagctggaaggagcagcagaaggaggaagccaagagcctccgcctcggaatgcaggaggatctggaggagatgcgtcgcgaggaggaggagatgcagcgaagacgggcaaagaagctgaagcgcagatag

SEQ ID NO: 258345 - DNA, 1275 bp, Artificial Sequence
  derived and/or modified sequence
ggactcgcgagcgctgtggcggccctgaaaggatataggccgtggagggaagggggcgggcagacggcataggaaggcgccggaagtggtcccgcagaggcggggtgggagtggggctcccgaggcagtgcagttggctgtagctgggcgcctcggttaggtgcgctgtcagtcctttccgagtgcctggcccagtctctcccgcctcggcccaacatggacttcagagaaattctcatgatagcttccaagggacaaggtgtcaacaatgtgccgaaaaggtatagtttggcagtggggcctccaaaaaaagacccaaaagttaaaggtgtccaatcagcagctgtacaagcttttcttaaaaggaaagaagaggagctgagacgaaaagccttagaggagaaaaggagaaaagaggaactagtgaaaaagcgaattgagctcaaacatgacaagaaagcaagagctatggccaagaggacaaaggataatttccatggttacaatgggattcctattgaggaaaagtcaaagaagaggcaggcaacagaaagccataccagccaaggaaccgaccgagagtatgaaatggaagaagagaatgaattcctcgagtacaatcacgcagagtcagagcaggagtatgaggaagagcaagaacctcccaaagttgaaagcaaaccaaaggtcccccttaaaagtgccccaccacccatgaacttcactgatttactcaggctggctgagaaaaagcagtttgaaccagtggaaatcaaggtagtgaagaaatcagaagagcgacctatgaccgcagaagaacttagggagcgagaattccttgaacgaaagcataggagaaaaaaacttgagacagatggaaaactacctccaactgtgtccaaaaaggcaccctctcagaaagaaagtgtgggcacaaaacttagcaaaggttctggagacaggcatccttcttccaaaggaatgccccttcctcatgctgagaagaaatcaagacccagcatggccaatgagaaacacctcgctttgtcttcatccaaatccatgccaggagagaggatcaaggcaggatctggcaatagctcccaaccctcacttcgtgagggccacgacaaacctgtttttaatggagctggaaagcctcattccagcacctcttcaccaaaacatgtttggaaagagaataaatatatgaagagagactggttgttttattttcaatgtattgaatatattagactactatttattttctga

SEQ ID NO: 258346 - DNA, 5754 bp, Artificial Sequence
  derived and/or modified sequence
taaaagcggaagttacgcagggactcgcgagcgctgtggcggccctgaaaggatataggccgtggagggaagggggcgggcagacggcataggaaggcgccggaagtggtcccgcagaggcggggtgggagtggggctcccgaggcagtgcagttggctgtagctgggcgcctcggttaggtgcgctgtcagtcctttccgagtgcctggcccagtctctcccgcctcggcccaacatggacttcagagaaattctcatgatagcttccaagggacaaggtgtcaacaatgtgccgaaaaggtatagtttggcagtggggcctccaaaaaaagacccaaaagttaaaggtgtccaatcagcagctgtacaagcttttcttaaaaggaaagaagaggagctgagacgaaaagccttagaggagaaaaggagaaaagaggaactagtgaaaaagcgaattgagctcaaacatgacaagaaagcaagagctatggccaagaggacaaaggataatttccatggttacaatgggattcctattgaggaaaagtcaaagaagaggcaggcaacagaaagccataccagccaaggaaccgaccgagagtatgaaatggaagaagagaatgaattcctcgagtacaatcacgcagagtcagagcaggagtatgaggaagagcaagaacctcccaaagttgaaagcaaaccaaaggtcccccttaaaagtgccccaccacccatgaacttcactgatttactcaggctggctgagaaaaagcagtttgaaccagtggaaatcaaggtagtgaagaaatcagaagagcgacctatgaccgcagaagaacttagggagcgagaattccttgaacgaaagcataggagaaaaaaacttgagacagatggaaaactacctccaactgtgtccaaaaaggcaccctctcagaaagaaagtgtgggcacaaaacttagcaaaggttctggagacaggcatccttcttccaaaggaatgccccttcctcatgctgagaagaaatcaagacccagcatggccaatgagaaacacctcgctttgtcttcatccaaatccatgccaggagagaggatcaaggcaggatctggcaatagctcccaaccctcacttcgtgagggccacgacaaacctgtttttaatggagctggaaagcctcattccagcacctcttcaccaagtgtcccaaagacttctgctagcaggactcagaaatctgctgttgagcacaaagccaaaaaatctctgtcccatcctagccattccaggcctgggcccatggtcaccccacacaataaggctaagagtccaggtgtcaggcagccaggcagcagctctagctcagcccctgggcagcccagcacaggggttgctcgacccacagttagttctggccctgtgcctaggcgccagaatggcagctccagctcaggacctgagcgatcaatcagtgggtccaagaagccaaccaatgactcaaatccctctaggcggacagtcagtggtacatgtggccctggacaacctgcaagcagctcaggtggccctgggcgacccatcagtggttcagttagttctgcaagacccttgggcagctctcgtggccctggccggcctgtgagcagtccacatgaacttcgacgaccagtgagtggcttgggccccccggggcggtctgtcagtggccctgggagatccataagtggctcaattccagctggacggactgtcagtaattcagtcccaggaagaccagtgagcagcttgggacctgggcaaacagttagtagctcaggtcccactataaagcctaagtgcactgttgtctccgaaacaatttcttccaagaatatcattagccggtccagcaatggacagatgaatggaatgaagcctcccctatctggctacagagctgcccaaggtcctcaaaggcttcccttccctactggttacaaaaggcagcgagaatatgaagaggaagatgacgatgatgatgaatacgactctgaaatggaagattttattgaagatgaaggagagcctcaggaagaaatatccaagcacattagagaaatctttggttatgaccgaaaaaaatacaaagatgaaagtgattatgccttacgttacatggaaagtagttggaaagagcagcagaaggaagaagcaaagagcttaagactgggtatgcaagaggacttagaggaaatgagacgtgaagaagaagaaatgcaacgtcgaagggccaagaagctgaagaggcgttagctgctgcttttatttttgtgaaattctagagctgctctgctgcaaggatttcctgccttcagactgaagaagcccccttatcattttagatttatacttgggtactcaaggagaaggaatgcatactgtcatttgcaggctgtcatttgagcataaaatattttcagatattttccagggtgaaatctgtaatgcagatgatataatgcccacttgtgctcttatgaagttaactgttcacagatgccagccttgatcctgatgagctatgcactctaatgtggggccactcaccagtcagccaatcttttattgttcctttgctactttgaaaggaaaaaaaaggttgtctcttgatttctgtaattcttctgctgatctgtgagtagggcactgccctgctcccaatcaaacttagtctttttatgagaaacctggaccttccatgaatgttgccagcaataaagtgacttgtcctaatctatggattgagaacttgaaaatgtagagtagaatttataactatcatatggatgtcatcctgtgactttgaagtacaaagtagaataaattctgtattcatggattggatgctgagcattcttactcattaatttaggtggctaggaattaatgaaaaaattttcaagttaaaatacaggttataacagtataatattcttttctaagttttcctttcagatttactgttatgttggctttagtgtaagacaaggtcactgtgctgattgatttttatctaaaaaaattcatttttatatcgaagaaaaaatattttattcaaacattagatttgaaagagtaatagtttataaaataaggaagtaacatgtgaggctctcccctcctcccctcccccatcataaagatattttgaaatcccaaggtgccctcatacctcttgacattaatgacttcattttttagcttgaatttgttagcaaatattaatggcagaaaaccaaaaactaaatttatggtatcgagagcaccaccttctctttttgcccatattgcactttgatttcaaactatgcactgtgaagagatttttttccccaggtaggaagggatgttccctgttatcgttattttactgagctgtggaaactcatttttaccctttttaaagtcataaatatggacttaatagcccttaaccttcaagtccaagcagttccaatcaggctgacttaggatcatgctggaaggaagccaagtctcaagaactgtcagcaacagaaaatgagatatgatgctagagagcatttgtccttgactgtaagtacagaggcttaggggaagtgagacataagcttgtaggaataataaacgttctacaataaacgttttggctatcttaagccattgtatgggggggattaggaagtaggagggattgtcctacaacaggcccttatacttcaacagcccaaatattttggtttattcctttttatccataaagtctttattcttcaagtttgggtattatagattaccattgttagcctcccttaatgggaccatatgagccaggcttttaagacggactcattttgaattgagtttcaaactttgaaagtgcaaggatttaatttttaagttgaatcccatgaaaggtgtcatcatcactaggaataacaccctttgtaactacatatagaactgttacaatggtagcagaaaatcctattgatttcatctcacccatttcagataccttcagtgaaattaagggtagtgtgatgtcccatgtaataaaacaggcttagaacatcaattcctctgctgccatttatgtgcttttattcccccttcaaaaattttttattggatatatatatttttcagtattcagactctgaaatctgtcattacaatcaagtgcttgtcacagctgaaagatttctggtggcttaaagtttactagcagtaaatttatgatatggtacagttctttgtacagaaaggcaccattatgttagaataaatttccagaacttagtgggaagaatcaggttttaaccttgtgtgtctgttacttctgagtgcatttctataatataaatgttgatttgcgtcaacattataaaagagcacttctgtggctcatttaaaagaaaaaaaaggttaagtcttttaaattttggccttgtttccaaatcctgtcttccatgttgtttttctgcacttcctgaccactcttataaaaagctcacaaacctttgaagaaactggagtaggctgttatttcattaaggtttacaaattaaatgcttgatttttaatgtattctctactgttttgatttttggattttcttaattcaacatttgaagatgtgccttttgggtaatgttaatcacgaatgtagtaatatttcatgattgtaataatgttacatgatcatgggtgtggcattctctaacaaatgatgtgaaaggaaagtagttttcataaaactcatggctctgattgcacagtcccacttgcttttgatattgctatgtcaaagcaaagggcacttcttttaaggctactttcagaactttgtattttcgctaaactataaatgcagttgtgtccagttggaggccagggtaccacatgtcacaggcggccttacatgtgtgccgtgaaaaggttcaaagaccgttaacaaaaaagtaagtctggccgggcatggtggctcaagcctgtaatcccagcactttgggaggccgaggcgggcggatcacttgagaccaggagttcgagaccagcctggccaacatggtgtgagaccccgtctctactaaaaataaaaaaattagccgggtgcggtggcacacacctgtaatcccagctaccggggaggctgaggcaggagaatcgctagaacctgggaggcggaggttgcagtcagccaagatagcaccactgcactccaggctgggtgacagagcgagactccatgtcaaaaaaaaaagaatgtgggaactcaaattttcatttttaatgtaatccccaagattttctccaagaaataaattgttgttttgtattttgtaacttaaaagcagctattggtaaatttctgagatatagcaggagaccaaaacatgtttggaaagagaataaatatatgaagagagactggttgttttattttcaatgtattgaatatattagactactatttattttctgagtggatgtgattaaatattcagacgtttagtgtatgattaagagtgagatagagatttctttggagtaattaaatccatcctgtcttttacacaatggacaaatcaagttaaaaaaatttttagatagcttagcttgttttctggtgctgttgacctgcaagagaatatacttttgcatatacaggtgaaagttttgcaatttatgtatacaagaaattgtaggcattaaaaatattttattgata

SEQ ID NO: 258347 - protein, 611 aa, Artificial Sequence
  derived and/or modified sequence
MASVQQGEKQLFEKFWRGTFKAVATPRPESIIVASITARKPLPRTEPQNNPVVPAQDGPSEKLGQHLATEPLGTNSWERDKTCRELGATRGHSASHDKDLTPPPSSRGKKKKKKSTRKKRRRSSSYSPSPVKKKKKKSSKKHKRRRSFSKKRRHSSSSPKSKRRDEKRHKKQSRSRPRKSHRHRHHRCPSRSQSSESRPSSCESRHRGRSPEEGQKSRRRHSRRCSKTLCKDSPEAQSSRPPSQPLQMLGYLSARGVITGSGSAADLFTKTASPLTTSRGRSQEYDSGNDTSSPPSTQTSSARSRGQEKGSPSGGLSKSRELNSGNTSDSGNSFTTSSPQNKGAMLENLSPTSRGRESRGFQSPCLECAEVKKSSLVPSTARSSPMKGCSRSSSYASTRSSSHSSRSPNPRASPRYTQSRSTSSEKRSYSRSPSYSSKSGKRSPPSRSSRSRRSPSYSRYSPSRERDPKYSEKDSQQRERERARRRRRSYSPMRKRRRDSPSHLEARRITSARKRPIPYYRPSPSSSGSLSSTSSWYSSSSSRSASRSYSRSRSRSRSRRRSRTRTSSSSSSRSPSPGSRSRSRSRSRSRSRSRSQSRSYSSADSYSSTRR

SEQ ID NO: 258348 - DNA, 660 bp, Artificial Sequence
  derived and/or modified sequence
atgggctgctgcggctgcagcggcggctgcggcagcggctgcggcgggtgtggctccggttgtggcgggtgcgggtctggttgcggtggttgtggctccgggtgtggcgggtgtggctctggatgtggcggatgcggctcaagttgttgtgtgccgatctgctgctgtaagccagtgtgctgttgcgttcctgcgtgcagctgctcttcgtgtggcagctgtggcggaagtaaaggaggatacgggagctgtgggggatcaaagggcggctgtgtttcatgcggggggtccaaggggggctgtggcagttgcgggggatctaaggggggctgtggctcgtgcggtggttctaaaggcggctgcgggtcttgtggcggaagtaagggcggttgtggaagctgcggctgtagccagtgtagctgttgcaagccttgttgtttctcttcaggttgcggtagctcctgctgtcaatcctcatgttgtaaaccttcatgttgtcagtcatcttgttgcaagccttattgttgtcagtccagttgctgtaagccttgctgttcctcaagcgggtgcgggtcttcttgctgccagtcatcatgctgcaacccttgttgctctcagtcaagctgctgcgtgccagtctgctgccagtgtaaaatttag

SEQ ID NO: 258349 - DNA, 1836 bp, Artificial Sequence
  derived and/or modified sequence
atggcaagcgtgcagcagggtgagaaacagttattcgagaagttctggcgaggcaccttcaaagctgtggccactccaaggcccgaatcaattattgtggcgtctatcaccgcgcgaaagccgttgccccggacagaacctcagaataatccggtagtgcccgctcaagacggcccctctgaaaaactcgggcagcacctggctacagaacccttggggaccaactcctgggaacgtgataaaacttgccgagaacttggcgccaccagaggccactccgcgtcgcacgataaggatctgactccccccccgtcctccaggggcaagaagaaaaagaagaaatccaccagaaagaagcgtaggagaagttcgtcttattcacccagcccagtcaagaagaagaaaaagaagtcatcgaagaaacataaacggcggcgcagctttagcaagaagagacgccatagctcttcgagtcctaagtccaagcgacgcgacgagaaacgacacaagaagcagtcccggtcgcggccacgaaagagtcacaggcatcggcaccatcgctgcccaagcagaagtcagagctccgagagcaggccgagctcttgtgagagccgtcaccgagggaggagtcccgaggagggtcagaagagcagaagaagacactcacggcgctgttccaaaacgttgtgcaaggactccccagaggcccagtcctccagacccccttctcagccactgcagatgttgggctacttatccgcccgcggagtcattactgggtctggatccgctgctgatctgttcaccaagacggcctctccactaacgacctccaggggcagatcacaagaatacgacagtggtaatgatacttctagtccccccagcacgcagacaagctcagcacgctcccggggccaggagaaaggctcaccgagcggaggattatcgaaatcccgggagctgaattctgggaacacgagtgacagtgggaattcattcaccacatcctcccctcagaataaaggggcgatgctggagaatctctcccctacgagccgggggagagaatcacggggcttccaatcaccgtgtctcgagtgcgccgaggttaagaagtcttcactggtccccagcaccgccaggtccagccctatgaaaggatgctccaggtcctcatcgtatgcttcgactagatcctcatcacattcttcacggagcccaaatccccgtgcttcgcctcggtacacgcaatctagatctacatctagtgaaaaacgaagttacagtcggagtccttcctattcctctaaatccggaaaacggagccccccaagccggagttcccgctctagaaggtccccctcatatagtaggtatagtccaagtcgagagcgggaccccaagtattcggagaaagacagccaacaacgagagcgcgagagggcacgacgacgcagacgctcttacagccctatgcgcaagagaagaagggacagcccgtcccacttagaggcgcgacgcataactagtgcaagaaagcggcctataccctactaccgacccagcccttcctcttcgggctccctgtccagtacaagctcgtggtactcttcaagcagctcccgatccgcgagcaggagctattcgcggtccagaagccggtcacggagcaggaggaggtcgaggacgagaacatcctcaagtagctcttccagatccccgtctcctgggagcaggtccagatcgcgaagccggtctcggagccgttctcggtcccggagccaaagcagaagctactcaagcgccgacagctacagttccacccgtcggtag

SEQ ID NO: 258350 - DNA, 1836 bp, Artificial Sequence
  derived and/or modified sequence
atggcctctgtgcagcagggcgagaagcagctgtttgagaagttctggaggggcaccttcaaggctgtggccacccccaggcctgagagcatcatcgtggccagcatcacagccaggaagcccctgcccaggacagagccccagaacaaccctgtggtgcctgcccaggacggccccagcgagaagctgggccagcacctggccacagagcccctgggcaccaacagctgggagcgggacaagacctgccgggagctgggcgccacccggggccacagcgccagccatgacaaggacctgaccccaccacccagcagccggggcaagaagaagaagaagaagagcaccaggaagaagagaagaagaagcagcagctacagccccagccctgtgaagaagaagaagaagaagagcagcaagaagcacaagagaagaagaagcttcagcaagaagaggaggcacagcagcagcagccccaagagcaagagaagagatgagaagaggcacaagaagcagagccgcagccggcccaggaagagccaccgccaccgccaccaccgctgccccagccgcagccagagcagcgagagccggcccagcagctgtgagagccgccaccggggccgcagccctgaggagggccagaagagcagaagaagacacagccgccgctgcagcaagaccctgtgcaaggacagccctgaggcccagagcagcaggcctcccagccagcccctgcagatgctgggctacctgagcgcccggggcgtcatcactggaagtggcagcgctgctgacctcttcaccaagacagccagccccctgaccaccagccggggccgcagccaggagtatgattctggaaatgacaccagcagcccccccagcacccagaccagcagcgcccggagccggggccaggagaagggcagccccagcggcggcctgagcaagagccgggagctgaacagcggcaacaccagtgacagcggcaacagcttcaccaccagcagcccccagaacaagggggccatgctggagaacctgagccccaccagccggggccgggagagccggggcttccagagcccctgcctggagtgtgccgaggtgaagaagagcagcctggtgcccagcacagcccggagcagccccatgaagggctgcagccgcagcagcagctatgccagcaccaggagcagcagccacagcagccgcagccccaacccccgggccagcccccgctacacccagagccgcagcaccagcagcgagaagaggagctacagccgcagccccagctacagcagcaagagcggcaagaggagcccccccagccgcagcagccgcagccgccgcagccccagctacagccgctacagccccagccgggagcgggaccccaagtacagcgagaaggacagccagcagcgggagcgggagcgggccaggagaagaagaagaagctacagccccatgaggaagagaagaagagacagccccagccacctggaggcccggcgcatcaccagcgccaggaagaggcccatcccctactaccggcccagccccagcagcagcggcagcctgagcagcaccagctcctggtacagcagcagcagcagccgcagcgccagccgcagctacagccgcagccgcagccgcagccgcagcagaagaagaagcaggaccaggaccagcagcagcagcagcagccgcagccccagccctggcagccgcagccgcagccgcagccgcagccgcagccgcagccgcagccgcagccagagccgcagctacagcagcgctgacagctacagcagcaccaggaggtag

SEQ ID NO: 258351 - DNA, 1836 bp, Artificial Sequence
  derived and/or modified sequence
atggccagcgtgcagcagggcgagaagcagctgttcgagaagttctggaggggaactttcaaggcagtggcgaccccaagaccggagtctatcatcgttgcctcaatcacagcccgaaagcctctgcctcgcaccgagccccaaaataatcctgtcgttccagctcaggacggcccgtccgaaaaactcggacagcacctggccacggagccactgggaacaaattcctgggaacgcgataaaacttgccgcgagctgggagcaacacgtggccacagtgcctctcacgataaagacctgaccccaccccctagttcacgagggaagaagaagaaaaagaagagcacccgcaagaaacgcagacggtcaagttcttattctccatctcccgttaaaaaaaagaagaagaagagtagcaagaagcataaacggagacgatccttctctaaaaaacgtaggcatagctccagcagccccaaatctaaacggagagatgagaagcgtcacaagaagcagagtcggtccaggccacggaagagccatcgccatcgtcaccatcgctgtccttctcgtagccagtcaagcgagagtaggccctctagctgtgagtcccgccacagagggcgttcacctgaagaggggcagaagagcaggcgccgccattcacgacgttgcagcaaaacattatgcaaggattcacccgaggcgcagagctcaaggcccccatcacagccccttcaaatgctggggtacctctccgccaggggcgttattaccgggtctggctccgcagcagacctgttcactaagaccgccagccctctgactacctctaggggccggtcccaggagtacgatagtggaaacgatacaagcagccctcccagtactcagacatcttctgcccgctcgcgaggccaggaaaagggctctcccagtggtgggctgagcaagagtcgagaactgaatagtggcaacaccagcgactcaggcaattcgtttacaacgtcatccccacagaacaagggagccatgcttgaaaacttgtcacctacttcccgaggcagagaatctagagggttccagagcccgtgtctggaatgtgcagaagtgaagaagtcatcactcgtgccgtcaactgccagatcctccccgatgaaagggtgcagcagatcttcttcctatgcctctacgcgctctagtagtcatagctcccgatcccctaatccccgagcatccccccggtacacccagtccagaagcactagctccgaaaagaggagctacagccgcagtccatcctactcaagtaaaagcggtaagcgcagccccccgtcaagatcaagtcgcagtagacgcagcccatcctacagccggtactccccctctcgggagagggaccctaagtacagcgagaaggactctcagcagcgtgaaagagagcgtgcacggaggcggagaagatcttactcgccaatgcggaagaggcggcgtgactctccatctcacctggaagcacggcgaattacatcagcccgaaagcgccccatcccatattaccgacctagtcctagttctagcggctccctctcttcaacatccagttggtattccagttcttccagtagaagcgcctctcgcagctactctagaagccgatccaggtctaggagtaggcggaggtcccggactagaacttcatccagcagcagcagccgatctcctagcccagggtcaagatcaaggtcgaggtcccgctctcggagccgcagccgtagccgcagtcaaagtcgatcctattcgagcgcagatagctattcgtcaacccgcagatag

SEQ ID NO: 258352 - DNA, 1836 bp, Artificial Sequence
  derived and/or modified sequence
atggcctcggtgcagcagggagaaaagcaactattcgaaaagttttggcggggaaccttcaaagctgtagctacacccagacccgagtccattattgtggccagcattactgccaggaagcctctgccaaggactgagccccagaataatcctgtggttccagcgcaagatggtccttcagagaagctagggcagcatcttgcaacagaaccactgggaaccaacagttgggagagagacaagacatgtagggaacttggagctacacggggacattccgcttctcatgacaaggacctgacacctcctcccagctcccggggtaaaaaaaagaaaaaaaaaagcactaggaagaaaaggcgacggtcctccagttattcgccttctcccgtaaagaagaagaagaaaaagagctctaaaaagcataagaggaggcgctctttttccaagaaaaggcgccattcttcatcctcccccaagtccaaaaggagggacgagaagaggcataagaagcagagccgctcccgccctcgaaaaagccatagacaccgacatcatcggtgtccatcgcgttcacagagctccgagagcagaccttcaagttgcgaaagccggcaccgaggccgatcacccgaggagggtcagaagagccggaggaggcactcacgccgttgtagcaaaactctctgtaaggattcacctgaagcacaatcttcgcgcccaccaagccagcctctccagatgctcgggtaccttagcgcccgaggcgtgatcaccggctccggcagcgcggctgatttgttcactaaaactgcaagcccactgacgacatctcggggtcggtcgcaagaatacgactcaggaaatgacacctcctcacccccaagtacacagacgtcaagtgcaaggagcagaggacaggagaaggggtcaccctctggcggtctttcaaaatcaagggaactgaacagcggcaatacgtcagactctggaaactccttcacaacttcctccccacaaaacaaaggagccatgttggaaaatctgagtccaacgagtaggggtcgcgagtcccggggtttccagagtccatgtctggagtgtgccgaggtgaagaaatcttcactggtaccttccacagcgcgaagcagccctatgaagggttgctcacggtcttcctcgtacgcttctactaggagctcctcccactcttccaggtcacctaacccaagagctagcccaagatatactcaatcacgctcaacgtctagtgaaaagaggagttatagcagatcacccagttacagttctaaaagtggtaaacgctcacctccgtctcggtcgtctcgatctaggaggtctccttcatatagtagatactcccccagtcgggagagggaccctaaatacagcgaaaaagacagtcagcagcgcgagcgcgagcgcgctcgccgtcggaggcggtcatacagcccaatgaggaagcgaaggcgcgattctccttcacaccttgaggcacggaggatcacgtccgcaagaaaacgaccaatcccatactacagaccctctccatcgtcaagcggttctctatcctcaacgtcttcttggtactcttcctcctcttccagaagcgccagccggtcgtacagccgatcacgctcacgttctcgttcgcgtaggcgcagcaggacgaggacaagctcatcctcttctagccgatccccctcccccggaagtcgttctcgctccaggagtcgctctcggtctcgatcgcgttctcggagccagagtaggtcctacagtagtgctgacagctacagcagcacccggaggtag

SEQ ID NO: 258353 - DNA, 8477 bp, Artificial Sequence
  derived and/or modified sequence
gtcacattgtgcgagagacaaaacccgggcgcgccggagctcacacgcgcacgcacacacatccgaccccgtcgcctcttctctcctggtgctgcccagaaagccagccctcccttcccttcttggggcgcagaggctcagccagctcagagcgcagcctggagccgacccagaagggcgaagaaagcccagcggacgagcctcctttctctgctgcctgcccgggctggggcgtcccatcccccgccctgaactccgatctctcccaccccacccctctctgggtttcacccggacagagccgggagctgggtgtcgcccccgtttggaatccacgtttcagcactttggacagcgccccggacgccccggcccctttgggttggcgatggcgagcgttcagcaaggcgagaagcagctttttgagaagttctggcgaggaaccttcaaagcggtggccaccccccgtcccgagagcatcattgtcgccagtatcacggcccgcaagccgctgccaaggacagagccccagaataaccccgttgtcccagctcaggatggaccctcagaaaagctgggtcagcatctggccaccgagcccttgggcaccaacagttgggagagagacaagacctgtcgggaactgggtgccaccagaggacacagtgcctctcatgacaaagacttgacaccaccaccttcctccaggggaaagaagaaaaagaagaaatccactcggaagaagagaaggaggtcctcatcctatagcccatcgcctgtcaagaaaaagaagaagaaaagttccaagaaacacaagcgacgcaggtcattctccaagaagagaaggcacagctcctctagcccaaaaagcaaaagaagagatgagaagaggcacaagaaacaatctcgaagccggccccgaaagtctcaccgccaccgccatcaccgctgcccctcgcggtcccagagctcggagtcccgcccctcaagctgtgagagcaggcaccgcggccggtcccctgaggaagggcagaagtcccgccgaaggcactcccgccgctgctccaagaccctctgcaaggacagccctgaggcccagtccagtcgcccgcccagtcaacccctccagatgcttggctacctgtcagccaggggtgtaatcactgggtcggggtctgctgctgacctctttaccaaaacagccagcccgctcaccacctcgcgaggacgttcccaggagtacgactcaggaaatgacacgtcctcgccaccctccacgcaaaccagctcagccaggtctcggggccaggagaaggggagccccagtgggggcttgagcaagagccgggagctcaacagtggcaacacctctgattcagggaactccttcaccacctcctcaccccagaacaagggggccatgttggagaatctctcccccaccagcaggggcagagagtcaaggggatttcagtcaccgtgtctggaatgtgccgaagtgaagaagtccagtttggtcccatccacagcccggagctcacccatgaaagggtgttcccgcagctcctcctatgccagcacccgatcctccagtcactcgtcccgatccccaaatcccagggcttcccccaggtacacccaaagccgatccacctcttctgaaaaaaggtcctactcccgctctcccagctattcctccaagtctggcaagaggagcccgcccagcagaagctctaggtcccgccgcagccctagctactcccgctacagccccagcagggagcgggatcccaaatacagtgagaaggactcgcagcagcgggagcgcgagcgagcgcgtcggagacgtcggtcctactcgcctatgagaaagcgccggagagactccccgagccacctggaggcccggaggataaccagtgcccggaaacgccccatcccctactatcggcccagcccctcctcatccggcagcctcagcagcacctcctcctggtacagcagcagcagtagccgctcggccagccgcagctactcccggagccggagtcggagccggagccggagacggagccggacccgcacgagcagcagctctagctcccgcagccctagtccgggctcccgcagccggagccggagcaggagccggagccggagccggagcaggagccagagccggagctacagctcagcagacagctactccagcacgaggcgctaagtgcccctgagccagctgcccgtgggggccccttcgcgctgccagcctcccccaaccacctgccctccccgccttcttggtgacaaatagtgagggctcctataccttgtccttcctgcttgcctaggggaagaggagaagagggtaagggggcttcactctctagatcagcctgctaggagcctctaccagcatcatcctggggcccagctcaggcctgggcatatggaaagaaccatcatcttgtggcacaaaaaaagaagaaagaaaagaaaacttcaaggttttgtgagaagcaatgggtctgtgactcaaaaattgagccctggccaggaaaatgtggagacagttcttctcctccactgctcacaggaggcccgtggtaattctccccacctccccggatgccccactagtccaacttcatggctgcacgtggatggacccccatgtctgagaggggtgaaagaggagaccaatggcagttcaggttcaagataacggggtcaggcctttaacttcctcaaacaggcccaagcaaaggctggaagacatttgggtcctagaagaagggatatccttgaataccagatggggacgtttgacttggtgggaggtgtcaggagataggagttggttaagatgatagatagaaaaacggaagggttcagctgctgctcccaatacctcagcatggtaaggggacagagcccagcagatcccagctgtgaagaggccactgcatggctgacacaaaacacctcttggccattcacaggggccctgcaacctcacgagaaaggagatagtggaagagtcaggacaggttggtctccagccccacttcccaaatatgcctcagccccactagctggcaccaacttaattccacgggaccatctgctgaacattccccagtgccatggccagttgccaggccccagcgccagccagtctggccttaccctccggttggcgcctgccagccccctcccctctgcccaggctgccacgccctggatgccacccagtgcagcctggcacctacccacccacccttcagcttaagccactccccttgcctctcaggaattttgccaggatggggcacagcagctcaggtttgggggaaaagacccgaatccagagtgcaggggagaggggcttggatatgccatgtcttgggctcctgctggcttctgaggtttcttgtcagcttgggaaagacccacctttatttttgccctcaccccaagtcccccctggctggggctgggcagagagggtaagctgatctccgatccacaaataccaccagctgcttcatccacagaaggcgctaagaacggggaggtgaggaataagatccttaaaataaactcttgggcatccccctcaccagctgactggctttccggaggcttgtgggtgagtttcaagtttgtggtggcaacagcagcaggacagggcacggagggagcgagggagagaggaccggtcccagcttttggatattttgggttatggggaagcaagggccaaacattctttatccctcccaccccagggaaaacatttggaaaatagtcctttttcttggaagcagtgacgtctccctacccaatctttcccatcctatcaacccatggggctagagactgccatgcaaccaccaccacgacagcccttcctccatcagaagacaggagtgagggccccgggcagcagtggacgacccagcctccccataccgggcctctggcccagacctaagccctgcccacaaagactaatggatgccagtgctgtcactgcagaaggccagatggcaggtgcctgggacaggggcaggtgccccggggagggcaagtacagccactgtaaataaccctcgtccctgcccaggaacccagactggacttcagtctccctccatggagacaaaggcttcccagagccaccaaaaaccttcttagcaggacagctgtgagaggcatcagaacctcacgttcggactgccttcatcaagacaactctaggggaccattttgcctggggctcctagcaaacctttttatttattttatttatttatctatttatttatttgatgactgtctctctttctcgccattagcagtattgaattatttatttatacagaggttttgtgtgtgtgtgtgtgtgtgtgtgtgtgtgtgtgtgtgtgtgtgtgtgtgttggggggatctcctaaattatttctgtgcatctcctttttttttctgctgttttttatggatgggatttgagaggccaaaggtgagtgggctattggccttctccctgaaggctctaagcctggaacaccctggggttggcccagaaggaggcacatcagtcccaaaattcatcacttaacccagcgtccaggagggtcaggcctgtaccccagcctcctgtcccccaggaacctcacaggggtatcaaaaagatgtaaacagcccagaggcttatgagctacagtgatgaattgacacagtggagttgcaacttaggtgggggttggagtcgaaagttggcaaatggggccaaggctgcacaaagtcgaaatcccttgtgaatgtcccttagggaggcaccagattggagacagatgtgctatctcctaacagagtgatgaggcttcagttgagtacttgctgaagtagttgccttgtattttgagggccatggtggatgaaaatgatgtctggtttagtactggaattgcacttggggttgacaaggtgctcacaccatgagaatggaggcaggaattgagctgactgagggaagatgcaccttgatctcaccctcactccaaggcacatagcaggatcactccctagcttctctgagcacacctagttggtttcatgtatgttacacatgcttccactccacagtacctaatttctctctgtcccctgagatctgaaggctaccttgggaagaggcatcagccatcttgcttgagaaccaccaagccaaaagcaaaagcttttatctatgatctcttgctgtttcatcaggggaaagcacaaagctatttctgaaattaggaaaaaaaaaaaaaaggtggaaggagcagccagatgttccacaggaccccaccaagaaggtcatttccaaacccatcctggaagggcccaggatccaaaggtcatcagtcctgcttatctgaccaactggcagtgtcttctggctgctggccggagacagctcttgccctttccaaagtcactgtccactgccttgcaattgccagcttgtctggtccagctttgggtttggtgagacttttgcaacatccctggttgtttccctggcaatgtgactatccagccctaacccaaagcaagggagtgcccctttcctgggtgaagtttacaagaaggctgcttaaatgcctgcttcggggaaatctctgcctctctctctctctgtctctctctctgtctctctctctgtctctctctctctctctctctctctctctctctcagtgtatttctctactttcttttacatttcctttttttctatccaaaaacaatgtgcttgttgaggcactggtaaccctgattaaccagaacctcccattcccagtatcgctgttcctacgcccatttcaccctcattaccttctgcttccaaggaatatgacagatcaccaggatgctgctcgtcgtgaggatttatctcaaaaaccaacatccaaaatgggagggagatgtggcttgaggtcaagcgccatgcatcccaagcctttgaccttcccgctatggaagtgcactggatgacagaaactgaatacattgctccctttccctagggcaaagttcgacctctgttaagtggagggatttgtgagataaaaattcaaaatgttggcctgaggcctgagagtgtcaccaaagacagagggagcttcactgagactcagagggaaaaggaaaagagcctcaaacatttttaggaggttgtccatcatgaaagtaaaaacgaaaagcaagatttgatctcccttcagttaattaggcaaggctaagtaactcaaagccccctattagtaacattctggttcactgaggtttgatcatattcctatctgcattccttcccttctttgaaggacagctgatctttcagaagcagaataaaattaagatgttagaacaaaggtctcagtctcagagaaccgcatcacttcatttgctcagacccatcctcttttgcaaaagggtctgcttggagaggccaaaattcagggtgctctcaaaggcaaagaaagcacattgttttccttctccagtccaactttcatcttttcttctgctgttttcttttcccctcttctttttcacaaatgttcaaaatggtctcatgcgcatgtgtcttgccccactttcccctttagctgaacagaaaattttgtctcagtaaaacgaagtcaaaaaacaggattcctccaaacatgcctcctcccgcactggccagccgagtccagctgagaaacttatgctagattcaatgtcattgagcaatgctttattgaagtctcgttcttctcacttctgcaccagtgagccaatgatactgacagaaatgtcatctctcttctatctgtggttgctgtttttggagtaaaagtttctgtgtgtgtttttttagttcttttgatggctgttgttttgcattgtaaataccatgatgggggacccccatcagaacatggcttatttaataatttatttcgtatttattgagtaatattgggaaaagagaaggaccacctctttccctgaattgctattgagaattggtccatctcccagctccaggtgctgctgtctgcagcaagggcattactgcccaggtaaggagtgctagaatcaccaagcaaattgaaattggcagaaatggaggcttcagtcacacaaattagactcaaatggaactaaaacactggttatctccaggaaaacctcatttagatggaaattaatggaagaataaaatgcctacacatgaaccaacttctattaaaaagtcacaactccttgaaaaaaaaaataaagaaaaattgtaaactcttttttttttctggccaaggaaagctatgcctcatcttctaacgagccaagccaaaaagactgcaatggtattcctatgtgtttctttggcctgtgtatcagtctgaatgaaatggaatgggtctctagcctcagtcttgtcatctgtaaaatggggcttgtcctatatattatctgcaagacgtgggaaatgggggctcaagccctgatgctatggactccatactgttggatatattgtctcttgtgtcttctgctgactgcagattaaagggtgtcaaccaaggaaggaaacaaaaaagtagggcctggacttcatttgcagaatgaggtcatagtcgttgagtcccacagtcatatatgggagacctcaagttgctgtcaccttgataactcttgtatcctgggttaaagccctctgtatttagtttgaacttctctctaagccccgtggtccaaagtcatcacgggagagaccaagatgggcttaccttgccctgctctggatttaaccattgttcattgtcaggctatatttttgtacaatcattcaaataacccagtgacataggtcatattgccacttttcagaggagaaaactgaggctcaggagggggagttgacatgcccaagctcccttgagctcagatcagcttgactcaatgtccaacattcccttggtagctttttctccggggtcctgtgctataagaacttctctctgcactgtatttttttttctcccaattcttagctatttcctcaagcaatgattggccaaggacctagcataatccaccacattggccaaggggacgtggtgcaccccaaggccatttctctgcattggaggctgcgaatctcctctggaaaattcccaacccgaggacccaccatgagcccagctcagcctgaccagacagcctctgcctggagcattcacatcagatggaaagaagctgctgtgtcctccagcatcctgggaccctgtcctctgcccagtgacacagcagccatggctagcttgatttctggtctccaaagctaagcataaccttcccggggtttctggtttttcagcctgtacgaaacatgtctctgttctaattaaagttcccatggtatggtgttctca

SEQ ID NO: 258354 - DNA, 1836 bp, Artificial Sequence
  derived and/or modified sequence
atggccagcgtgcagcagggcgagaagcagctgttcgagaagttctggagaggcaccttcaaggccgtggccacccccagacccgagagcatcatcgtggccagcatcaccgccagaaagcccctgcccagaaccgagccccagaacaaccccgtggtgcccgcccaggacggccccagcgagaagctgggccagcacctggccaccgagcccctgggcaccaacagctgggagagagacaagacctgcagagagctgggcgccaccagaggccacagcgccagccacgacaaggacctgacccccccccccagcagcagaggcaagaagaagaagaagaagagcaccagaaagaagagaagaagaagcagcagctacagccccagccccgtgaagaagaagaagaagaagagcagcaagaagcacaagagaagaagaagcttcagcaagaagagaagacacagcagcagcagccccaagagcaagagaagagacgagaagagacacaagaagcagagcagaagcagacccagaaagagccacagacacagacaccacagatgccccagcagaagccagagcagcgagagcagacccagcagctgcgagagcagacacagaggcagaagccccgaggagggccagaagagcagaagaagacacagcagaagatgcagcaagaccctgtgcaaggacagccccgaggcccagagcagcagaccccccagccagcccctgcagatgctgggctacctgagcgccagaggcgtgatcaccggcagcggcagcgccgccgacctgttcaccaagaccgccagccccctgaccaccagcagaggcagaagccaggagtacgacagcggcaacgacaccagcagcccccccagcacccagaccagcagcgccagaagcagaggccaggagaagggcagccccagcggcggcctgagcaagagcagagagctgaacagcggcaacaccagcgacagcggcaacagcttcaccaccagcagcccccagaacaagggcgccatgctggagaacctgagccccaccagcagaggcagagagagcagaggcttccagagcccctgcctggagtgcgccgaggtgaagaagagcagcctggtgcccagcaccgccagaagcagccccatgaagggctgcagcagaagcagcagctacgccagcaccagaagcagcagccacagcagcagaagccccaaccccagagccagccccagatacacccagagcagaagcaccagcagcgagaagagaagctacagcagaagccccagctacagcagcaagagcggcaagagaagcccccccagcagaagcagcagaagcagaagaagccccagctacagcagatacagccccagcagagagagagaccccaagtacagcgagaaggacagccagcagagagagagagagagagccagaagaagaagaagaagctacagccccatgagaaagagaagaagagacagccccagccacctggaggccagaagaatcaccagcgccagaaagagacccatcccctactacagacccagccccagcagcagcggcagcctgagcagcaccagcagctggtacagcagcagcagcagcagaagcgccagcagaagctacagcagaagcagaagcagaagcagaagcagaagaagaagcagaaccagaaccagcagcagcagcagcagcagaagccccagccccggcagcagaagcagaagcagaagcagaagcagaagcagaagcagaagcagaagccagagcagaagctacagcagcgccgacagctacagcagcaccagaagatag

SEQ ID NO: 258355 - protein, 154 aa, Artificial Sequence
  derived and/or modified sequence
MLYCEAESPPTVEKVKPARENSETDLEIEGEHGHLGAVRAASPQKLEKSGFQELSSHSFPESALRMACGGNVAERPARFCLESSSGLAGESSCSFPRLSPASGAVPSRRLVKSGINTQTRFSNLLNVSTWGILCNLCNSPRSFPKKGSTEREHL

SEQ ID NO: 258356 - protein, 488 aa, Artificial Sequence
  derived and/or modified sequence
MHIQFPSKPTLPRACWEGRITAGSPGMPPDEIEIEPVRQSSDKMLYCEAESPPTVEKVKPARENSETDLEIEDDEKFFTTGQKELYLEACKLMGVVPVSYFIRNMEESYVNLNHHGLGPRGTKAIAIALVSNMAVTKLELEDNCIMEEGVLSLVEMLQENYYLQEMNISNNHLGLEGARIISDFFERNSSSIWSLELSGNDFKEDSAALLCQALSTNYQIKKLDLSHNQFSDVGGEHLGQMLAINVGLTSLDLSWNNFHTRGAVALCNGLRGNVTLTKLDLSMNGFGNEVALALGEVLRLNRCLVYLDIGGNDIGNEGASKISKGLESNESLRVLKLFLNPINMDGAILLILAIKRNPKSRMEELDISNVLVSEQFMKTLDGVYAVHPQLDVVFKAVQGLSPKKTIFLLTNPMKLIQSYADQHKITIVDFFKSLNPTGTMKMSVDEFQKVMIEQNKVPLNQYQVREVIKKLDEKTGMVNFSFLNTMKP

SEQ ID NO: 258357 - DNA, 1648 bp, Artificial Sequence
  derived and/or modified sequence
gagtcacaaagtcacaggcgggtggggatcctttcaacagggctcccagcaatagagcagtcccactctcccagatgagctggagaagtagctacctctcccagacagagttggggtcaaattcatgcacatccaattcccatcaaagcctactcttcccagggcttgctgggagggaaggataactgcaggctcccctgggatgcccccagatgagattgaaattgagccagtacgacagagcagcgataaaatgctctactgtgaggccgaatccccgccgactgttgaaaaagtgaaaccagcccgggagaattcggaaacagacctggagattgaagatgatgagaaatttttcaccactggacaaaaggagctgtacctggaggcctgcaagctgatgggtgtagtgcctgtctcctacttcattcggaacatggaggagtcctacgtgaacctcaaccaccacggcctgggccccaggggtaccaaggctattgctatagccctggtgtccaacatggctgttaccaaactggagctggaagacaattgcatcatggaggagggcgtcttgagcctggtggagatgctacaagagaactactacctccaggagatgaatatttccaacaatcaccttggtttggagggggccagaatcatctcagatttctttgagagaaacagttcttctatctggagccttgagctttcaggaaatgacttcaaggaagactccgcagcactgctctgccaagccctgtcgaccaattaccaaattaaaaagctggatctcagtcacaaccaattctctgatgtaggaggggagcacctgggccagatgctggccatcaacgtggggctcacgtcactggatctgagctggaataacttccacacaaggggagctgtggccttgtgcaatggtctccggggtaatgtgaccctgacaaagctggatctctccatgaatggctttgggaatgaggtggctctggccctaggggaagtcctccgactcaaccgctgcctggtctacctggatatcggtggcaatgacatcggcaatgaaggggcctccaaaatcagcaaaggactggaatccaatgaaagcctcagagttctgaagcttttcctgaatcccataaatatggatggggctattttacttatcctggctatcaagaggaaccccaaatccaggatggaagagcttgatatttccaacgtgctggtgtccgagcagttcatgaaaacgttggacggagtgtatgccgttcacccgcagctggacgtggtattcaaggcagtacaaggcctctctcccaagaaaaccatcttcttgttgacaaaccccatgaaactgatccagagctatgcagaccaacacaaaatcacgatcgtggacttcttcaagagcttgaaccccactgggacaatgaagatgtctgtggatgagttccagaaagtgatgatagagcaaaacaaggtccccctgaaccagtaccaggtcagggaggtgataaagaagctcgatgagaagacaggcatggtgaacttcagtttcttgaacacgatgaagccatagcaacaagtctggtctagaaagaagtctcggcgagaggagtcctcgcaagtcggatgg

SEQ ID NO: 258358 - DNA, 1467 bp, Artificial Sequence
  derived and/or modified sequence
atgcacatccagttccccagcaagcccaccctgcccagagcctgctgggagggcagaatcaccgccggcagccccggcatgccccccgacgagatcgagatcgagcccgtgagacagagcagcgacaagatgctgtactgcgaggccgagagcccccccaccgtggagaaggtgaagcccgccagagagaacagcgagaccgacctggagatcgaggacgacgagaagttcttcaccaccggccagaaggagctgtacctggaggcctgcaagctgatgggcgtggtgcccgtgagctacttcatcagaaacatggaggagagctacgtgaacctgaaccaccacggcctgggccccagaggcaccaaggccatcgccatcgccctggtgagcaacatggccgtgaccaagctggagctggaggacaactgcatcatggaggagggcgtgctgagcctggtggagatgctgcaggagaactactacctgcaggagatgaacatcagcaacaaccacctgggcctggagggcgccagaatcatcagcgacttcttcgagagaaacagcagcagcatctggagcctggagctgagcggcaacgacttcaaggaggacagcgccgccctgctgtgccaggccctgagcaccaactaccagatcaagaagctggacctgagccacaaccagttcagcgacgtgggcggcgagcacctgggccagatgctggccatcaacgtgggcctgaccagcctggacctgagctggaacaacttccacaccagaggcgccgtggccctgtgcaacggcctgagaggcaacgtgaccctgaccaagctggacctgagcatgaacggcttcggcaacgaggtggccctggccctgggcgaggtgctgagactgaacagatgcctggtgtacctggacatcggcggcaacgacatcggcaacgagggcgccagcaagatcagcaagggcctggagagcaacgagagcctgagagtgctgaagctgttcctgaaccccatcaacatggacggcgccatcctgctgatcctggccatcaagagaaaccccaagagcagaatggaggagctggacatcagcaacgtgctggtgagcgagcagttcatgaagaccctggacggcgtgtacgccgtgcacccccagctggacgtggtgttcaaggccgtgcagggcctgagccccaagaagaccatcttcctgctgaccaaccccatgaagctgatccagagctacgccgaccagcacaagatcaccatcgtggacttcttcaagagcctgaaccccaccggcaccatgaagatgagcgtggacgagttccagaaggtgatgatcgagcagaacaaggtgcccctgaaccagtaccaggtgagagaggtgatcaagaagctggacgagaagaccggcatggtgaacttcagcttcctgaacaccatgaagccctag

SEQ ID NO: 258359 - DNA, 1467 bp, Artificial Sequence
  derived and/or modified sequence
atgcacatccagttccccagtaagccgacccttcccagagcctgctgggaaggccgcatcactgctgggtccccgggcatgccgcctgacgagattgagattgaacccgtacgtcagtcatcagacaagatgctgtattgcgaggcagagtcaccccccacagttgaaaaagtcaaaccagccagagaaaactcagaaaccgacctggaaattgaagatgatgagaaatttttcaccacaggtcaaaaggaactgtaccttgaggcgtgtaaattaatgggggtcgttccagtctcctacttcatccgcaacatggaggagagctacgtgaaccttaatcatcacggcctcggcccccgaggcactaaggcaatcgcaatcgccctcgtctccaatatggcggtgacaaagttggaactggaagacaactgcattatggaagaaggagtcctgtccctcgtcgaaatgctgcaggagaactactacttgcaggaaatgaatatctccaataaccacttaggactggagggtgcccggattattagcgattttttcgaacggaatagttcctctatttggagccttgaactctccgggaacgattttaaggaggacagcgcagctctgctatgccaggccctttcaacgaactaccagatcaagaagctagatttgtctcacaatcagttttcggatgtgggaggcgaacatctggggcagatgcttgctatcaacgtgggcctaactagcctggacctcagttggaataacttccacacaaggggcgcggtagcgttgtgtaacgggttgcgagggaacgtgaccctgacaaagttagacctcagtatgaatgggtttggtaatgaggtagccctggcgcttggcgaggtactcagactcaacaggtgcctggtctacctcgacatcggggggaacgatatcggcaatgagggagcaagcaaaatcagtaaagggctggagtctaacgaaagcttacgcgtcttaaaactttttctcaacccaattaacatggatggagctatcctcctgattctcgcaatcaaacgcaaccctaagagccggatggaagaactggacattagcaatgtgttagtttctgaacaattcatgaagacattggatggagtctacgctgtgcacccccagctggatgtcgtgttcaaagccgttcaggggttgagtcctaagaagactatctttctcttaaccaacccaatgaagttaatccaatcttacgctgaccagcataaaatcacgatcgtggatttcttcaagtctctgaacccgaccggcactatgaagatgtccgttgatgaattccagaaggtgatgatagagcaaaacaaggtccctctgaatcagtaccaagtgcgggaagtgatcaagaaacttgacgagaagaccggaatggtaaatttctctttcttgaatacaatgaagccttag

SEQ ID NO: 258360 - DNA, 1467 bp, Artificial Sequence
  derived and/or modified sequence
atgcacatccagttccccagcaagcccaccctgccccgggcctgctgggagggccgcatcacagctggcagccctggcatgcccccagatgaaattgaaattgagcctgtgcggcagagcagtgacaagatgctgtactgtgaggccgagagcccccccaccgtggagaaggtgaagccagccagagaaaattctgaaacagacctggagattgaagatgatgagaagttcttcaccaccggccagaaggagctgtacctggaggcctgcaagctgatgggcgtggtgcctgtgtcctacttcatccggaacatggaggagagctatgtgaacctgaaccaccacggcctgggcccccggggcaccaaggccatcgccatcgccctggtgagcaacatggctgtgaccaagctggagctggaggacaactgcatcatggaggagggcgtgctgagcctggtggagatgctgcaggagaactactacctgcaggagatgaacatcagcaacaaccacctgggcctggagggcgcccgcatcatcagtgacttctttgaaagaaacagcagcagcatctggagcctggagctgtctggaaatgacttcaaggaggacagcgctgccctgctgtgccaggccctgagcaccaactaccagatcaagaagctggacctgagccacaaccagttcagtgatgtgggcggggagcacctgggccagatgctggccatcaacgtgggcctgaccagcctggacctgtcctggaacaacttccacaccagaggagctgtggccctgtgcaatggcctgcggggaaatgtgaccctgaccaagctggacctgtccatgaatggatttggaaatgaggtggccctggccctgggggaggtgctgcggctgaaccgctgcctggtgtacctggacattggaggaaatgacattggaaatgaaggagccagcaagatcagcaagggcctggagagcaatgaaagcctgcgggtgctgaagctgttcctgaaccccatcaacatggatggagccatcctgctgatcctggccatcaagaggaaccccaagagcaggatggaggagctggacatcagcaatgtgctggtgtctgagcagttcatgaagaccctggatggagtgtatgctgtgcacccccagctggatgtggtgttcaaggctgtgcagggcctgagccccaagaagaccatcttcctgctgaccaaccccatgaagctgatccagagctatgctgaccagcacaagatcaccatcgtggacttcttcaagagcctgaaccccaccggcaccatgaagatgtctgtggatgagttccagaaggtgatgattgagcagaacaaggtgcccctgaaccagtaccaggtgcgggaggtgatcaagaagctggatgagaagacaggcatggtgaacttctccttcctgaacaccatgaagccctag

SEQ ID NO: 258361 - DNA, 1467 bp, Artificial Sequence
  derived and/or modified sequence
atgcacatccagttccccagcaagcccaccctgccccgggcctgctgggaaggccgtattacagctggcagtccagggatgccccccgatgagatcgagattgaaccagtgagacagtcatccgacaagatgctgtattgcgaagcagaatcaccacctacagtcgaaaaagttaagccggcaagagagaactccgagacagatcttgaaattgaagacgatgaaaagttctttactaccggccaaaaagagctgtatctggaggcctgtaaactgatgggcgtggtgcccgtctcatacttcatccgcaatatggaggaatcttatgtcaatcttaatcaccacggcttggggcctcggggcacaaaagcaattgccatcgctcttgtgtccaatatggctgtaactaagctcgagctggaagataactgcatcatggaagaaggggtgctcagtttggtcgagatgctgcaggagaactattacctgcaagagatgaatatcagcaataatcatttgggcctggagggagcgcgaattatctcagatttcttcgaaagaaactctagctcaatttggtctctcgaactctcggggaatgattttaaggaagactccgccgcgctcctctgccaagccctcagcaccaattatcagataaagaagctggatctcagccacaaccagttttcagacgtgggtggtgagcaccttggccagatgctggccattaatgtggggctgacttctctcgatctgtcatggaataactttcacacccggggagctgtggctttgtgtaacgggctgcggggaaacgttacactcaccaaactggatctaagcatgaacggattcgggaatgaggtagcactggcgttgggcgaagtgctgcgtctgaatcggtgtttggtgtacctggatatcggaggcaacgacattggcaatgagggcgccagcaaaatatctaaagggcttgaatctaatgagtcactaagggtgctcaagctctttctgaacccaatcaacatggatggtgcaatcctgctgatcctcgccatcaaaaggaatccaaagagtcggatggaagaactcgatatctccaacgtgctggtctcagaacagttcatgaagacactcgacggcgtctatgccgtgcatccacagctggacgtcgtgtttaaagcagtgcagggactcagtccaaaaaagactattttccttttgaccaacccgatgaagctcattcagagttacgctgatcagcacaagattaccattgttgatttcttcaaatccctcaaccctacggggactatgaagatgtctgtggatgagtttcagaaggtcatgattgagcagaacaaagtgccactgaatcaatatcaggttcgcgaggtgatcaagaaactggacgaaaaaactggcatggtgaatttttcctttctcaacactatgaaaccttag

SEQ ID NO: 258362 - DNA, 1467 bp, Artificial Sequence
  derived and/or modified sequence
atgcacattcaattcccatcaaagcctacccttccccgtgcttgttgggagggtcgaatcactgccggtagcccaggtatgccccctgacgagatcgaaatcgagccagtgcgccagtcgagcgacaaaatgctgtactgcgaagcggagtctcccccaacagtggagaaggttaaacccgctcgggaaaattccgaaaccgaccttgaaatagaggatgacgagaaattcttcacaactggacagaaggagttatatctagaggcatgcaaactaatgggagttgtgcccgtaagttacttcatcaggaatatggaggaaagttacgtgaaccttaaccatcatgggttaggaccacggggaacaaaggccatagcaatcgctcttgtgtccaacatggccgtcacaaaacttgaactagaagacaattgcataatggaagagggggtactgagcttggtggagatgctgcaagaaaactactacctgcaggaaatgaatatctccaacaaccacctcggccttgaaggggctaggataatatccgattttttcgaaagaaattcgtcatcaatctggagcctcgagctctctggaaatgacttcaaagaggattccgcagccctcctatgccaggcccttagtactaattatcaaatcaaaaaactggacctatctcataaccagttttcagatgtgggaggcgagcatctcggccagatgctggccatcaacgtagggcttacgtcattggatttatcgtggaacaacttccatacacgcggagccgttgctttatgtaatggtctgagaggcaacgttacacttacaaaactggatctgtctatgaacggatttggcaatgaagtagcgctcgccctgggagaggtgctgaggcttaaccgttgcctggtctacttggatattgggggtaatgacatcgggaatgaaggggcttcaaagattagtaaggggttggagtcgaacgagagtcttcgggttctcaagctgtttcttaatccgattaatatggacggcgcaatcctccttatcctcgcaattaagcggaatccaaaaagcaggatggaagagttggatatctccaatgttctggtcagcgagcaatttatgaagactttggacggagtctatgccgtccatccccagctggatgtggtgtttaaggcagtacaagggttgtccccaaagaaaaccatctttctgctcactaatcccatgaaactgatccagtcgtatgctgaccagcacaaaatcactatcgtggactttttcaaatccctcaacccaaccggcacaatgaagatgtccgtggacgaatttcagaaggtgatgattgagcaaaacaaagtgccactcaatcagtaccaggtgcgagaggttatcaaaaagctcgatgaaaagaccggtatggtgaatttctccttcctgaatactatgaaaccgtag

SEQ ID NO: 258363 - DNA, 465 bp, Artificial Sequence
  derived and/or modified sequence
atgctctactgcgaagcggagagtccgcctacggtggagaaggtgaagcctgcgagagagaacagcgaaaccgatctggaaattgaaggtgagcacggccaccttggagcagttagggcggcatcgccccagaaactcgagaagagcgggtttcaggaactctcgagtcattccttccctgagagcgcgctgcggatggcgtgcgggggcaacgtagcagaacgccctgctcgattctgcctggagtcaagcagcggactggcgggtgagagtagctgcagttttccacgtctatcccctgcctccggggcagtgccatctcgacgactcgtcaagagtggtataaacacccaaacacgcttttcaaatctgctgaacgtgagtacatgggggattctttgtaacctctgcaattctcctaggagcttccccaagaagggatccacagaaagagagcatctatag

SEQ ID NO: 258364 - DNA, 465 bp, Artificial Sequence
  derived and/or modified sequence
atgctgtactgtgaggccgagagccccccaacagtggagaaggtgaagccagcccgggagaacagcgagacagacctggagattgaaggagagcacggccacctgggcgctgtgcgggccgccagcccccagaagctggagaagagcggcttccaggagctgagcagccacagcttccctgagagcgccctgaggatggcctgtggcggcaatgtggccgagaggcctgcccgcttctgcctggagagcagcagcggcctggccggggagagcagctgcagcttcccccggctgagccctgccagcggggctgtgcccagccggcggctggtgaagagcggcatcaacacccagacccgcttcagcaacctgctgaatgtgtccacctggggcatcctgtgcaacctgtgcaacagccccaggagcttccccaagaagggcagcacagagcgggagcacctgtag

SEQ ID NO: 258365 - DNA, 465 bp, Artificial Sequence
  derived and/or modified sequence
atgctgtactgcgaggccgagagcccccccaccgtggagaaggtgaagccggcgagggagaattcagagacagacctcgagatcgagggcgagcacggccacctaggggccgtgcgagccgcttcaccacaaaagcttgagaaatctggcttccaggagctcagctcccactcattccctgagtcagcgctgcgcatggcctgcggcgggaatgtggcggagagacccgcccgcttttgcttggaatcctcctcaggcttggctggtgagtcttcctgctctttcccccggctcagccccgcctccggcgccgtccccagcagacggctcgtgaaatcgggcattaatacccaaacacggtttagcaatctgctaaacgtgtcaacctggggtatcttatgtaacctctgtaattctccgaggtcctttcctaaaaaagggagcaccgaacgtgaacatctttag

SEQ ID NO: 258366 - DNA, 465 bp, Artificial Sequence
  derived and/or modified sequence
atgctgtattgcgaagcggagtcccctcccaccgttgagaaggtaaaacccgcacgggagaactccgagacggatctggaaattgagggtgagcacgggcacctgggtgcagtccgagcagcaagtccccagaagcttgaaaaaagtggcttccaagagctctcttcccacagcttccctgagagcgcccttcgcatggcttgtgggggaaacgtggctgaaagacccgcacgtttttgtttggaatcctcaagtggactggcgggtgaaagctcttgcagcttcccaagactgagccccgcttccggtgcagtcccctcgaggcgacttgtgaagagtggtataaatacgcagacaaggttcagtaatctgttaaacgtttccacctggggtatcctctgtaatctttgtaatagtcccaggagtttcccgaagaagggctccaccgagcgggagcacctctag

SEQ ID NO: 258367 - DNA, 465 bp, Artificial Sequence
  derived and/or modified sequence
atgctgtactgcgaggccgagagcccccccaccgtggagaaggtgaagcccgccagagagaacagcgagaccgacctggagatcgagggcgagcacggccacctgggcgccgtgagagccgccagcccccagaagctggagaagagcggcttccaggagctgagcagccacagcttccccgagagcgccctgagaatggcctgcggcggcaacgtggccgagagacccgccagattctgcctggagagcagcagcggcctggccggcgagagcagctgcagcttccccagactgagccccgccagcggcgccgtgcccagcagaagactggtgaagagcggcatcaacacccagaccagattcagcaacctgctgaacgtgagcacctggggcatcctgtgcaacctgtgcaacagccccagaagcttccccaagaagggcagcaccgagagagagcacctgtag

SEQ ID NO: 258368 - protein, 1843 aa, Artificial Sequence
  derived and/or modified sequence
MADTQTQVAPTPTMRMATAEDLPLPPPPALEDLPLPPPKESFSKFHQQRQASELRRLYRHIHPELRKNLAEAVAEDLAEVLGSEEPTEGDVQCMRWIFENWRLDAIGEHERPAAKEPVLCGDVQATSRKFEEGSFANSTDQEPTRPQPGGGDVRAARWLFETKPLDELTGQAKELEATVREPAASGDVQGTRMLFETRPLDRLGSRPSLQEQSPLELRSEIQELKGDVKKTVKLFQTEPLCAIQDAEGAIHEVKAACREEIQSNAVRSARWLFETRPLDAINQDPSQVRVIRGISLEEGARPDVSATRWIFETQPLDAIREILVDEKDFQPSPDLIPPGPDVQQQQHLFETRALDTLKGDEEAGAEAPPKEEVVPGDVRSTLWLFETKPLDAFRDKVQVGHLQRVDPQDGEGHLSSDSSSALPFSQSAPQRDELKGDVKTFKNLFETLPLDSIGQGEVLAHGSPSREEGTDSAGQAQGIGSPVYAMQDSKGRLHALTSVSREQIVGGDVQGYRWMFETQPLDQLGRSPSTIDVVRGITRQEVVAGDVGTARWLFETQPLEMIHQREQQERQKEEGKSQGDPQPEAPPKGDVQTIRWLFETCPMSELAEKQGSEVTDPTAKAEAQSCTWMFKPQPVDRPVGSREQHLQVSQVPAGERQTDRHVFETEPLQASGRPCGRRPVRYCSRVEIPSGQVSRQKEVFQALEAGKKEEQEPRVIAGSIPAGSVHKFTWLFENCPMGSLAAESIQGGNLLEEQPMSPSGNRMQESQETAAEGTLRTLHATPGILHHGGILMEARGPGELCLAKYVLSGTGQGHPYIRKEELVSGELPRIICQVLRRPDVDQQGLLVQEDPTGQLQLKPLRLPTPGSSGNIEDMDPELQQLLACGLGTSVARTGLVMQETEQGLVALTAYSLQPRLTSKASERSSVQLLASCIDKGDLSGLHSLRWEPPADPSPVPASEGAQSLHPTESIIHVPPLDPSMGMGHLRASGATPCPPQAIGKAVPLAGEAAAPAQLQNTEKQEDSHSGQKGMAVLGKSEGATTTPPGPGAPDLLAAMQSLRMATAEAQSLHQQVLNKHKQGPTPTATSNPIQDGLRKAGATQSNIRPGGGSDPRIPAAPRKVSREEQALPRGLPGGWVTIQDGIYTAHPVRTFDPPGGVQLSQREPQSRHRETALSVQAPRPLQGGPGQSTGPGREEPGGCTQMAWGPPGKAMAEVCPGGLQAAETTLKTAPLGRHILASGPQAAGASPHPHNAFVPPPPTLPAAVTGPDFPAGAHRAEDSIQQASEPLKDPLLHSHSSPAGQRTPGGSQTKTPKLDPTMPPKKKPQLPPKPAHLTQSHPPQRLPKPLPLSPSFSSEVGQREHQRGERDTAIPQPAKVPTTVDQGHIPLARCPSGHSQPSLQHGLSTTAPRPTKNQATGSNAQSSEPPKLNALNHDPTSPQWGPGPSGEQPMEGSHQGAPESPDSLQRNQKELQGLLNQVQALEKEAASSVDVQALRRLFEAVPQLGGAAPQAPAAHQKPEASVEQAFGELTRVSTEVAQLKEQTLARLLDIEEAVHKALSSMSSLQPEASARGHFQGPPKDHSAHKISVTVSSSARPSGSGQEVGGQTAVKNQAKVECHTEAQSQVKIRNHTEARGHTASTAPSTRRQETSREYLCPPRVLPSSRDSPSSPTFISIQSATRKPLETPSFKGNPDVSVKSTQLAQDIGQALLHQKGVQDKTGKKDITQCSVQPEPAPPSASPLPRGWQKSVLELQTGPGSSQHYGAMRTVTEQYEEVDQFGNTVLMSSTTVTEQAEPPRNPGSHLGLHASPLLRQFLHSPAGFSSDLTEAETVQVSCSYSQPAAQ

SEQ ID NO: 258369 - protein, 526 aa, Artificial Sequence
  derived and/or modified sequence
MPPKKKPQLPPKPAHLTQSHPPQRLPKPLPLSPSFSSEVGQREHQRGERDTAIPQPAKVPTTVDQGHIPLARCPSGHSQPSLQHGLSTTAPRPTKNQATGSNAQSSEPPKLNALNHDPTSPQWGPGPSGEQPMEGSHQGAPESPDSLQRNQKELQGLLNQVQALEKEAASSVDVQALRRLFEAVPQLGGAAPQAPAAHQKPEASVEQAFGELTRVSTEVAQLKEQTLARLLDIEEAVHKALSSMSSLQPEASARGHFQGPPKDHSAHKISVTVSSSARPSGSGQEVGGQTAVKNQAKVECHTEAQSQVKIRNHTEARGHTASTAPSTRRQETSREYLCPPRVLPSSRDSPSSPTFISIQSATRKPLETPSFKGNPDVSVKSTQLAQDIGQALLHQKGVQDKTGKKDITQCSVQPEPAPPSASPLPRGWQKSVLELQTGPGSSQHYGAMRTVTEQYEEVDQFGNTVLMSSTTVTEQAEPPRNPGSHLGLHASPLLRQFLHSPAGFSSDLTEAETVQVSCSYSQPAAQ

SEQ ID NO: 258370 - DNA, 5532 bp, Artificial Sequence
  derived and/or modified sequence
atggccgacacccagacccaggtggcccccacccccaccatgagaatggccaccgccgaggacctgcccctgccccccccccccgccctggaggacctgcccctgcccccccccaaggagagcttcagcaagttccaccagcagagacaggccagcgagctgagaagactgtacagacacatccaccccgagctgagaaagaacctggccgaggccgtggccgaggacctggccgaggtgctgggcagcgaggagcccaccgagggcgacgtgcagtgcatgagatggatcttcgagaactggagactggacgccatcggcgagcacgagagacccgccgccaaggagcccgtgctgtgcggcgacgtgcaggccaccagcagaaagttcgaggagggcagcttcgccaacagcaccgaccaggagcccaccagaccccagcccggcggcggcgacgtgagagccgccagatggctgttcgagaccaagcccctggacgagctgaccggccaggccaaggagctggaggccaccgtgagagagcccgccgccagcggcgacgtgcagggcaccagaatgctgttcgagaccagacccctggacagactgggcagcagacccagcctgcaggagcagagccccctggagctgagaagcgagatccaggagctgaagggcgacgtgaagaagaccgtgaagctgttccagaccgagcccctgtgcgccatccaggacgccgagggcgccatccacgaggtgaaggccgcctgcagagaggagatccagagcaacgccgtgagaagcgccagatggctgttcgagaccagacccctggacgccatcaaccaggaccccagccaggtgagagtgatcagaggcatcagcctggaggagggcgccagacccgacgtgagcgccaccagatggatcttcgagacccagcccctggacgccatcagagagatcctggtggacgagaaggacttccagcccagccccgacctgatcccccccggccccgacgtgcagcagcagcagcacctgttcgagaccagagccctggacaccctgaagggcgacgaggaggccggcgccgaggccccccccaaggaggaggtggtgcccggcgacgtgagaagcaccctgtggctgttcgagaccaagcccctggacgccttcagagacaaggtgcaggtgggccacctgcagagagtggacccccaggacggcgagggccacctgagcagcgacagcagcagcgccctgcccttcagccagagcgccccccagagagacgagctgaagggcgacgtgaagaccttcaagaacctgttcgagaccctgcccctggacagcatcggccagggcgaggtgctggcccacggcagccccagcagagaggagggcaccgacagcgccggccaggcccagggcatcggcagccccgtgtacgccatgcaggacagcaagggcagactgcacgccctgaccagcgtgagcagagagcagatcgtgggcggcgacgtgcagggctacagatggatgttcgagacccagcccctggaccagctgggcagaagccccagcaccatcgacgtggtgagaggcatcaccagacaggaggtggtggccggcgacgtgggcaccgccagatggctgttcgagacccagcccctggagatgatccaccagagagagcagcaggagagacagaaggaggagggcaagagccagggcgacccccagcccgaggccccccccaagggcgacgtgcagaccatcagatggctgttcgagacctgccccatgagcgagctggccgagaagcagggcagcgaggtgaccgaccccaccgccaaggccgaggcccagagctgcacctggatgttcaagccccagcccgtggacagacccgtgggcagcagagagcagcacctgcaggtgagccaggtgcccgccggcgagagacagaccgacagacacgtgttcgagaccgagcccctgcaggccagcggcagaccctgcggcagaagacccgtgagatactgcagcagagtggagatccccagcggccaggtgagcagacagaaggaggtgttccaggccctggaggccggcaagaaggaggagcaggagcccagagtgatcgccggcagcatccccgccggcagcgtgcacaagttcacctggctgttcgagaactgccccatgggcagcctggccgccgagagcatccagggcggcaacctgctggaggagcagcccatgagccccagcggcaacagaatgcaggagagccaggagaccgccgccgagggcaccctgagaaccctgcacgccacccccggcatcctgcaccacggcggcatcctgatggaggccagaggccccggcgagctgtgcctggccaagtacgtgctgagcggcaccggccagggccacccctacatcagaaaggaggagctggtgagcggcgagctgcccagaatcatctgccaggtgctgagaagacccgacgtggaccagcagggcctgctggtgcaggaggaccccaccggccagctgcagctgaagcccctgagactgcccacccccggcagcagcggcaacatcgaggacatggaccccgagctgcagcagctgctggcctgcggcctgggcaccagcgtggccagaaccggcctggtgatgcaggagaccgagcagggcctggtggccctgaccgcctacagcctgcagcccagactgaccagcaaggccagcgagagaagcagcgtgcagctgctggccagctgcatcgacaagggcgacctgagcggcctgcacagcctgagatgggagccccccgccgaccccagccccgtgcccgccagcgagggcgcccagagcctgcaccccaccgagagcatcatccacgtgccccccctggaccccagcatgggcatgggccacctgagagccagcggcgccaccccctgccccccccaggccatcggcaaggccgtgcccctggccggcgaggccgccgcccccgcccagctgcagaacaccgagaagcaggaggacagccacagcggccagaagggcatggccgtgctgggcaagagcgagggcgccaccaccaccccccccggccccggcgcccccgacctgctggccgccatgcagagcctgagaatggccaccgccgaggcccagagcctgcaccagcaggtgctgaacaagcacaagcagggccccacccccaccgccaccagcaaccccatccaggacggcctgagaaaggccggcgccacccagagcaacatcagacccggcggcggcagcgaccccagaatccccgccgcccccagaaaggtgagcagagaggagcaggccctgcccagaggcctgcccggcggctgggtgaccatccaggacggcatctacaccgcccaccccgtgagaaccttcgacccccccggcggcgtgcagctgagccagagagagccccagagcagacacagagagaccgccctgagcgtgcaggcccccagacccctgcagggcggccccggccagagcaccggccccggcagagaggagcccggcggctgcacccagatggcctggggcccccccggcaaggccatggccgaggtgtgccccggcggcctgcaggccgccgagaccaccctgaagaccgcccccctgggcagacacatcctggccagcggcccccaggccgccggcgccagcccccacccccacaacgccttcgtgccccccccccccaccctgcccgccgccgtgaccggccccgacttccccgccggcgcccacagagccgaggacagcatccagcaggccagcgagcccctgaaggaccccctgctgcacagccacagcagccccgccggccagagaacccccggcggcagccagaccaagacccccaagctggaccccaccatgccccccaagaagaagccccagctgccccccaagcccgcccacctgacccagagccaccccccccagagactgcccaagcccctgcccctgagccccagcttcagcagcgaggtgggccagagagagcaccagagaggcgagagagacaccgccatcccccagcccgccaaggtgcccaccaccgtggaccagggccacatccccctggccagatgccccagcggccacagccagcccagcctgcagcacggcctgagcaccaccgcccccagacccaccaagaaccaggccaccggcagcaacgcccagagcagcgagccccccaagctgaacgccctgaaccacgaccccaccagcccccagtggggccccggccccagcggcgagcagcccatggagggcagccaccagggcgcccccgagagccccgacagcctgcagagaaaccagaaggagctgcagggcctgctgaaccaggtgcaggccctggagaaggaggccgccagcagcgtggacgtgcaggccctgagaagactgttcgaggccgtgccccagctgggcggcgccgccccccaggcccccgccgcccaccagaagcccgaggccagcgtggagcaggccttcggcgagctgaccagagtgagcaccgaggtggcccagctgaaggagcagaccctggccagactgctggacatcgaggaggccgtgcacaaggccctgagcagcatgagcagcctgcagcccgaggccagcgccagaggccacttccagggcccccccaaggaccacagcgcccacaagatcagcgtgaccgtgagcagcagcgccagacccagcggcagcggccaggaggtgggcggccagaccgccgtgaagaaccaggccaaggtggagtgccacaccgaggcccagagccaggtgaagatcagaaaccacaccgaggccagaggccacaccgccagcaccgcccccagcaccagaagacaggagaccagcagagagtacctgtgcccccccagagtgctgcccagcagcagagacagccccagcagccccaccttcatcagcatccagagcgccaccagaaagcccctggagacccccagcttcaagggcaaccccgacgtgagcgtgaagagcacccagctggcccaggacatcggccaggccctgctgcaccagaagggcgtgcaggacaagaccggcaagaaggacatcacccagtgcagcgtgcagcccgagcccgccccccccagcgccagccccctgcccagaggctggcagaagagcgtgctggagctgcagaccggccccggcagcagccagcactacggcgccatgagaaccgtgaccgagcagtacgaggaggtggaccagttcggcaacaccgtgctgatgagcagcaccaccgtgaccgagcaggccgagccccccagaaaccccggcagccacctgggcctgcacgccagccccctgctgagacagttcctgcacagccccgccggcttcagcagcgacctgaccgaggccgagaccgtgcaggtgagctgcagctacagccagcccgccgcccagtag

SEQ ID NO: 258371 - DNA, 1581 bp, Artificial Sequence
  derived and/or modified sequence
atgccccccaagaagaagccccagctgccccccaagcccgcccacctgacccagagccaccccccccagagactgcccaagcccctgcccctgagccccagcttcagcagcgaggtgggccagagagagcaccagagaggcgagagagacaccgccatcccccagcccgccaaggtgcccaccaccgtggaccagggccacatccccctggccagatgccccagcggccacagccagcccagcctgcagcacggcctgagcaccaccgcccccagacccaccaagaaccaggccaccggcagcaacgcccagagcagcgagccccccaagctgaacgccctgaaccacgaccccaccagcccccagtggggccccggccccagcggcgagcagcccatggagggcagccaccagggcgcccccgagagccccgacagcctgcagagaaaccagaaggagctgcagggcctgctgaaccaggtgcaggccctggagaaggaggccgccagcagcgtggacgtgcaggccctgagaagactgttcgaggccgtgccccagctgggcggcgccgccccccaggcccccgccgcccaccagaagcccgaggccagcgtggagcaggccttcggcgagctgaccagagtgagcaccgaggtggcccagctgaaggagcagaccctggccagactgctggacatcgaggaggccgtgcacaaggccctgagcagcatgagcagcctgcagcccgaggccagcgccagaggccacttccagggcccccccaaggaccacagcgcccacaagatcagcgtgaccgtgagcagcagcgccagacccagcggcagcggccaggaggtgggcggccagaccgccgtgaagaaccaggccaaggtggagtgccacaccgaggcccagagccaggtgaagatcagaaaccacaccgaggccagaggccacaccgccagcaccgcccccagcaccagaagacaggagaccagcagagagtacctgtgcccccccagagtgctgcccagcagcagagacagccccagcagccccaccttcatcagcatccagagcgccaccagaaagcccctggagacccccagcttcaagggcaaccccgacgtgagcgtgaagagcacccagctggcccaggacatcggccaggccctgctgcaccagaagggcgtgcaggacaagaccggcaagaaggacatcacccagtgcagcgtgcagcccgagcccgccccccccagcgccagccccctgcccagaggctggcagaagagcgtgctggagctgcagaccggccccggcagcagccagcactacggcgccatgagaaccgtgaccgagcagtacgaggaggtggaccagttcggcaacaccgtgctgatgagcagcaccaccgtgaccgagcaggccgagccccccagaaaccccggcagccacctgggcctgcacgccagccccctgctgagacagttcctgcacagccccgccggcttcagcagcgacctgaccgaggccgagaccgtgcaggtgagctgcagctacagccagcccgccgcccagtag

SEQ ID NO: 258372 - DNA, 5532 bp, Artificial Sequence
  derived and/or modified sequence
atggccgatactcagacgcaagtggcacctacccccacaatgcggatggcaacagctgaggatctcccgctaccccccccgcctgcacttgaagatcttcctttgcctcctcccaaggagtcattcagcaagtttcaccagcagaggcaggcctctgaactccgaagactgtaccgacacatccaccccgagctgcgtaaaaacttagcagaagcggtagctgaggacctggccgaggtcctgggctccgaagagccaacagagggcgacgttcagtgcatgcggtggatcttcgaaaactggcgcctggacgcaatcggcgaacacgagagaccagccgctaaggagcctgttctgtgcggagacgtccaggccactagtagaaaatttgaggaaggatctttcgctaattccaccgatcaggaaccaactagaccccaacctggaggcggcgatgtgagagccgccagatggcttttcgaaaccaagcctctggacgagctgaccgggcaggccaaagagctcgaggcgactgtgcgcgaacccgccgcctctggggacgtccagggcacacgcatgcttttcgagacacgccccctcgaccggcttggttcacggccctcactgcaagaacagtcccctctggagttacggtcggaaattcaggaactcaagggagatgtcaaaaagacagtaaagctgttccagacagagcccctgtgcgccatccaggatgccgagggagccatccacgaggtgaaggcagcgtgcagagaggagattcagagtaacgcagtgaggagcgcccgatggctcttcgaaactaggccattggatgcaatcaaccaagacccaagtcaagtcagagtcatcagagggatctccctggaggaaggagcgagacctgatgtatccgccacccgctggatctttgagacacagccgctggatgcgatcagggagatattggtggacgaaaaggacttccagcctagcccagatttgatacctcccggtcctgacgttcagcagcagcaacatctgttcgagacaagagcgcttgacaccctgaaaggtgatgaggaggccggagcggaggcccctcccaaggaggaggttgtacctggggatgtccgcagtacgctttggctattcgaaacaaagccactggatgcattccgtgacaaagtgcaggtggggcacttgcagagggtagacccacaggacggggaggggcatcttagttccgactctagcagcgccctgcctttttcccaatctgccccacaacgcgacgagctcaaaggagatgtaaaaactttcaagaacctctttgagacactaccattggatagcatcggccagggtgaagtcctcgcccacggatcccctagcagggaagagggcaccgattccgccggacaggctcagggaattgggtccccagtctatgccatgcaggattcgaaaggaaggttgcatgcccttacttcagtatcccgcgaacagatagtcgggggggacgtccaggggtataggtggatgttcgagactcagcctctcgaccagctaggccgctctccaagcacgatcgacgtcgtacgcggtatcactcgccaagaggttgtggccggggacgtcggcaccgcccgatggctgttcgaaacacagccgttagaaatgatccatcaaagagagcagcaggaacggcagaaggaggaaggtaagtcacagggggatcctcagcccgaagctcctcccaagggggatgtgcagacaattagatggctgttcgagacttgtccaatgtctgaactggctgaaaaacagggctccgaagtgactgatcctaccgccaaggctgaggcgcagtcgtgcacctggatgtttaagccacagccggtcgatcgccccgttggatcgagagagcagcatttacaggtgtcacaggtccccgcaggggaaaggcagaccgataggcatgtcttcgagacagagcccctgcaagccagcgggaggccatgcggccgaagacccgtaagatactgcagtagggtcgagatcccatcaggccaagttagtcgacaaaaagaggtctttcaggccctggaggctggaaagaaggaagagcaggaacctcgcgtgattgccggatcaattcccgcaggatccgtgcataagttcacttggctgtttgaaaattgtccaatgggcagcctggcggccgaatcgatacaggggggtaacctacttgaggagcaaccgatgtcccctagtggcaacaggatgcaagaatctcaagagacagctgctgaaggcacccttaggacattgcatgctaccccagggatcttgcaccacggcggaatcttgatggaagcacgggggccaggcgagctgtgcctcgctaagtacgttttgtccggaacaggtcagggccacccttatatacgtaaggaggagctcgtatcaggagagctgccgagaatcatttgccaggtcttacgacggcccgatgtcgaccaacagggactgctcgttcaggaggacccaaccggacagctgcagctcaaacccctgcgcctgcctacacccggctccagcgggaatatcgaagatatggaccccgagcttcaacaactcctggcttgcgggctggggacgtccgtcgcaaggaccggcttggtgatgcaggagacagagcagggcctcgtggccctcacagcttacagtctacagccacggctgaccagcaaggcgagcgagaggtccagtgtgcagctgctggcctcttgtatcgataagggggacctctccgggctccattccctgcggtgggagcctccggctgaccccagcccggtacctgcctccgagggcgctcaatcactgcaccccaccgagtcaatcattcacgtgcctccactggatccctcaatgggcatgggtcacctaagggcatccggcgccaccccgtgtccaccacaagccattggaaaggctgttcctctggccggggaggccgccgcgcctgcgcagctgcagaacaccgaaaagcaagaagattcacactcaggtcaaaaaggcatggctgtcctgggaaagtccgagggtgcaacaacaacaccgccaggccctggcgcccctgacctgcttgcagccatgcaaagtctcagaatggctactgctgaagctcagtctctgcaccagcaggtcctcaacaagcataagcaggggcctactccaactgccactagtaacccgattcaggatggactacgtaaagctggcgctacccaatctaatattaggcccggaggtggcagtgatccaagaattcctgccgctcctcgaaaggtgtctagagaggagcaggctctgcctcgcggcctgcctgggggttgggtaaccattcaggacggaatttataccgctcatccggttcgtacgtttgaccccccaggaggcgtccagctgtcacagcgcgagcctcaatctcgacacagagaaactgccctgagcgtccaagcaccgaggccgttacaggggggtcccgggcagtccactggcccggggcgcgaagaacctggtggttgcacacagatggcctggggaccacctggtaaggctatggcagaggtttgtccagggggcttacaggcagccgaaactacattaaaaacagccccactgggaaggcacatcctggcctccggcccccaggccgctggcgccagtccacacccacataatgcattcgtgccgccaccccctaccctccccgccgctgtgacgggacctgacttcccagccggagctcatcgggccgaggattccatacagcaggcctcagagcctctgaaagatcctttgctgcactcacattcctcccccgcaggtcaaaggaccccaggtggatctcagaccaaaacaccaaaactcgatcccactatgccaccaaagaaaaagccccagctgccacctaaacctgcccatctgacacagtctcatccgcctcagcgactacctaaacctctgccgctgagcccatccttctcatctgaggtcggacagagagaacaccagcgaggcgagagggacactgccattccccagcctgccaaagttccaacgacggtggatcaagggcatattccactggcacgctgccccagcggtcacagtcagccctctttgcaacatggattgagtaccacagccccgaggccaaccaaaaatcaagcgactggttcaaacgcacagagctccgagccaccaaaactaaacgcactgaatcacgacccaaccagtccacaatggggacctggcccctccggcgagcaacctatggagggatcccatcaaggagctcccgaatccccagattcccttcaaagaaatcagaaggaactgcaaggactacttaatcaggtccaggctctggagaaggaagcagcctctagtgtcgatgtacaggcattgcggcgactgttcgaggctgtaccacagctgggcggcgcggccccacaggccccagcagcacaccagaagcctgaagccagtgttgaacaagcttttggtgagctgaccagggtctcaactgaagtcgcacagctcaaggagcaaaccctggccagactgctggatatagaagaagcagtccacaaagccctctccagtatgtcatcattacaacctgaagcttccgccagaggacatttccaaggcccccccaaggatcacagtgctcacaaaatttctgttactgtatcctcaagcgccaggccctccggttctggccaggaggttgggggccaaacagcagtcaagaatcaggccaaggtcgagtgtcacacagaagctcagagtcaggtcaagattcgtaatcacaccgaggctcgtgggcacaccgcctcaacagcccctagcaccaggcggcaggagacctcacgtgaatacctgtgcccacctcgcgtcctgccgagttcccgcgactcccctagctctccaaccttcatttccattcagtccgcgacacggaagccactcgagaccccgtcttttaaaggtaacccagacgtttccgtgaaatctacgcagctcgctcaggatatcggtcaggctctgctgcatcagaaaggagttcaggacaaaaccggcaaaaaggacatcacacagtgctctgtgcagccagagccagctccgccctccgccagcccactgcccagaggttggcaaaagagcgtgctcgaactgcagacaggaccaggcagctctcagcactatggagctatgaggacggtgactgagcaatatgaggaagtcgatcagttcggtaacactgtgttgatgagctctaccactgttactgaacaggcggaacctcccaggaatcccggttcacacctgggtctgcatgctagccctctgctgagacaattcctgcactcccccgccgggttctccagcgacctgacagaagcggaaacagtgcaagtatcctgtagctacagtcagcccgccgcccagtag

SEQ ID NO: 258373 - DNA, 1581 bp, Artificial Sequence
  derived and/or modified sequence
atgccacccaaaaagaagcctcagttaccacctaagccagcccacctgacccagtcccaccctccccagaggctgccaaagcctctgccactctccccctctttcagctcagaagtgggccagcgagagcaccagagaggcgagagagataccgcaatcccacagcccgccaaggtacctactactgtagatcagggtcatattcctctcgcccggtgcccttccgggcacagccagccctctttgcagcacggcctgagcacaaccgcccctcggcctacgaagaaccaggcaaccggaagcaatgcgcaatcaagtgagcctcctaagctgaatgcgctgaaccatgacccaacctcgcctcaatggggacccggcccatcaggagagcagccgatggaaggaagccatcagggggcccccgagagccctgacagccttcagcgaaaccagaaagagctgcagggactgttgaatcaagtgcaggcccttgagaaagaggctgccagttcggtggacgtgcaggctctcagaagactcttcgaggccgtcccacaactgggcggagccgcccctcaggctcctgccgcacaccaaaagcctgaagcctccgtcgaacaggcgttcggggagcttacccgcgtatctactgaggtggctcagttaaaagaacagacactggctaggctgctggatatcgaggaggccgttcataaagccttgtcttcaatgagcagcttacaacccgaagcaagcgctaggggccattttcaaggacccccaaaagaccactcagcccataagatttccgtgacagtgtcttcctccgcacggccatccgggtccgggcaggaagtgggcggacagacagcagttaaaaatcaggcgaaagtggagtgccacaccgaggcccagagtcaggtcaaaatacgtaatcatacagaggcccgtggacacacagcaagtactgccccttcaacccgacggcaggagacgtcacgggaatatctctgtccccctagagtgctgcccagcagccgggatagcccatcgagccctacttttatttcgattcagagtgccacgcggaagcctctggagacccctagttttaagggcaatcccgacgtgagtgttaagagtactcagctcgctcaggacatcggacaagctctgctgcaccagaaaggggtgcaggacaaaaccgggaagaaagacatcactcagtgttccgtccagcccgagcccgccccgcctagcgctagtccccttccaagaggttggcagaagtctgttctcgagttacaaaccggaccagggtcgtctcagcattatggggcaatgcggacagtcacggaacagtatgaggaggtcgaccaattcggtaataccgtgcttatgagcagcaccacagtcacggagcaggccgagccccccagaaatcccgggtcacacctggggcttcacgcctccccccttcttagacagttcttacattccccagctggattctcctccgatctaacggaagcagaaacagtccaggtatcatgctcttactctcagcccgccgcccaatag

SEQ ID NO: 258374 - DNA, 5532 bp, Artificial Sequence
  derived and/or modified sequence
atggctgacacccagacccaggtggcccccacccccaccatgaggatggccacagctgaggacctgcccctgcccccacctccagccctggaggacctgcccctgcccccacccaaggagagcttcagcaagttccaccagcagaggcaggccagcgagctgcggcggctgtaccgccacatccaccctgagctgaggaagaacctggccgaggccgtggccgaggacctggccgaggtgctgggcagcgaggagcccacagaaggagatgtgcagtgcatgcgctggatctttgagaactggaggctggatgccatcggggagcacgagaggcctgctgccaaggagcctgtgctgtgtggagatgtgcaggccaccagcaggaagtttgaggagggcagctttgccaacagcacagaccaggagcccacccggccccagcccggcggcggagatgtgcgggccgcccgctggctgtttgagaccaagcccctggatgagctgaccggccaggccaaggagctggaggccaccgtgcgggagcctgctgccagcggagatgtgcagggcaccaggatgctgtttgagacccggcccctggaccggctgggcagccggcccagcctgcaggagcagagccccctggagctgcggtctgagatccaggagctgaagggagatgtgaagaagacagtgaagctgttccagacagagcccctgtgtgccatccaggatgctgagggcgccatccacgaggtgaaggccgcctgccgggaggagatccagagcaatgctgtgcgcagcgcccgctggctgtttgagacccggcccctggatgccatcaaccaggaccccagccaggtgcgggtcatccggggcatcagcctggaggagggcgcccggccagatgtgtctgccacccgctggatctttgagacccagcccctggatgccatccgggagatcctggtggatgagaaggacttccagcccagcccagacctgatccccccaggcccagatgtgcagcagcagcagcacctgtttgagacccgggccctggacaccctgaagggagatgaggaggccggggctgaggccccacccaaggaggaggtggtgcctggagatgtgcgcagcaccctgtggctgtttgagaccaagcccctggatgccttccgggacaaggtgcaggtgggccacctgcagagggtggacccccaggatggagagggccacctgagcagtgacagcagcagcgccctgcccttcagccagagcgccccccagagagatgagctgaagggagatgtgaagaccttcaagaacctgtttgagaccctgcccctggacagcatcggccagggcgaggtgctggcccacggcagccccagccgggaggagggcacagacagcgctggccaggcccagggcatcggcagccctgtgtatgccatgcaggacagcaagggccgcctgcacgccctgacctctgtgtcccgggagcagatcgtgggcggagatgtgcagggctaccgctggatgtttgagacccagcccctggaccagctgggccgcagccccagcaccattgatgtggtgcggggcatcacccggcaggaggtggtggccggagatgtgggcacagcccgctggctgtttgagacccagcccctggagatgatccaccagcgggagcagcaggagcggcagaaggaggagggcaagagccagggcgacccccagcctgaggccccacccaagggagatgtgcagaccatccgctggctgtttgagacctgccccatgtctgagctggccgagaagcagggcagcgaggtgacagaccccacagccaaggccgaggcccagagctgcacctggatgttcaagccccagcctgtggacaggcctgtgggcagccgggagcagcacctgcaggtgtcccaggtgcctgctggggagcggcagacagacagacatgtgtttgaaacagagcccctgcaggccagcggccggccctgtggcagaagacctgtgcgctactgcagccgggtggagatccccagcggccaggtgtcccggcagaaggaggtgttccaggccctggaggccggcaagaaggaggagcaggagccccgggtgattgctggcagcatcccagctggctctgtgcacaagttcacctggctgtttgagaactgccccatgggcagcctggccgctgagagcatccagggcggcaacctgctggaggagcagcccatgagccccagcggcaacaggatgcaggagagccaggagacagctgctgagggcaccctgcggaccctgcacgccaccccaggcatcctgcaccacggcggcatcctgatggaggcccggggccctggagagctgtgcctggccaagtatgtgctgagcggcaccggccagggccacccctacatcaggaaggaggagctggtgtctggagagctgccccgcatcatctgccaggtgctgcggcggccagatgtggaccagcagggcctgctggtgcaggaggaccccaccggccagctgcagctgaagcccctgcggctgcccaccccaggcagcagcggcaacatcgaggacatggaccctgagctgcagcagctgctggcctgtggcctgggcacctctgtggccaggacaggcctggtgatgcaggagacagagcagggcctggtggccctgacagcctacagcctgcagccccggctgaccagcaaggccagcgagaggagctctgtgcagctgctggccagctgcatcgacaagggggacctgagcggcctgcacagcctgcgctgggagcccccagctgaccccagccctgtgcctgccagcgagggcgcccagagcctgcaccccacagagagcatcatccacgtgccccccctggaccccagcatgggcatgggccacctgcgggccagcggggccaccccctgccccccccaggccatcggcaaggctgtgcccctggccggggaggccgccgccccagcccagctgcagaacacagagaagcaggaggacagccacagcggccagaagggcatggctgtgctgggcaagtctgagggcgccaccaccaccccacctggccctggggccccagacctgctggccgccatgcagagcctgaggatggccacagctgaggcccagagcctgcaccagcaggtgctgaacaagcacaagcagggccccacccccacagccaccagcaaccccatccaggacggcctgaggaaggccggggccacccagagcaacatccggcctgggggcggcagtgacccccgcatcccagctgcccccaggaaggtgtcccgggaggagcaggccctgccccggggcctgcccggcggctgggtgaccatccaggacggcatctacacagcccaccctgtgaggacctttgatcctcctgggggcgtgcagctgagccagcgggagccccagagccgccaccgggagacagccctgtctgtgcaggccccccggcccctgcagggcggccctggccagagcactggacctggccgggaggagcccggcggctgcacccagatggcctggggccccccaggcaaggccatggccgaggtgtgccctgggggcctgcaggccgctgagaccaccctgaagacagcccccctgggccgccacatcctggccagcggcccccaggccgccggggccagcccccacccccacaatgcctttgtgcccccaccacccaccctgcctgctgctgtgactggaccagacttccctgctggggcccacagagcagaagattccatccagcaggccagcgagcccctgaaggaccccctgctgcacagccacagcagccctgctggccagaggacccctgggggcagccagaccaagacccccaagctggaccccaccatgccacccaagaagaagccccagctgccccccaagccagcccacctgacccagagccaccccccccagaggctgcccaagcccctgcccctgagccccagcttcagcagcgaggtgggccagcgggagcaccagagaggagagcgggacacagccatcccccagcctgccaaggtgcccaccaccgtggaccagggccacatccccctggcccgctgccccagcggccacagccagcccagcctgcagcacggcctgagcaccacagccccccggcccaccaagaaccaggccaccggcagcaatgcccagagcagcgagccccccaagctgaatgccctgaaccacgaccccaccagcccccagtggggccctggccccagcggggagcagcccatggagggcagccaccagggcgcccctgagagcccagacagcctgcagaggaaccagaaggagctgcagggcctgctgaaccaggtgcaggccctggagaaggaggccgccagctctgtggatgtgcaggccctgcggcggctgtttgaggccgtgccccagctgggcggggccgccccccaggccccagctgcccaccagaagccagaggcctctgtggagcaggccttcggggagctgaccagggtgtccacagaggtggcccagctgaaggagcagaccctggcccggctgctggacatcgaggaggccgtgcacaaggccctgagctccatgagcagcctgcagcctgaggccagcgcccggggccacttccagggcccccccaaggaccacagcgcccacaagatctctgtgacagtgagcagcagcgcccggcccagcggcagcggccaggaggtgggcggccagacagctgtgaagaaccaggccaaggtggagtgccacacagaggcccagagccaggtgaagatccggaaccacacagaggcccggggccacacagccagcacagcccccagcacccggcggcaggagaccagccgggagtacctgtgccccccccgggtgctgcccagcagccgggacagccccagcagccccaccttcatcagcatccagagcgccaccaggaagcccctggagacccccagcttcaagggcaacccagatgtgtctgtgaagagcacccagctggcccaggacatcggccaggccctgctgcaccagaagggcgtgcaggacaagacaggcaagaaggacatcacccagtgcagcgtgcagcctgagcccgcccctccttctgccagccccctgccccggggctggcagaagtctgtgctggagctgcagacaggccctggcagcagccagcactacggggccatgaggacagtgacagagcagtatgaggaggtggaccagtttggaaacacagtgctgatgagcagcaccaccgtgacagagcaggccgagcccccaagaaatcctggcagccacctgggcctgcacgccagccccctgctgcggcagttcctgcacagccctgctggcttcagcagtgacctgacagaggccgagaccgtgcaggtgtcctgcagctacagccagcctgctgcccagtag

SEQ ID NO: 258375 - DNA, 1581 bp, Artificial Sequence
  derived and/or modified sequence
atgccacccaagaagaagccccagctgccccccaagccagcccacctgacccagagccaccccccccagaggctgcccaagcccctgcccctgagccccagcttcagcagcgaggtgggccagcgggagcaccagagaggagagcgggacacagccatcccccagcctgccaaggtgcccaccaccgtggaccagggccacatccccctggcccgctgccccagcggccacagccagcccagcctgcagcacggcctgagcaccacagccccccggcccaccaagaaccaggccaccggcagcaatgcccagagcagcgagccccccaagctgaatgccctgaaccacgaccccaccagcccccagtggggccctggccccagcggggagcagcccatggagggcagccaccagggcgcccctgagagcccagacagcctgcagaggaaccagaaggagctgcagggcctgctgaaccaggtgcaggccctggagaaggaggccgccagctctgtggatgtgcaggccctgcggcggctgtttgaagctgtgccccagctgggcggggccgccccccaggccccagctgcccaccagaagccagaggcctctgtggagcaggcctttggagagctgaccagggtgtccacagaggtggcccagctgaaggagcagaccctggcccggctgctggacatcgaggaggccgtgcacaaggccctgagctccatgagcagcctgcagcctgaggccagcgcccggggccacttccagggcccccccaaggaccacagcgcccacaagatctctgtgacagtgagcagcagcgcccggcccagcggcagcggccaggaggtgggcggccagacagctgtgaagaaccaggccaaggtggagtgccacacagaggcccagagccaggtgaagatccggaaccacacagaggcccggggccacacagccagcacagcccccagcacccggcggcaggagaccagccgggagtacctgtgccccccccgggtgctgcccagcagccgggacagccccagcagccccaccttcatcagcatccagagcgccaccaggaagcccctggagacccccagcttcaagggcaacccagatgtgtctgtgaagagcacccagctggcccaggacatcggccaggccctgctgcaccagaagggcgtgcaggacaagacaggcaagaaggacatcacccagtgcagcgtgcagcctgagcccgccccacccagcgccagccccctgccccggggctggcagaagtctgtgctggagctgcagacaggccctggcagcagccagcactatggagccatgaggacagtgacagagcagtatgaggaggtggaccagtttggaaacacagtgctgatgagcagcaccaccgtgacagagcaggccgagccccccaggaaccctggcagccacctgggcctgcacgccagccccctgctgcggcagttcctgcacagccctgctggcttcagcagtgacctgacagaagctgagaccgtgcaggtgtcctgcagctacagccagcctgctgcccagtag

SEQ ID NO: 258376 - DNA, 5532 bp, Artificial Sequence
  derived and/or modified sequence
atggccgacacccagacccaggtggcccccacccccaccatgcggatggctaccgccgaggacctgcccttgcctcctccgccagcactagaggacctgcccctcccgccaccaaaggagtctttcagtaaatttcaccagcagcggcaagcatctgaactgcggcgtctctaccgacacatccatccagagctgaggaagaaccttgccgaggccgtggccgaggatttggccgaagtcctcggctcagaggagcctacagagggcgacgttcagtgtatgcgttggatctttgagaattggagactggatgccatcggcgagcacgagcgccccgccgctaaggagcccgtgctgtgcggcgacgtccaggccacatcgagaaagttcgaggaaggctcatttgcaaattccacagatcaggaaccaacccggccgcagccaggcgggggtgatgtgcgcgccgcacgttggttatttgaaacaaagcctcttgacgaattgacaggtcaggctaaggagctggaggccacagttagggagcccgctgccagcggcgacgtgcaggggactaggatgctatttgaaactcgtccgctggatcggttagggtctcggccttcgcttcaggagcaatctccgctggagctgcggtccgagatccaggaactgaagggtgacgtgaaaaagacagtgaagctctttcagaccgagccactgtgcgctatccaggatgccgaaggcgctatccatgaggtgaaggcagcctgtcgggaagagattcagagcaatgccgttaggagtgcaagatggctttttgaaactaggcctctggatgcgatcaatcaggatccgtctcaggtccgcgttatccggggaataagcctggaggagggcgctaggcccgatgtcagtgccacccggtggatttttgaaactcagccgctggacgcgatacgtgaaatcctggtggatgaaaaagactttcagccgagccctgacctgattcccccgggcccagacgtccagcagcaacagcatttgtttgaaacacgggcgctggatacactgaagggcgacgaggaagccggagctgaggcacctcccaaggaagaggtggtccctggcgacgtgcgttcaaccttgtggctctttgagactaagcctttggatgccttcagagacaaagtccaagtggggcacctgcaacgggtggaccctcaggatggagagggacacctcagcagtgacagctccagcgcactacccttcagtcagagcgctccccagagggatgaattgaagggggacgtgaaaaccttcaagaacctgttcgaaacactgccactggacagtattggccagggggaagtgctcgcccatggcagcccctcccgtgaggagggcacggattccgccggtcaggcccaaggaataggaagcccagtttacgctatgcaggatagcaaaggccggttgcacgctctaacttcggtctcccgggagcagatcgtgggaggggacgtccaagggtataggtggatgttcgaaacccagcctctggatcagctcggacggtccccgtcaacaatagacgtcgtccgtggaatcactcgccaagaggtggtcgcaggtgacgtgggcacagcgcgctggctgttcgagacacagcctctggagatgatccaccagagggaacagcaggagagacagaaggaggaagggaaatctcagggtgatccacagcctgaagcccctcctaagggtgatgtacagacaatcagatggctgtttgagacatgcccaatgtcagaacttgctgagaagcagggctctgaggtcaccgaccccaccgccaaggccgaggcccagtcatgtacatggatgtttaagcctcaaccagtcgaccggcctgtaggttcaagagagcagcaccttcaagtctcgcaagtgccagctggcgaacggcagactgacagacatgtttttgaaaccgagccactgcaggcttccggtagaccatgcggccgtaggccggtccgatactgtagccgggttgagatccccagcggccaggtgagtcgtcaaaaagaggtgttccaagccctggaggcagggaaaaaggaagaacaggaaccccgtgttatcgcaggcagcattcccgctgggagtgtgcataaattcacttggttatttgaaaactgtccaatggggtccctggctgccgaatcaatacagggggggaatcttctggaagagcaaccaatgtccccttcaggcaatcgtatgcaggaatcccaggagaccgctgccgaaggaacattacggacattacatgcaacacccggaatcttgcaccatggcggaatactcatggaggcaagaggccccggagagctttgtttggcaaagtatgtactcagcggtaccgggcaaggtcacccctatatcagaaaagaagagcttgtgagcggcgagctgcccagaatcatatgccaagtgctgagacgaccagacgtggatcagcagggccttctcgtgcaggaggatcctactggtcagctgcagctgaagcccctccgactccctactcctggaagcagcggcaacattgaggacatggaccctgaactgcagcaactgctggcttgtggactcggaaccagcgtggcaagaactggactggtcatgcaggaaacagagcagggccttgtggccttgacggcgtattccctccagccacgtctcaccagtaaagcttcagagagaagcagcgtgcagcttttggcgagctgcattgataagggagacctgagtgggctccacagcctgaggtgggaaccccccgccgatccttcgcctgtcccggcgtcagaaggggctcagagcttacaccccaccgaatctattatccacgtgccgccattagacccgtccatgggcatgggccatcttcgcgcctcaggcgcaactccttgccccccccaggccatcggaaaggccgtccctcttgcaggagaagctgcggctccagctcagctacaaaacacagagaaacaggaagattctcactctgggcagaagggcatggccgttctcggtaagtctgagggcgccactactacccccccaggccctggcgccccagacctgctggctgcaatgcagagtttaaggatggctacagcagaggcgcagtccctgcaccaacaggtgctgaacaaacacaaacagggtcctaccccaaccgctaccagtaaccctattcaggacggtctgagaaaggccggagccacgcagtcaaacatccgccccgggggaggaagtgacccgcgcatcccagccgccccaaggaaagtgtcccgggaggagcaggccctgcccaggggcctgccaggcggctgggttaccattcaggatggaatttacacagcacatccagtgaggacattcgatcccccaggaggcgtacagctctcacagcgggaaccgcagtcccgccacagggaaaccgccctgtcagtccaagccccacggcccctgcagggtggtccgggccagtccactggtccagggcgcgaagagcccggcggttgcactcaaatggcctggggaccccccggtaaggcaatggccgaagtgtgtcctggcggactgcaagctgccgaaacaactctcaagaccgccccccttggcaggcacatcctagctagcggtccacaggccgctggggctagtcctcaccctcataacgcctttgttcccccccccccaactctgccggctgccgtgacgggccctgatttcccggcaggcgctcacagggccgaggacagcatccagcaggcatccgagcctttgaaggacccacttctgcacagtcattcctcaccggcaggccagcggacaccgggagggagtcagaccaaaacccccaaactcgaccccactatgccccccaagaagaaaccccagttgcctcccaagcctgctcacctaacccaaagccaccctccgcagaggctgcccaaacccctgcctttgtcccccagcttttcttccgaagttggacagcgcgaacaccagcgaggtgaaagagatactgcgatcccccagccagctaaagtcccaaccaccgtggaccaaggtcacattcctctcgctaggtgtcctagtggtcatagccaacccagccttcagcacggcctgtccacgacagcgcccaggcctactaaaaaccaggccacaggttcaaacgcccagtcttccgaaccacccaagcttaatgccctgaaccacgaccccaccagccctcagtggggcccaggtccttcgggagagcagcccatggagggcagtcaccaaggagccccagaatccccagattccctgcaaaggaatcaaaaggagttacaagggcttctcaaccaggtccaagccctggaaaaagaagctgctagtagcgttgacgtgcaggccctgcgacgcctcttcgaagccgtcccacagctgggaggtgcggccccacaggcaccagccgcacaccagaaacccgaggcttcagtggagcaggcctttggtgagctgacaagggtgtctactgaggtggctcagcttaaagaacagacccttgcacgactcctggacatagaagaggcggttcacaaagcattgagttcaatgagcagtctgcagcccgaagctagcgcacgtggccatttccagggccctcccaaagaccactcagcccacaagatttctgtgactgtgtcaagcagcgcgaggccttcaggctccgggcaggaggtaggcggccagacggccgtcaagaatcaagctaaagtggagtgccacactgaggcacaaagccaggttaagatacggaatcatacagaggcaagggggcacacagcgtccaccgctccatccacccgacggcaggagacctctcgcgagtacctgtgcccgcctagagtcttgcctagttccagagattcccctagttctcctacatttattagtatccagtccgctacgaggaagccccttgaaaccccttcatttaaaggaaacccggatgtctcggtgaagtcaacccagcttgcccaagacatcggccaggccctgttacatcaaaaaggagtgcaagacaagactggtaagaaggacattacacagtgtagtgtccaaccagaacccgcacccccatccgctagccctctcccaaggggatggcagaaaagtgtgttggagctgcagacaggtcctggtagcagtcagcactacggagccatgaggaccgtgaccgagcaatatgaggaggtcgaccagttcgggaacactgtcttgatgtcctcaaccactgtgacggaacaagctgaacctccacgcaaccccggatcccacctcggattgcacgcaagccctctgcttcgccagttccttcactctcctgccggctttagttcggatctgaccgaggctgaaaccgtccaagtttcttgctcatatagtcaaccagccgcccaatag

SEQ ID NO: 258377 - DNA, 1581 bp, Artificial Sequence
  derived and/or modified sequence
atgccccccaagaagaagccccagctgccccccaagcccgcccaccttacacagtcgcaccccccccaaaggctcccaaaacctctgccgttatctccctcttttagctctgaggtaggacaacgtgagcaccagcgtggtgaaagagataccgctatcccacagcctgcgaaagtgcctactaccgtggatcagggccatatccccctggcaaggtgcccatccggccactcccagcccagcctacagcatggcctgtctaccacggcaccacggccgaccaaaaaccaagctactggctctaatgcccagtctagtgaaccaccgaaattgaacgccctgaaccacgacccaacttcgccacaatggggaccagggccgtctggtgagcaacccatggaaggttctcatcagggcgcacctgagtctcctgatagcttacaacgtaaccaaaaagagctacagggacttctgaaccaggtccaagccttggaaaaagaagctgcaagtagcgtggacgtgcaagcactaaggcgcctttttgaagccgttccccaactggggggggctgccccccaagctccggccgcccatcagaaacctgaggctagcgtagaacaggcattcggtgaattgactagggtcagtaccgaggttgcacaactgaaagagcaaacccttgcgcggcttctggacatcgaagaggccgtgcacaaggcactgtcaagtatgagctccctgcagccggaagccagtgcaagagggcatttccaaggtccgccgaaggatcatagtgcgcacaagatcagcgttactgtgtcaagctcagctagaccgtcaggctctgggcaggaggtcgggggacagacagctgtgaagaaccaggcaaaagtcgagtgtcacaccgaagctcagtctcaggtcaagattagaaaccacaccgaggcccggggtcatactgcctccactgcacccagtacacgaagacaggagaccagtcgtgaatacctgtgtcccccccgcgttctgccgtcctcgcgggacagcccctcctcacccacgttcatctccatccaaagtgcaacgcggaagcctctggaaactccctcgttcaaggggaatccagacgtgagtgttaaatctacccagctggcacaggacatcggtcaggctctgcttcaccagaaaggcgtgcaagacaagacaggtaaaaaggatatcacccagtgttcggtacagcccgagccagcccccccttctgcgtcacccctgccaagggggtggcagaaaagtgtgcttgagctacagaccggtcccgggagcagccagcactatggtgcaatgcgcaccgtgacagagcagtatgaggaagttgatcaattcggcaacactgtgctgatgtctagcaccacagtaaccgagcaggccgagccacctagaaacccaggtagccacctgggccttcatgccagccctctgctccgacagttcttgcatagcccagctggtttcagttctgaccttaccgaggcagaaacggtccaggtgagctgttcttactcccagcccgccgcgcagtag

SEQ ID NO: 258378 - DNA, 5531 bp, Artificial Sequence
  derived and/or modified sequence
atggccgacacccagacacaagttgccccaactccaacgatgcggatggccactgccgaggacctgcccctgcctcctcctcccgctctggaggatctgccattaccaccccctaaagaaagtttctcaaaattccaccagcagcggcaggcgtctgaactgcgacggttgtatcggcacattcacccagaactacggaaaaacttagctgaagccgtggccgaagacttggctgaggtgctgggaagcgaagagccaacagaaggcgacgttcagtgtatgcgttggatctttgagaattggcgcctcgacgccattggggaacatgagcgtcccgcagcaaaagaaccggtgctgtgtggtgatgtgcaggccactagccgcaaatttgaggaagggtcctttgcgaattccaccgaccaggaacctacccgtccgcagccgggaggcggagatgtgagggcggctcggtggctgtttgagaccaaacccctggatgagctgactggacaggctaaagagctcgaggcaacagtacgcgagccagccgcttcaggagacgtacagggcacccgtatgcttttcgagacacggccactggataggctgggttcacggccatcgctgcaagagcaaagcccgctggaactccgatcagaaattcaggagttaaagggggacgtaaaaaagactgtcaaactgtttcaaacagagccactttgcgccattcaggacgctgaaggggctattcatgaagtcaaggcggcatgccgtgaagaaatccagagcaacgcagtgcggtctgcacggtggctgttcgaaaccaggcctcttgacgccatcaatcaggaccctagccaggtgcgagttatccgtggaatttccctggaagagggagctcggccagacgtgagcgcaacgcgatggatttttgagactcagccattagatgcaattcgtgagatactggtcgacgaaaaggatttccagccctcgccagacctgattccaccgggacctgacgttcaacagcagcagcatttgttcgagactcgcgctttggataccctcaagggcgacgaggaagccggagctgaggctcctcccaaggaggaagtcgttcccggagacgtccgcagcacactgtggctgtttgaaacaaagccgctagatgctttccgggataaggtccaggtggggcacttacagagagtggatccgcaggatggagaagggcacctgagctccgatagttcctctgccctgcctttcagccagagtgcccctcagagagacgagctcaaaggcgacgttaaaacgttcaaaaatttattcgaaacgttgcctctggacagtattgggcagggggaagttttggcacacgggtccccatctcgcgaagagggcactgattccgccggtcaggcccagggtatcggcagccctgtatatgctatgcaggatagtaagggaaggctgcacgccctaacttctgtctcaagagagcaaattgtcgggggagatgtgcagggataccggtggatgtttgagacacagcctctagaccagctgggtcggtctccatcaacaattgatgtcgtacgcggaattactagacaagaggtcgtggcaggtgatgttggtactgcaagatggctttttgaaactcagccccttgagatgatccaccagcgagaacagcaagaacggcagaaagaagaagggaaatctcaaggcgatcctcagcccgaggcacctccaaaaggtgacgttcagacgatcagatggctgttcgaaacatgtcccatgtccgagctggccgagaaacaaggctctgaggtgactgatcctactgcaaaggcagaggcccagtcctgcacgtggatgtttaagccacaacccgtagaccgtccagtagggtccagggagcagcacctgcaggtttctcaggtcccagctggagaaagacagacagacaggcacgtgttcgagaccgagccattgcaggcatcaggcagaccgtgcggcagaagaccggtgcgctattgcagcagagtagagatccccagcggccaagtgagtaggcagaaggaggtgtttcaggcactggaagcaggaaaaaaagaggagcaggaacctcgagttatcgctggttccattccagccggatcagttcacaagttcacttggctatttgagaactgtcctatggggagcctggcagcggaatccattcagggcggtaatctccttgaagagcagcccatgtccccttctgggaacaggatgcaggagtctcaggaaactgccgctgaaggaaccctgcgcacactccacgcaacaccaggcattctccaccacggtggcatcctgatggaggcccgagggcctggtgaactttgcttggcaaaatacgtactttctggcactgggcaggggcacccctatatcaggaaggaggagttagtttccggcgagctgcccagaatcatctgccaggtactccggaggcccgacgttgaccagcagggcctgctagtacaagaggaccccactggccaattgcagcttaagcctctgagattgcccacacctggcagcagtggtaatatagaagacatggatcccgagctgcaacaactgctcgcatgcgggctggggactagcgtcgcgagaacaggtttagtcatgcaggagaccgaacagggtctcgttgcactgactgcttacagcctgcagcctcgtcttacatccaaagcatccgagaggtcctctgttcagctgctggccagttgtattgacaagggcgatctcagcggactgcactcgctgcgatgggaaccaccagccgatccaagtcccgttcccgctagcgagggggctcagagcctccacccaactgagagtattatccatgttccccctctggacccttccatgggcatggggcacctgagagcttctggagctactccgtgcccacctcaagctatcggcaaagcagtgccgttggccggtgaggcagccgctccggctcaactccaaaatactgaaaagcaggaggactcccattctggacaaaaggggatggcggtgttgggcaagagcgaaggtgctaccacaacccccccaggccctggcgctcccgacctcctcgccgctatgcagtcactcaggatggcaactgcagaagcccagtctctgcaccaacaggtgctcaacaaacataagcagggacctacccccaccgctactagcaatccaattcaggacggcctgcgaaaggctggagctactcagtccaacatcagacccggaggaggcagcgacccacggataccagcggcaccaaggaaagtgtcaagagaggaacaagccctgcccagaggattgccaggcggatgggtcacaattcaggacggaatttacacagcccacccagtgcgtacctttgatccacccggaggagtgcaattaagccagagagaaccccagagcaggcatcgggagaccgcactgagcgtgcaagcccctaggccactgcaagggggacccggacagagtaccggcccaggacgggaagagcccggtggctgcactcagatggcctgggggcctcctggcaaggctatggcagaggtgtgtcctggaggcctccaggccgctgagacaacactgaagactgcaccactcggccgacacatactcgcctccggcccacaggccgctggagcatcccctcacccccataatgctttcgtacccccacctcctacgctgccagccgcagttacaggcccagatttccctgcaggagcccacagagcggaagatagtatccagcaagcgagcgagccactcaaggatcccttgctccacagtcactcttcacctgccggacagaggacccccggaggatcacagacaaagacacccaagctcgaccccacaatgccaccgaagaagaagccccagctgccgccaaaaccggctcacctcacccagagtcatcctccccagaggctgccaaagccccttcccctgtcgccttccttctcctccgaggttggccagcgggaacaccagcggggtgagcgcgataccgcaataccgcaacctgcaaaggtgcccacgaccgtggaccaagggcacattcctctcgccaggtgtccaagcgggcactcccagcccagtctgcaacacggactcagcaccacagccccaaggcctaccaagaatcaggcgaccgggtccaacgcccagtcttctgagcccccaaaactgaacgctctcaatcacgacccgacatccccacagtgggggccaggcccatcaggtgagcaacccatggaagggagccaccagggcgctccagagtctccggattcgctccaaagaaatcagaaggaattgcaggggttgttgaatcaggtccaggcattagaaaaggaagcagccagcagtgtcgacgttcaggctttgcggagattgttcgaagcggtgccacaattggggggtgccgcaccccaggcgcctgccgcacaccaaaaaccggaggcaagtgtggaacaggcctttggcgaactcaccagggtctccacggaagttgctcagctcaaggagcagaccctggctcgcttgctggacatcgaggaggcagtgcacaaggccctcagctctatgagtagtctccagccggaggcttccgccagagggcactttcagggaccacctaaagatcatagcgcccataagatcagtgtcaccgtgtctagcagtgcgagaccctctgggagcggccaggaagtgggcggtcagacagctgttaaaaaccaggcaaaggttgaatgccacaccgaagcgcagtcgcaagtgaaaataaggaatcatacagaggctcggggtcacactgcatctactgctccatctacccgaaggcaggagacctcacgggagtacctgtgtcccccaagggtgttacccagctctagggattcacctagcagccctacttttataagcattcaatcggccaccaggaagcctcttgaaacaccctcttttaagggaaatcctgacgtgagcgtaaagagtacacagctcgcccaagatattgggcaggcactccttcaccagaagggtgtccaggacaagaccggaaagaaagacattacccagtgctcggtgcagcctgagcccgctcccccttctgcctctcccttgcctcggggatggcaaaagagcgttttagaactgcagacgggccctgggagctcccagcattacggcgcaatgaggacagtcacagaacagtacgaggaggtggaccaattcgggaataccgtgctgatgagtagcactacagtaactgagcaagctgaacctccccgaaatccgggtagccaccttgggttacacgcaagcccgctcctccgtcagttcctgcactcccccgctggctttagtagtgatctcaccgaggccgaaactgttcaggtcagctgcagctactctcaacccgctgcccagta

SEQ ID NO: 258379 - DNA, 1581 bp, Artificial Sequence
  derived and/or modified sequence
atgccccctaagaagaagccacaactgccccctaagccagcccacttaactcagagccacccaccgcaaagattacccaagccgttaccgttaagccccagctttagtagcgaggtaggccagagggaacatcagcgcggagaaagagacaccgctattcctcagcctgccaaggtaccgaccactgtggatcagggacatattcccctcgcaaggtgcccttctggccattcacagccttcactgcaacacggattgagtactaccgccccacgacccaccaaaaatcaggcaaccggcagtaacgcacagtcctccgagccaccaaaactgaacgcactcaatcacgatccgacgtcaccccagtgggggcctggcccatccggcgagcaaccaatggagggctctcaccagggagcccctgagagtcccgattcccttcaaaggaaccagaaggaactccagggccttctaaaccaggtgcaggcactcgagaaagaagcagcatcatccgtggacgttcaagcgctgcgcaggctgttcgaggccgttccccagctgggtggagcggcacctcaggctccggctgcacatcagaagcccgaagccagcgtcgaacaggccttcggcgaacttacacgtgtatctactgaggtcgcgcagctgaaagaacagaccctggctcgcctgctggatatagaggaggcagtgcataaggccctcagcagcatgtccagtctccagcctgaagctagtgctcgaggccactttcagggccctcccaaagaccatagcgctcacaagatttctgtgactgtttcgtcaagcgcgagaccctccggaagcggacaggaagttgggggtcagacggccgtgaaaaaccaggctaaagtggaatgtcacacagaggcgcagtcacaggtaaaaattagaaaccatacagaggctcgcggacataccgcctccacagcgccttcaaccagacgccaggagacctccagagaatatttgtgccctcctcgggttttaccatcctcacgggactcgccctccagccctacatttatctcaattcagagcgccactaggaagcccctggaaactccctcatttaaagggaaccccgatgtgagcgtcaagtcaacgcagttggcacaggatataggccaggccctattgcatcagaaaggagtacaagataaaacgggcaagaaagatattacacaatgctccgtgcagcccgaacctgcacctccaagtgcaagcccgctgcctaggggctggcagaaatccgtgctggagctccagactggtccagggagttcacagcattatggtgccatgaggacagtcaccgagcagtacgaggaagttgaccaattcgggaataccgttctgatgtcttctacgaccgtgacagagcaggctgagccaccaagaaatccaggatcccatttgggcctccacgcttcgccgctgttaagacagttcctgcattcccccgcaggcttcagctctgatcttacagaggctgagacagtgcaggttagctgtagttattcacagcctgctgcacagtag

SEQ ID NO: 258380 - DNA, 6460 bp, Artificial Sequence
  derived and/or modified sequence
cagagacctggagccagggcagcaagaaggtgtctgttggagccagcagaacagaaccaatttgaacaagaacctccagaggaacgacgaaccctgagaccacagctgctacagaccacaaacaccccatcagccaagagagacccttgcatccagcctctaccctgctgaacatctagatctaaggctcccaatcccatcctcatctctgccccttcttctcagaaggatggccgacacccagacacaggtggcccccacaccaaccatgaggatggcaactgcagaggacctgcccctccctccacccccagccctggaggacctgccactgccgccacccaaggaatccttctccaagttccatcagcagcggcaagctagtgagctccgccgcctctacaggcacatccaccctgagctccgcaagaatctggctgaggctgtggccgaggatctggctgaggtcctgggctctgaggaacccaccgagggtgacgttcagtgcatgcgctggatctttgagaactggagactggatgccattggagaacacgagaggccagctgccaaggagcccgtgctgtgtggtgacgtccaggccacctcccgcaagtttgaggaaggctcctttgccaacagcacagaccaggagccaaccaggccccagccaggtggaggagacgttcgtgcagcccgctggctatttgagacaaagccactggacgagctgacagggcaagccaaggaactggaggccactgtgagggagcctgcagccagcggagatgtgcagggtaccaggatgctctttgagacgcggccgctggaccgcctgggctcccgcccctccctgcaggagcagagccccttggaactgcgctcagagatccaggagctgaagggtgatgtgaaaaagacagtgaagctcttccaaacggagcccctgtgtgccatccaggatgcagagggcgccatccatgaggtcaaggccgcatgccgggaggagatccaaagcaacgcggtgaggtctgcccgctggctctttgagacccggcctctggacgccatcaaccaggaccccagccaggtgcgggtgatccgggggatttccctggaggagggggcccggcccgacgtcagtgcaactcgctggatctttgagacacagcccctggatgccatccgggagatcttggtagatgagaaggacttccagccatccccagaccttatcccacctggtccagatgttcagcagcagcagcatctgtttgagacccgagcgctggacactctgaagggggacgaagaggctggagcagaggccccacccaaggaggaagtggtccctggtgatgtccgctccaccctgtggctatttgaaacaaagcccctggatgctttcagagacaaggtccaagtgggtcacctacagcgagtggatccccaggacggtgaggggcatctatccagtgacagctcctcagcactgcccttctctcagagtgccccccagagggatgagctaaagggggatgtgaagacttttaagaacctttttgagacccttcccttggacagcattggacagggtgaggttctggcccatgggagtccaagcagagaagaaggaactgattctgctgggcaggcccagggcatagggtccccagtgtatgccatgcaggacagcaagggccgcctccatgccctgacctctgttagcagagagcagatagtcggaggtgatgtgcagggctacaggtggatgtttgagacacagcccctagaccagctcggccgaagccccagtaccatcgacgtggtgcggggcatcacccggcaggaagtggtggctggggacgttggcacagctcggtggctttttgagacccagcccctggagatgatccaccaacgggagcagcaggaacgacagaaagaagaagggaagagtcagggagacccccagcctgaggcacccccaaagggcgatgtgcagaccatccggtggttgttcgagacttgcccaatgagtgagttggccgaaaagcaggggtcagaggtcacagatcccacagccaaggctgaggcacagtcctgcacctggatgttcaagccccaacctgtggacaggccagtgggctccagggagcagcacctgcaggttagccaggtcccggctggggaaagacagacagacagacacgtctttgagaccgagcctcttcaggcctcaggccgtccctgtggaagacggcctgtgagatactgcagccgcgtggagatcccttcagggcaggtgtctcgtcagaaagaggtttttcaggccctggaggcaggcaagaaggaagaacaggagccccgggtaatcgctgggtccatccccgcgggttctgtccacaagttcacttggctttttgagaattgtcccatgggctccctggcagctgagagcatccaagggggcaacctcctggaagagcagcccatgagcccctcaggcaacaggatgcaagagagccaggagactgcagctgaggggaccctgcggactctgcatgccacacctggcatcctgcaccatggaggcatcctcatggaggcccgagggccaggggagctctgtcttgccaagtatgtgctctcgggcacagggcaggggcacccttatatacgaaaggaggagctggtgtcaggtgaacttcccaggatcatctgccaagtcctgcgccggccagatgtggaccagcaggggctgctggtgcaggaagacccaactggccagctccaactcaagccgctgaggctgccaactccaggcagcagtgggaatattgaagacatggaccctgagctccagcagctgctggcttgcggtcttgggacctccgtggcaaggactgggctggtgatgcaggagacagagcagggcctggtcgcactgactgcctactctctgcagccccggctaactagcaaggcctctgagaggagcagcgtgcagctgttggccagctgcatagataaaggagacctgagtggcctgcacagtctgcggtgggagcccccggctgacccgagtccagtgccagccagcgagggggcccagagcctgcacccaactgagagcatcatccatgttcccccactggaccccagcatggggatggggcatctgagagcctcaggggccaccccttgccctcctcaggccattggaaaggcagtccctctggctggggaagctgcagcaccagcccaattgcaaaacacagaaaagcaggaagacagtcactctggacagaaagggatggcagtcttgggaaagtcagaaggagccacgactacccctccggggcctggggccccagacctcctggccgccatgcagagtctgcggatggcaacagctgaagcccagagcctgcaccagcaagttctgaacaagcacaagcagggccccaccccaacagccacttccaaccccatccaggacggtcttcggaaagctggggctacccaaagcaacataaggcctgggggtggaagtgatccccggatcccagcagcccccagaaaggtcagtagggaagagcaagcactacccagagggctgcctggggggtgggtgacaattcaggatggcatctacaccgctcatcccgtgaggacctttgacccacctgggggtgtccagctttctcagagggaaccccagtcaaggcacagggagactgccctctcagtccaggctccccgcccactccagggaggcccaggtcagagtactgggccagggcgggaggagcctgggggctgcacacagatggcctgggggccaccagggaaggcgatggcagaagtctgcccagggggcctccaagctgcagagaccaccctgaagactgcccctctaggccgccacattctggcctctgggccccaagctgcaggtgccagcccgcacccccataatgcctttgttcctcctcctcctactctcccagctgctgtgacaggacctgactttccagctggagcccaccgtgctgaggactccatccagcaagcctctgagcccctgaaggacccccttcttcactcccacagcagccctgctggccagagaacccctggagggtcacagacaaagaccccaaaactggaccccaccatgcccccaaagaagaagccgcagctgccccctaaacctgcacacctaacccagagccaccctcctcagaggctgcccaagcccttgcctctatctcccagcttttcctcggaggtggggcaaagagaacaccaacgaggtgagagagatacagccatccctcagccagccaaggttcccactactgtagaccagggccacatacctctggccagatgtcccagtggacatagccagcccagcttacaacatggcctcagcaccacggcccccaggcccaccaagaatcaggctacaggcagcaatgcccagagctctgagccccccaagctcaatgccctcaaccatgatcccacctcaccacagtggggccccggcccctcaggagagcagcccatggaaggttcccaccaaggggcccctgagagccctgacagtctgcaaagaaaccagaaagagctccagggcctcctgaaccaggtgcaagccctggagaaggaggccgcaagcagtgtggacgtgcaggccctgcggaggctctttgaggccgtgccccagctgggaggggctgctcctcaggctcctgctgcccaccaaaagcccgaggcctcagtggagcaggcctttggggagctgacacgggtcagcacggaagttgctcaactgaaggaacagaccttggcaaggctgctggacattgaagaggctgtgcacaaggcactcagctccatgtctagcctccagcctgaggccagtgccagaggccatttccagggacctccaaaagaccacagtgcccacaagatcagtgtcacagtcagcagtagcgccaggcccagtggctcaggccaggaggtcggaggtcaaactgcagtcaagaaccaagccaaggttgaatgccacactgaggcccagagtcaagtcaagatcagaaatcacacagaggccagaggtcacacagcctcaactgccccttccaccaggaggcaggagacatcaagagagtatttgtgccctcctcgggttttaccttccagccgagattctccctcctccccaacatttatctccatccagtcggccacaaggaagcctctagagactcccagctttaagggcaaccctgatgtctcagtgaaaagcacacaactggctcaggacataggccaggccctgctccaccagaaaggtgtccaagacaaaactgggaagaaggacatcacccagtgctctgtgcaacctgaacctgcccctccctcagccagtcccctgcccagagggtggcaaaagagtgttctggagctacagacggggccagggagctcacaacactatggagccatgagaaccgtgactgaacagtatgaggaggtggaccagtttgggaacacagtcctcatgtcttccaccacagtcaccgagcaggcagagccacccaggaacccaggctcccacctcgggctccacgcctcccccttgctgaggcagttcctgcacagcccagctgggttcagcagtgacctgacagaagctgagacggtgcaggtgtcctgcagctactcccagccagctgcccagtgaggcccaccgcctcccaccacacctgccacctgttcctggcctccactgccccaggactgaagtgggtacctgcctcctgtacactggagcaaggaccaagaggaaatggcatcttcagaggattactgtgggccatttccctttcgcagttctttcaataggcccagttcttccaaatggaaaaagaaaggtctggaagaggcccacagagttgcacaggcgtgggggtaggatgggggctcccagctgcttgtggaggatgtaatatatacagacacacacatgtttttcacacaggcctggcccacgcatcgacatgtgtgaatttgcacaccactgcctgaattggagccccccagagtgtccctctacccagagtttttatttctttaattagtctgagtgttcccagccatctgctccttaatccctggagaggaacagagccaactggacacagcgttggtctctgtttggaatcactgtgaggtctccagaaggacctggccgccagccccttcatcaccatctccatcattcagctggtcatctggtggcccaaaggtcacccaaagagtcagcaatcagcatgtccctagaagccaaatgcactgcctttctctgtccccatgactgtcccccactctgcaccccaaatgggaagcatacggtctgaataaatccaagttttattctcta

SEQ ID NO: 258381 - DNA, 2596 bp, Artificial Sequence
  derived and/or modified sequence
acagagacctggagccagggcagcaagaaggtgtctgttggagccagcagaacagaaccaatttgaacaagaacctccagaggaacgacgaaccctgagaccacagctgctacagaccacaaacaccccatcagccaagagagacccttgctgctgtgacaggacctgactttccagctggagcccaccgtgctgaggactccatccagcaagcctctgagcccctgaaggacccccttcttcactcccacagcagccctgctggccagagaacccctggagggtcacagacaaagaccccaaaactggaccccaccatgcccccaaagaagaagccgcagctgccccctaaacctgcacacctaacccagagccaccctcctcagaggctgcccaagcccttgcctctatctcccagcttttcctcggaggtggggcaaagagaacaccaacgaggtgagagagatacagccatccctcagccagccaaggttcccactactgtagaccagggccacatacctctggccagatgtcccagtggacatagccagcccagcttacaacatggcctcagcaccacggcccccaggcccaccaagaatcaggctacaggcagcaatgcccagagctctgagccccccaagctcaatgccctcaaccatgatcccacctcaccacagtggggccccggcccctcaggagagcagcccatggaaggttcccaccaaggggcccctgagagccctgacagtctgcaaagaaaccagaaagagctccagggcctcctgaaccaggtgcaagccctggagaaggaggccgcaagcagtgtggacgtgcaggccctgcggaggctctttgaggccgtgccccagctgggaggggctgctcctcaggctcctgctgcccaccaaaagcccgaggcctcagtggagcaggcctttggggagctgacacgggtcagcacggaagttgctcaactgaaggaacagaccttggcaaggctgctggacattgaagaggctgtgcacaaggcactcagctccatgtctagcctccagcctgaggccagtgccagaggccatttccagggacctccaaaagaccacagtgcccacaagatcagtgtcacagtcagcagtagcgccaggcccagtggctcaggccaggaggtcggaggtcaaactgcagtcaagaaccaagccaaggttgaatgccacactgaggcccagagtcaagtcaagatcagaaatcacacagaggccagaggtcacacagcctcaactgccccttccaccaggaggcaggagacatcaagagagtatttgtgccctcctcgggttttaccttccagccgagattctccctcctccccaacatttatctccatccagtcggccacaaggaagcctctagagactcccagctttaagggcaaccctgatgtctcagtgaaaagcacacaactggctcaggacataggccaggccctgctccaccagaaaggtgtccaagacaaaactgggaagaaggacatcacccagtgctctgtgcaacctgaacctgcccctccctcagccagtcccctgcccagagggtggcaaaagagtgttctggagctacagacggggccagggagctcacaacactatggagccatgagaaccgtgactgaacagtatgaggaggtggaccagtttgggaacacagtcctcatgtcttccaccacagtcaccgagcaggcagagccacccaggaacccaggctcccacctcgggctccacgcctcccccttgctgaggcagttcctgcacagcccagctgggttcagcagtgacctgacagaagctgagacggtgcaggtgtcctgcagctactcccagccagctgcccagtgaggcccaccgcctcccaccacacctgccacctgttcctggcctccactgccccaggactgaagtgggtacctgcctcctgtacactggagcaaggaccaagaggaaatggcatcttcagaggattactgtgggccatttccctttcgcagttctttcaataggcccagttcttccaaatggaaaaagaaaggtctggaagaggcccacagagttgcacaggcgtgggggtaggatgggggctcccagctgcttgtggaggatgtaatatatacagacacacacatgtttttcacacaggcctggcccacgcatcgacatgtgtgaatttgcacaccactgcctgaattggagccccccagagtgtccctctacccagagtttttatttctttaattagtctgagtgttcccagccatctgctccttaatccctggagaggaacagagccaactggacacagcgttggtctctgtttggaatcactgtgaggtctccagaaggacctggccgccagccccttcatcaccatctccatcattcagctggtcatctggtggcccaaaggtcacccaaagagtcagcaatcagcatgtccctagaagccaaatgcactgcctttctctgtccccatgactgtcccccactctgcaccccaaatgggaagcatacggtctgaataaatccaagttttattctct

SEQ ID NO: 258382 - protein, 407 aa, Artificial Sequence
  derived and/or modified sequence
MEPHRPNVKTAVPLSLESYHISEEYGFLLPDSLKELPDHYRPWMEIANKLPQLIDAHQLQAHVDKMPLLSCQFLKGHREQRLAHLVLSFLTMGYVWQEGEAQPAEVLPRNLALPFVEVSRNLGLPPILVHSDLVLTNWTKKDPDGFLEIGNLETIISFPGGESLHGFILVTALVEKEAVPGIKALVQATNAILQPNQEALLQALQRLRLSIQDITKTLGQMHDYVDPDIFYAGIRIFLSGWKDNPAMPAGLMYEGVSQEPLKYSGGSAAQSTVLHAFDEFLGIRHSKESGDFLYRMRDYMPPSHKAFIEDIHSAPSLRDYILSSGQDHLLTAYNQCVQALAELRSYHITMVTKYLITAAAKAKHGKPNHLPGPPQALKDRGTGGTAVMSFLKSVRDKTLESILHPRG

SEQ ID NO: 258383 - protein, 420 aa, Artificial Sequence
  derived and/or modified sequence
MLHFHYYDTSNKIMEPHRPNVKTAVPLSLESYHISEEYGFLLPDSLKELPDHYRPWMEIANKLPQLIDAHQLQAHVDKMPLLSCQFLKGHREQRLAHLVLSFLTMGYVWQEGEAQPAEVLPRNLALPFVEVSRNLGLPPILVHSDLVLTNWTKKDPDGFLEIGNLETIISFPGGESLHGFILVTALVEKEAVPGIKALVQATNAILQPNQEALLQALQRLRLSIQDITKTLGQMHDYVDPDIFYAGIRIFLSGWKDNPAMPAGLMYEGVSQEPLKYSGGSAAQSTVLHAFDEFLGIRHSKESGDFLYRMRDYMPPSHKAFIEDIHSAPSLRDYILSSGQDHLLTAYNQCVQALAELRSYHITMVTKYLITAAAKAKHGKPNHLPGPPQALKDRGTGGTAVMSFLKSVRDKTLESILHPRG

SEQ ID NO: 258384 - DNA, 1224 bp, Artificial Sequence
  derived and/or modified sequence
atggagcctcatcggcccaatgtgaaaaccgccgttccgctgtctctggagtcataccacatctcagaagaatatggcttcctgttgcctgattccctcaaggagcttcccgaccactacaggccatggatggagatcgcaaacaaattgccccagctgatagatgcccaccagctccaggcccacgtcgataagatgcccctattgagctgtcaattcttgaagggacacagagagcagagactggcccacctggtcctgagtttcctcacaatgggttatgtttggcaggagggggaagcccagccggcggaggtgctgccaaggaacctagcattaccctttgtcgaggtctcgaggaacttgggtctgcctcctatcctggtgcattccgatctggtgcttactaattggactaaaaaggatcccgatggttttctggagatcggaaatttggagactattatcagttttcctgggggcgaatctctccacggatttatcctggtgactgccctagtggaaaaggaggccgtgcctggcattaaggcgctcgtccaagccactaacgctatcctgcagcccaaccaggaagccctgctgcaggccctgcagagactacgcctcagtatccaggatatcactaaaactcttggccagatgcacgattacgtggacccggacatcttctatgctggtatacgcatattcctctccggatggaaggacaatccggcaatgccagccggcctcatgtacgagggggtgagccaggagcccctcaagtattcaggcggaagcgctgctcagtcaacggtgctgcatgcatttgacgaattccttggcattaggcacagcaaggagtccggggattttctttaccggatgcgggactacatgccgccatcccacaaagccttcattgaggatattcattctgccccatccctgcgcgattatattctgagttctggccaggaccatctactgactgcttataaccagtgcgtgcaagccctcgcagaacttaggtcataccacatcactatggtgaccaagtatctgattactgcagctgccaaggctaagcatgggaagccaaatcacctgccaggtccacctcaggcactcaaggatcgcggcaccggtggtactgccgtcatgagctttctaaaaagtgtccgggataagactctcgaaagcatcttacacccccggggctag

SEQ ID NO: 258385 - DNA, 1263 bp, Artificial Sequence
  derived and/or modified sequence
atgttgcacttccactattatgatacatctaataaaattatggaaccacacagaccgaacgtcaagacggcagttcctcttagtctggagagctaccatataagcgaggagtatggattcctgttgcctgatagtctgaaggagctcccagatcactataggccctggatggaaatagcaaacaagttgccgcagctgatagacgcgcatcagctgcaagcccacgtggataaaatgccacttctgtcttgtcagtttttgaaaggccacagagagcagcgtctcgcacatctcgtgctgtcttttctgacaatggggtacgtgtggcaggaaggtgaagcacagcccgcggaggttcttcctaggaacctcgctctccccttcgtggaagtgtcacggaacttgggactgcctcccattctcgttcacagcgacttggtgctcacaaattggaccaagaaggatcccgatgggttcctggaaatcggaaatctggagaccatcatttcctttccgggcggagagtctttgcacggtttcattctggtgacagcactcgtggagaaagaggcagttccagggatcaaggctctagtgcaggcaacgaacgcaattctgcagcctaatcaggaggcactgcttcaagccctgcaaaggttgaggttgagtatccaggatatcacaaaaacacttggacagatgcatgactacgttgaccctgatatcttctacgcgggtatccggatatttctctccggctggaaggacaacccggcaatgccagcaggccttatgtacgagggcgtcagccaggagccccttaaatatagtggggggagtgctgcacagtccaccgtgctacatgccttcgatgaatttctcggcatccggcattccaaagaaagtggtgacttcctgtatcgtatgagggattatatgccacccagccataaagcgtttattgaggacatccactccgcaccttcccttcgcgactacatcctctctagcggacaggatcatctcctgaccgcatataaccagtgtgtgcaggcattagcagagctgcgctcttatcacattaccatggtgactaagtaccttatcactgcagctgccaaggcgaaacacggcaaacctaaccacctgccaggtccaccccaggccctcaaggatagaggtacgggcggaacagcggttatgtcctttctgaaatctgtgagggataagacacttgaaagcattctgcaccctaggggctag

SEQ ID NO: 258386 - DNA, 1227 bp, Artificial Sequence
  derived and/or modified sequence
atggagccccacagaccgaatgtgaagacagcagtgccattgtctttggaaagctatcacatatctgaagagtatggctttcttcttccagattctctgaaagaacttccagatcattataggccttggatggaaattgccaacaaacttcctcaattgattgatgctcaccagcttcaagctcatgtggacaagatgcccctgctgagctgccagttcctgaagggtcaccgggagcagcgcctggcccacctggtcctgagcttcctcaccatgggttatgtctggcaggaaggagaggcgcagcctgcagaggtcctgccaaggaatcttgcccttccatttgtcgaagtctccaggaacttggggctccctcctatcctggtccactcagacttggtgctgacgaactggaccaaaaaagatccagacggattcctggaaattgggaacctggagaccatcatctcatttcctgggggagagagcctgcatggttttatactggtgactgctttggtagagaaagaagcagtgcctgggataaaggctcttgttcaggccacgaatgctatcttgcagcccaaccaggaggccctgctccaagccctgcagcgactgagactgtctattcaggacatcaccaaaaccttaggacagatgcatgattatgtagatccagacatattttatgcaggcatccggatctttctctctggatggaaagacaacccagcaatgcctgcagggctgatgtatgaaggagtttcccaagagcccctgaaatactccggcgggagtgcagctcagagcacagtgcttcatgcctttgatgagttcttaggcattcgtcatagcaaggaaagtggtgactttctgtacagaatgagggattacatgcctccttcccataaggccttcatagaagacatccactcagcaccttccctgagggactacatcctgtcatctggacaggaccacttgctgacagcttataaccagtgtgtgcaggccctggcagagctgcggagctatcacatcaccatggtcaccaaatacctcatcacagctgcagccaaggcaaagcatgggaagccaaaccatctcccagggcctcctcaggctttaaaagacaggggcacaggtggaaccgcagttatgagctttcttaagagtgtcagggataagaccttggagtcaatccttcacccacgtggttaggag

SEQ ID NO: 258387 - DNA, 2294 bp, Artificial Sequence
  derived and/or modified sequence
agtccagatgatagttaagaaagcagtaagaatacagagagtccacaatgagatgaaaatgcactgccagttgaaacatcctcctacactggagctttataaatattttaaagacaaggattggattagatttgacattagaaatgtaccataatacagaaggcaatggacacctaaagaacagaatgaaaaccttcttaggaaatgaagcttgacacttcacccaccaggccaccacaagaatgttgcattttcattattatgatacttcaaacaaaataatggagccccacagaccgaatgtgaagacagcagtgccattgtctttggaaagctatcacatatctgaagagtatggctttcttcttccagattctctgaaagaacttccagatcattataggccttggatggaaattgccaacaaacttcctcaattgattgatgctcaccagcttcaagctcatgtggacaagatgcccctgctgagctgccagttcctgaagggtcaccgggagcagcgcctggcccacctggtcctgagcttcctcaccatgggttatgtctggcaggaaggagaggcgcagcctgcagaggtcctgccaaggaatcttgcccttccatttgtcgaagtctccaggaacttggggctccctcctatcctggtccactcagacttggtgctgacgaactggaccaaaaaagatccagacggattcctggaaattgggaacctggagaccatcatctcatttcctgggggagagagcctgcatggttttatactggtgactgctttggtagagaaagaagcagtgcctgggataaaggctcttgttcaggccacgaatgctatcttgcagcccaaccaggaggccctgctccaagccctgcagcgactgagactgtctattcaggacatcaccaaaaccttaggacagatgcatgattatgtagatccagacatattttatgcaggcatccggatctttctctctggatggaaagacaacccagcaatgcctgcagggctgatgtatgaaggagtttcccaagagcccctgaaatactccggcgggagtgcagctcagagcacagtgcttcatgcctttgatgagttcttaggcattcgtcatagcaaggaaagtggtgactttctgtacagaatgagggattacatgcctccttcccataaggccttcatagaagacatccactcagcaccttccctgagggactacatcctgtcatctggacaggaccacttgctgacagcttataaccagtgtgtgcaggccctggcagagctgcggagctatcacatcaccatggtcaccaaatacctcatcacagctgcagccaaggcaaagcatgggaagccaaaccatctcccagggcctcctcaggctttaaaagacaggggcacaggtggaaccgcagttatgagctttcttaagagtgtcagggataagaccttggagtcaatccttcacccacgtggttaggaggctgccctctccccagcaatgcagagcccccatggagggcaggtgggcctggagaatgagggtcagggttctgcctgggatcatccaggaaggatctcagccctattcatgtttctgctctacagagcactatattctccttgttgagagctgttggcttcacaaaggagagttgatgtggccaagcctttccctccctacctgatcactgcttaacggcatgtataatggatacttcctcatgcagaacccccagaggagtgactgtatgccattctctttgccaagtaatagaaaaccaatctaaatgtcaaaaatcagataaaattgcctggggatacattacttgttgattttcttaaaaaacaaattcacttaacaattcattaagttcatactgagcactgcctccaagattaaaaccaggatttctgtggtcccagaccagccctcttctccctgaatgtgttgagttggtggcaggaggttggaaatgctccagtggagatgggaagatagaggatgctgacaataaggacttggaagtcactagtgtgaaaatgagcagttaatgatatgggaacggatgagactttccacgtggtacctagatttgcaaattctattgtaatgcctttatttttagaagaattattctctcttcttactctgaaaatctgtatttgtaaaatgaatgaatggatcctatataagtaaataagaaaactgggaataagtagtaaatcaatgtgtttagtgtgcaaataaatgtaaatgcttttattg

SEQ ID NO: 258388 - DNA, 1224 bp, Artificial Sequence
  derived and/or modified sequence
atggagccccaccggcccaacgtgaagacagctgtgcccctgagcctggagagctaccacatcagcgaggagtatggcttcctgctgcctgacagcctgaaggagctgcctgaccactaccggccctggatggagatcgccaacaagctgccccagctgattgatgcccaccagctgcaggcccacgtggacaagatgcccctgctgagctgccagttcctgaagggccaccgggagcagaggctggcccacctggtgctgtccttcctgaccatgggctacgtgtggcaggagggggaggcccagcctgctgaggtgctgcccaggaacctggccctgccctttgtggaggtgtccaggaacctgggcctgccccccatcctggtgcacagcgacctggtgctgaccaactggaccaagaaggaccctgatggcttcctggagatcggcaacctggagaccatcatctccttccctggaggagagagcctgcacggcttcatcctggtgacagccctggtggagaaggaggccgtgcccggcatcaaggccctggtgcaggccaccaatgccatcctgcagcccaaccaggaggccctgctgcaggccctgcagaggctgcggctgagcatccaggacatcaccaagaccctgggccagatgcatgactatgtggaccctgacatcttctacgccggcatccgcatcttcctgagcggctggaaggacaacccagccatgcctgctggcctgatgtatgaaggagtgtcccaggagcccctgaagtacagcggcggcagcgctgcccagagcacagtgctgcacgcctttgatgagttcctgggcatccgccacagcaaggagagcggggacttcctgtacaggatgagggactacatgccacccagccacaaggccttcatcgaggacatccacagcgcccccagcctgcgggactacatcctgagcagcggccaggaccacctgctgacagcctacaaccagtgtgtgcaggccctggccgagctgcggagctaccacatcaccatggtgaccaagtacctgatcacagctgctgccaaggccaagcacggcaagcccaaccacctgcccggccccccccaggccctgaaggaccggggcaccggcggcacagctgtgatgtccttcctgaagtctgtgcgggacaagaccctggagagcatcctgcacccccggggctag

SEQ ID NO: 258389 - DNA, 1263 bp, Artificial Sequence
  derived and/or modified sequence
atgctgcacttccactactatgacaccagcaacaagatcatggagccccaccggcccaacgtgaagacagctgtgcccctgagcctggagagctaccacatcagcgaggagtatggcttcctgctgcctgacagcctgaaggagctgcctgaccactaccggccctggatggagatcgccaacaagctgccccagctgattgatgcccaccagctgcaggcccacgtggacaagatgcccctgctgagctgccagttcctgaagggccaccgggagcagaggctggcccacctggtgctgtccttcctgaccatgggctacgtgtggcaggagggggaggcccagcctgctgaggtgctgcccaggaacctggccctgccctttgtggaggtgtccaggaacctgggcctgccccccatcctggtgcacagcgacctggtgctgaccaactggaccaagaaggaccctgatggcttcctggagatcggcaacctggagaccatcatctccttccctggaggagagagcctgcacggcttcatcctggtgacagccctggtggagaaggaggccgtgcccggcatcaaggccctggtgcaggccaccaatgccatcctgcagcccaaccaggaggccctgctgcaggccctgcagaggctgcggctgagcatccaggacatcaccaagaccctgggccagatgcatgactatgtggaccctgacatcttctacgccggcatccgcatcttcctgagcggctggaaggacaacccagccatgcctgctggcctgatgtatgagggcgtgtcccaggagcccctgaagtacagcggcggcagcgctgcccagagcacagtgctgcacgcctttgatgagttcctgggcatccgccacagcaaggagagcggggacttcctgtacaggatgagggactacatgccacccagccacaaggccttcatcgaggacatccacagcgcccccagcctgcgggactacatcctgagcagcggccaggaccacctgctgacagcctacaaccagtgtgtgcaggccctggccgagctgcggagctaccacatcaccatggtgaccaagtacctgatcacagctgctgccaaggccaagcacggcaagcccaaccacctgcccggccccccccaggccctgaaggaccggggcactggaggaacagctgtgatgtccttcctgaagtctgtgcgggacaagaccctggagagcatcctgcacccccggggctag

SEQ ID NO: 258390 - DNA, 1224 bp, Artificial Sequence
  derived and/or modified sequence
atggagccccaccggcccaacgtgaagaccgccgtgcccctgagcttggaatcctatcacatcagcgaagagtatgggttccttttgcctgacagcctgaaagaattacccgatcattatcgaccatggatggaaattgccaataaactgccacagctaatcgatgcccatcagttgcaggcgcacgtagataagatgcccttacttagttgtcagttcttgaaaggccatcgagaacagcggctggcccaccttgtgttgagcttccttaccatggggtatgtgtggcaagaaggcgaagcccagcctgcagaggtcctgccacggaacttggcactccccttcgttgaagtgtcacgaaacctagggctgcctcccatcctggttcacagtgacctggtcctgacaaactggacaaagaaggatcctgacggctttctagagatagggaacctggagaccattatatctttccctggaggagagtcactgcatggcttcattttggtgaccgccctggttgagaaagaggcagtgcctggtatcaaagctctggtccaggccaccaacgctatcttacagcctaatcaggaagctctccttcaagccctacagcgtctgaggttaagcattcaggatattactaagaccctgggtcagatgcacgactacgtggaccccgacattttctacgcgggaatacgcatcttcctgtcgggctggaaggacaacccggccatgccagctgggttaatgtatgagggagtctcacaagaacctcttaaatactctgggggcagtgctgctcaaagcaccgtactgcatgctttcgacgagttcctgggaatcagacacagcaaggaaagcggcgattttttatatagaatgcgcgattacatgcctccctcccataaggcttttatagaggacatccattcagcaccgagcttgagggactacattctctcctctggccaggatcatctcttgactgcgtataaccaatgcgtccaggccctggccgaactcaggtcataccatataactatggtgactaagtatcttataactgcggcggccaaagcgaaacacggtaaacccaaccatcttccaggacctccacaggcgctcaaggacagaggtaccggaggaactgctgtgatgtccttcttaaagtctgtaagggacaaaacgctcgaaagcatcctgcaccctaggggatag

SEQ ID NO: 258391 - DNA, 1263 bp, Artificial Sequence
  derived and/or modified sequence
atgctgcacttccactactacgacaccagcaacaagatcatggagccccacaggcccaacgtcaagactgctgtccccctgtctcttgagagctaccacatctcagaggagtacggttttctgctgccagactctttaaaagagttaccagaccactaccgaccttggatggagatcgctaacaaacttccccagcttattgacgcccaccaactgcaggctcacgtggataagatgcctttactgagctgccagtttctcaaaggccaccgggagcagcgacttgctcatcttgtgctgtcctttctaactatgggatacgtttggcaggagggggaggctcagcccgccgaggtgctgccacggaacctcgccttgccttttgttgaggtatcccgcaacctcggcttgcctcccattctggtccactccgaccttgtgctgacaaactggaccaaaaaagaccccgatggcttcctcgagattggcaacctagaaacaatcatctctttccccggaggcgaatccctgcatggattcatcctggtcaccgctttggtagaaaaggaggccgtgcctgggattaaggcactggtccaagcgacaaatgccattcttcaacctaaccaggaggccctgcttcaggccttacagaggctgcggttatccattcaagatattactaaaaccctgggccagatgcacgactacgttgatccggatatcttttacgcagggatccgtatcttcctgagtgggtggaaagacaaccctgccatgcctgcaggattgatgtatgagggagtgtcacaagagcctttgaagtatagtggcggatccgcagctcagagcaccgtgcttcacgcctttgatgaattcctgggaattcgccattcgaaggagtctggcgactttctctaccgcatgagggattacatgcccccgagccacaaggcttttatagaggacattcactccgccccatcacttcgagattatattctctcatctggccaggatcatctgttaactgcttataatcaatgtgtgcaagccttggcggagttgagatcctaccacattacaatggtaacaaaatacctgatcacagccgcagcaaaagcaaagcatgggaaacctaaccatctgccggggccaccacaggccctcaaagaccgtgggaccggtggcaccgccgtgatgtcctttttaaagagcgtccgtgataaaactctcgaaagcatcttgcacccccgagggtag

SEQ ID NO: 258392 - DNA, 1224 bp, Artificial Sequence
  derived and/or modified sequence
atggaaccacatcggccaaacgtgaagacagcggtaccgctctccctcgagtcataccacatttctgaggagtacggatttctgttgccggattcactgaaagaacttcctgaccactacaggccctggatggagatcgctaacaaactgccccaactgatagacgcccaccagctacaggcccacgtggacaaaatgccacttttatcgtgccaatttctgaagggtcatagagagcaacgcttagctcatctggttctgtcgtttctcaccatggggtacgtgtggcaggagggggaggcccagcccgctgaggtgttgccccgaaatttagctttgcccttcgtggaggtgtcccgcaatctgggcctgccacccatcctggtgcatagcgatttagttctaaccaactggaccaagaaagatccagacggcttcttagagattgggaacttggagacgattatctccttccccggaggagagtctctccacgggtttattcttgtgacggccctcgtggagaaagaggcggtccccggaatcaaggcgctggtgcaggcaaccaatgctatactgcagcctaaccaagaagccttgctgcaggccctccagaggctgcgactgtccattcaagacatcaccaagacactaggacagatgcacgactacgtggacccggatattttttatgccggaatccgcatctttctgtccgggtggaaggacaacccggctatgcccgcaggtctgatgtacgagggagttagccaagaacctttgaagtacagcggtggatccgctgcacagagcaccgtgttgcatgcttttgacgaatttctcggaatccgccacagcaaagaatccggagacttcctctaccggatgagggactacatgccaccctctcacaaggcttttatcgaggatatccactctgcgccaagcctcagagactatatcctgtcctctgggcaggatcatctgttaacagcatataatcagtgcgttcaggccctcgcagagctgcgttcatatcacatcaccatggtcacaaaatatctgattacagcggctgctaaagccaaacatgggaagcctaaccaccttcccggaccgcctcaggcgttaaaagaccgaggaaccggaggcacagctgtcatgtcattcttgaagtcggtgagagataagacccttgagagtatcctgcatccgcgtggttag

SEQ ID NO: 258393 - DNA, 1263 bp, Artificial Sequence
  derived and/or modified sequence
atgcttcacttccactactacgacacaagtaacaaaatcatggagcctcaccggccaaacgtcaagacagcggtgccacttagtttggaatcatatcatattagcgaggaatacgggtttttgttgccagacagcctcaaagaactcccagatcactataggccttggatggaaatcgcgaataaactgccccagctgattgacgcccatcagctgcaggcccacgttgacaagatgccactactgtcatgccagttccttaagggtcatcgggagcagcgactagctcatttggtgctttcatttctgacaatgggctacgtgtggcaggagggagaagcacagcctgctgaggtgctgccacggaacctggcattaccctttgtcgaggtttcacgtaatttggggctgccccctattctggtgcactctgacctggtgctgacgaattggactaaaaaggaccccgatgggttcttggagatcgggaacctggaaaccattataagcttccctgggggagagtctcttcatggtttcattctcgtgaccgcacttgtggagaaagaagccgtaccagggatcaaggcacttgtccaagcaactaacgcgatattgcagccaaaccaggaggccttactgcaggcgctgcagcgattgagattgagcattcaagatattacaaaaactctgggccagatgcatgactacgtggatcccgacattttttacgccggaataaggattttcttgtctggctggaaagacaatcctgccatgcccgcagggctgatgtatgagggtgtgagtcaggaaccccttaaatacagcggaggatctgcagctcagtctaccgtcctgcatgcctttgacgaattcttaggcatcagacattccaaagagtcaggagatttcttgtaccgcatgcgcgattatatgcccccttctcataaggctttcattgaggatatccactctgctccctctctccgggattatattctctcctctggccaagaccaccttcttacagcttacaatcagtgcgtgcaggctctcgcagagttacgctcctaccacattacaatggtgacgaagtacctcatcactgccgcagctaaggctaagcacgggaaaccaaatcacctaccaggtcctccacaggcactgaaagataggggtactggaggcactgccgtcatgtctttcctcaagtcggttagagataagaccctcgagtcgattttgcaccctcggggttag

SEQ ID NO: 258394 - DNA, 1224 bp, Artificial Sequence
  derived and/or modified sequence
atggagccccacagacccaacgtgaagaccgccgtgcccctgagcctggagagctaccacatcagcgaggagtacggcttcctgctgcccgacagcctgaaggagctgcccgaccactacagaccctggatggagatcgccaacaagctgccccagctgatcgacgcccaccagctgcaggcccacgtggacaagatgcccctgctgagctgccagttcctgaagggccacagagagcagagactggcccacctggtgctgagcttcctgaccatgggctacgtgtggcaggagggcgaggcccagcccgccgaggtgctgcccagaaacctggccctgcccttcgtggaggtgagcagaaacctgggcctgccccccatcctggtgcacagcgacctggtgctgaccaactggaccaagaaggaccccgacggcttcctggagatcggcaacctggagaccatcatcagcttccccggcggcgagagcctgcacggcttcatcctggtgaccgccctggtggagaaggaggccgtgcccggcatcaaggccctggtgcaggccaccaacgccatcctgcagcccaaccaggaggccctgctgcaggccctgcagagactgagactgagcatccaggacatcaccaagaccctgggccagatgcacgactacgtggaccccgacatcttctacgccggcatcagaatcttcctgagcggctggaaggacaaccccgccatgcccgccggcctgatgtacgagggcgtgagccaggagcccctgaagtacagcggcggcagcgccgcccagagcaccgtgctgcacgccttcgacgagttcctgggcatcagacacagcaaggagagcggcgacttcctgtacagaatgagagactacatgccccccagccacaaggccttcatcgaggacatccacagcgcccccagcctgagagactacatcctgagcagcggccaggaccacctgctgaccgcctacaaccagtgcgtgcaggccctggccgagctgagaagctaccacatcaccatggtgaccaagtacctgatcaccgccgccgccaaggccaagcacggcaagcccaaccacctgcccggccccccccaggccctgaaggacagaggcaccggcggcaccgccgtgatgagcttcctgaagagcgtgagagacaagaccctggagagcatcctgcaccccagaggctag

SEQ ID NO: 258395 - DNA, 1263 bp, Artificial Sequence
  derived and/or modified sequence
atgctgcacttccactactacgacaccagcaacaagatcatggagccccacagacccaacgtgaagaccgccgtgcccctgagcctggagagctaccacatcagcgaggagtacggcttcctgctgcccgacagcctgaaggagctgcccgaccactacagaccctggatggagatcgccaacaagctgccccagctgatcgacgcccaccagctgcaggcccacgtggacaagatgcccctgctgagctgccagttcctgaagggccacagagagcagagactggcccacctggtgctgagcttcctgaccatgggctacgtgtggcaggagggcgaggcccagcccgccgaggtgctgcccagaaacctggccctgcccttcgtggaggtgagcagaaacctgggcctgccccccatcctggtgcacagcgacctggtgctgaccaactggaccaagaaggaccccgacggcttcctggagatcggcaacctggagaccatcatcagcttccccggcggcgagagcctgcacggcttcatcctggtgaccgccctggtggagaaggaggccgtgcccggcatcaaggccctggtgcaggccaccaacgccatcctgcagcccaaccaggaggccctgctgcaggccctgcagagactgagactgagcatccaggacatcaccaagaccctgggccagatgcacgactacgtggaccccgacatcttctacgccggcatcagaatcttcctgagcggctggaaggacaaccccgccatgcccgccggcctgatgtacgagggcgtgagccaggagcccctgaagtacagcggcggcagcgccgcccagagcaccgtgctgcacgccttcgacgagttcctgggcatcagacacagcaaggagagcggcgacttcctgtacagaatgagagactacatgccccccagccacaaggccttcatcgaggacatccacagcgcccccagcctgagagactacatcctgagcagcggccaggaccacctgctgaccgcctacaaccagtgcgtgcaggccctggccgagctgagaagctaccacatcaccatggtgaccaagtacctgatcaccgccgccgccaaggccaagcacggcaagcccaaccacctgcccggccccccccaggccctgaaggacagaggcaccggcggcaccgccgtgatgagcttcctgaagagcgtgagagacaagaccctggagagcatcctgcaccccagaggctag

SEQ ID NO: 258396 - protein, 509 aa, Artificial Sequence
  derived and/or modified sequence
MELKKSPDGGWGWVIVFVSFLTQFLCYGSPLAVGVLYIEWLDAFGEGKGKTAWVGSLASGVGLLASPVCSLCVSSFGARPVTIFSGFMVAGGLMLSSFAPNIYFLFFSYGIVVGLGCGLLYTATVTITCQYFDDRRGLALGLISTGSSVGLFIYAALQRMLVEFYGLDGCLLIVGALALNILACGSLMRPLQSSDCPLPKKIAPEDLPDKYSIYNEKGKNLEENINILDKSYSSEEKCRITLANGDWKQDSLLHKNPTVTHTKEPETYKKKVAEQTYFCKQLAKRKWQLYKNYCGETVALFKNKVFSALFIAILLFDIGGFPPSLLMEDVARSSNVKEEEFIMPLISIIGIMTAVGKLLLGILADFKWINTLYLYVATLIIMGLALCAIPFAKSYVTLALLSGILGFLTGNWSIFPYVTTKTVGIEKLAHAYGILMFFAGLGNSLGPPIVGWFYDWTQTYDIAFYFSGFCVLLGGFILLLAALPSWDTCNKQLPKPAPTTFLYKVASNV

SEQ ID NO: 258397 - protein, 65 aa, Artificial Sequence
  derived and/or modified sequence
MELKKSPDGGWGWVIVFVSFLTQFLCYGSPLAVGVLYIEWLDAFGEGKGKTAWVGSLASGVGLLA

SEQ ID NO: 258398 - DNA, 1530 bp, Artificial Sequence
  derived and/or modified sequence
atggaactcaagaagtcccctgacggaggttgggggtgggtgattgtgtttgtgtcatttctgacacagttcctgtgttatgggtctcccctggcagtgggagtactctacattgaatggctggacgccttcggcgagggaaagggaaagactgcctgggtcgggtctctggcctccggggtggggctcctcgcctctcctgtctgtagcctctgcgttagcagcttcggcgccaggcctgtgactatcttcagtggctttatggtcgccggcggactgatgctgagttcatttgcgccaaatatctatttcctgtttttttcctacggcattgttgtaggcctgggttgtggactcctgtacacagctacagttacaataacctgccaatactttgacgatcgcagaggattggcgctgggcttgatttctactggatccagtgtcggtctctttatatacgccgccctacagagaatgcttgtagaattttacgggttggatggttgtctcctgatcgtcggggccttagcattgaacatactggcctgcggctccctaatgaggcccctgcaatcaagcgactgtcccttacctaaaaagattgcacccgaagacctaccagataagtatagcatctataacgagaaagggaagaacctagaggagaatatcaacattttagacaagtcatattcaagtgaagaaaaatgtcgcattacattggctaacggcgactggaagcaagacagcctgctccataaaaatcccactgtcacacacacaaaggagcccgagacctacaagaagaaggtcgccgagcagacctacttctgcaagcagctcgctaaaaggaagtggcagctgtacaaaaactattgtggcgaaaccgtggctctttttaagaataaagtttttagcgcactgttcattgccattttgctattcgacattggaggctttccgccgtcactgttaatggaggacgtcgctagatcatccaatgtcaaagaagaggagttcatcatgcctctgatctccattattggcattatgactgccgtcggcaagctgctattaggtatcctcgctgattttaaatggatcaatacactgtatttatacgtcgccacactgatcattatgggcctggctctgtgtgcaatcccctttgccaagagttatgtgacactggccctgttatccggcattctaggatttctgaccggtaactggagcatcttcccatacgttaccacaaaaaccgtgggcatcgaaaagctcgctcacgcctacggaatactaatgttttttgccggactgggtaatagtctaggcccacctatcgttgggtggttttatgactggacgcagacttacgacattgccttttacttcagcgggttttgcgtcctcctcgggggctttatcttgctcctagccgcactgcccagttgggatacctgcaataagcagctcccgaaacccgctccaaccacattcctgtacaaggtggcttctaacgtgtag

SEQ ID NO: 258399 - DNA, 1530 bp, Artificial Sequence
  derived and/or modified sequence
atggagttgaagaaatcccctgatggaggctggggctgggtgattgtcttcgtaagtttcctgacacagtttctatgttatgggtccccgctcgcggtaggcgtgctctatattgaatggctggacgcgttcggtgaaggcaagggtaagacagcctgggtagggtcactggcaagcggcgttggcctgctagccagcccggtgtgctctctgtgcgtctcctctttcggggctaggcccgtcaccattttctccggatttatggtggccgggggcctgatgctatcatctttcgcacctaacatctattttttgttcttttcctatggcattgtggttgggttaggatgcggtttactatacaccgcaaccgtgaccatcacctgtcaatactttgacgacagaagagggttggccctggggctgatctctaccggaagcagcgtgggtttgttcatctacgccgctctgcagaggatgctggtggagttctatggactcgatggatgcctgttgatcgtgggggcccttgctctgaacatcctcgcttgtggctcgcttatgcgaccgttgcagtcatccgactgccccctgccaaaaaagatcgctcccgaggatctgccagacaagtactccatttataacgagaagggaaaaaacttggaggagaatataaatatcttggacaagtcttactcctctgaagagaagtgtcgcatcactctggccaacggggattggaaacaggacagtctgttgcacaaaaacccaaccgtgacacataccaaggagcccgaaacatacaaaaagaaagtggccgagcaaacctatttttgtaaacagcttgccaagagaaagtggcagctgtacaagaattattgtggggagactgtggcgctcttcaagaacaaagtcttctctgctctcttcattgccatcctactgttcgacatcgggggctttccaccctctctgctgatggaagacgtcgccagatcgtctaacgtcaaagaggaggaattcatcatgccacttatctcgattattggcatcatgacagcagtcgggaaacttctcctggggatcctggcagatttcaaatggataaatactctgtacctgtacgtggccaccctgataatcatgggcctggccctgtgtgctattcccttcgcaaagtcatacgtgacactggccttactaagtggaattctgggtttcctgaccggtaactggagcatctttccgtatgtcaccacaaaaacggtcggtatcgagaaattggctcacgcctatgggatcctaatgttttttgccggacttgggaactcactcggccctccgatagttgggtggttctatgactggacccagacgtatgacatcgcattttattttagcggattctgtgtgttgctgggtggttttatcttgctattggccgctctcccctcttgggacacgtgcaacaagcaacttcccaaacctgcgcccacaacattcctctacaaggttgcttctaatgtgtag

SEQ ID NO: 258400 - DNA, 198 bp, Artificial Sequence
  derived and/or modified sequence
atggaactcaagaagtcacctgacggcgggtggggatgggttatcgtctttgtgtcatttctgacccagtttctttgctatggttctcctctggccgtgggcgtgctttatatcgagtggttagacgcctttggcgaggggaaagggaagacagcttgggtcggatccctcgcgagtggggtcggactgctagcttag

SEQ ID NO: 258401 - DNA, 1530 bp, Artificial Sequence
  derived and/or modified sequence
atggagctgaagaagagcccagatggcggctggggctgggtgattgtgtttgtgtccttcctgacccagttcctgtgctacggcagccccctggccgtgggcgtgctgtacatcgagtggctggatgccttcggggagggcaagggcaagacagcctgggtgggcagcctggccagcggcgtgggcctgctggccagccctgtgtgcagcctgtgtgtgtcctcctttggagcccggcctgtgaccatcttcagcggcttcatggtggccggcggcctgatgctgagcagctttgcccccaacatctacttcctgttcttctcctatggaattgtggtgggcctgggctgcggcctgctgtacacagccaccgtgaccatcacctgccagtactttgatgacagaagaggcctggccctgggcctcatcagcacaggcagctctgtgggcctcttcatctatgctgccctgcagaggatgctggtggagttctacggcctggatggctgcctgctgattgtgggcgccctggccctgaacatcctggcctgtggcagcctgatgaggcccctgcagagcagtgactgccccctgcccaagaagatcgcccctgaggacctgcctgacaagtacagcatctacaatgagaagggcaagaacctggaggagaacatcaacatcctggacaagagctacagcagcgaggagaagtgccgcatcaccctggccaacggggactggaagcaggacagcctgctgcacaagaaccccaccgtgacccacaccaaggagcctgagacctacaagaagaaggtggccgagcagacctacttctgcaagcagctggccaagaggaagtggcagctgtacaagaactactgtggggagaccgtggccctcttcaagaacaaggtgttttctgccctcttcatcgccatcctgctgtttgacatcggcggcttcccccccagcctgctgatggaggatgtggcccggagcagcaatgtgaaggaggaggagttcatcatgcccctcatcagcatcatcggcatcatgacagctgtgggcaagctgctgctgggcatcctggccgacttcaagtggatcaacaccctgtacctgtatgtggccaccctcatcatcatgggcctggccctgtgtgccatcccctttgccaagagctatgtgaccctggccctgctgagcggcatcctgggcttcctgactggaaactggagcatcttcccctacgtgaccaccaagacagtgggcatcgagaagctggcccacgcctacggcatcctgatgttctttgctggcctgggcaacagcctgggcccccccatcgtgggctggttctatgactggacccagacctatgacatcgccttctacttcagcggcttctgtgtgctgctgggcggcttcatcctgctgctggccgccctgcccagctgggacacctgcaacaagcagctgcccaagccagcccccaccaccttcctgtacaaggtggccagcaatgtgtag

SEQ ID NO: 258402 - DNA, 198 bp, Artificial Sequence
  derived and/or modified sequence
atggagctgaagaagagcccagatggcggctggggctgggtgattgtgtttgtgtccttcctgacccagttcctgtgctacggcagccccctggccgtgggcgtgctgtacatcgagtggctggatgccttcggggagggcaagggcaagacagcctgggtgggcagcctggccagcggcgtgggcctgctggcctag

SEQ ID NO: 258403 - DNA, 1530 bp, Artificial Sequence
  derived and/or modified sequence
atggagctgaagaagagccccgacggcggctggggctgggtgatcgtattcgtgagcttcctgactcagttcctgtgctacggatccccccttgctgttggcgtgttgtacatcgagtggctcgacgcttttggcgagggcaaagggaagactgcctgggtggggtcccttgcttctggagttggactgctggcgtccccagtgtgcagtctttgcgtcagttcctttggggcacggccagtcaccatcttttctggcttcatggtcgccggcgggctaatgctgtccagttttgcccctaatatctactttttgttctttagttatgggatagtcgtaggattgggctgtgggctgctatataccgcgactgttacgattacttgccagtacttcgatgaccgccgagggctggctttaggtctgatcagtactggatctagcgttgggctgttcatttacgccgctctgcagcgcatgctcgtggaattctacggcctcgacggctgtttgctgattgtcggggccctggctttgaacatccttgcatgtggctctctgatgaggccactacaatcaagtgattgccccttacccaaaaaaatcgctcccgaagaccttcccgacaagtactccatctataacgaaaagggaaaaaatctggaagagaacatcaacattctggacaaaagttattctagtgaagaaaagtgtagaatcacattagccaatggggattggaagcaggactccctactccacaagaacccgacagtaacccacactaaggagccagagacatacaaaaagaaggtggccgagcagacatacttttgtaaacagcttgctaaacgaaagtggcagctgtacaagaactattgcggcgagactgtggcactgttcaaaaacaaggtcttttcagctctgttcattgcgatattactttttgatattggaggcttccccccaagtctactcatggaggacgtggctaggagctccaacgtaaaggaagaagaatttattatgcctttaatctccattatcggaatcatgacagctgtgggaaaacttctccttggtattctggcggactttaagtggatcaatacgctgtacctctacgttgctactctgatcatcatgggtctggctctgtgtgcgattccttttgccaaaagctatgtcaccctggccctgctgtccggtatcctcggtttcctcactggaaactggagcattttcccgtacgtgactacaaagactgttgggattgagaagttagcccacgcctatggaattctgatgtttttcgccggactgggaaacagcctcgggcccccaattgtcggctggttctacgattggacacagacatacgacatagccttctatttctctgggttttgtgtgctgctgggagggttcatcctgttattagcagcattacccagctgggatacctgcaataagcaactgcctaagcccgctccgacaacattcctgtataaggtcgcgagtaacgtatag

SEQ ID NO: 258404 - DNA, 1530 bp, Artificial Sequence
  derived and/or modified sequence
atggagctgaagaagagccccgacggcggctggggctgggtgatcgtgtttgtatccttcctgacacaatttctgtgttacggcagcccactagccgtgggtgtgctctatatcgagtggcttgatgcgtttggagagggtaagggcaagactgcctgggtgggctctctcgctagtggagtcggcctgttggcatcccccgtctgtagcctctgtgtgagctcctttggcgcccgtcctgtaacgatttttagcggcttcatggtcgccggcggactgatgctctccagctttgcccccaatatttattttctctttttcagctatggaatcgttgtgggtctagggtgcggtctgctttatacagccactgtgactataacctgtcagtatttcgatgatcgccgggggttggcactgggactcatcagtacgggcagcagcgttggtttgtttatttatgccgccctccagaggatgctcgttgagttctacgggctggatggttgtctgctgattgtaggggctctggccttgaacattcttgcgtgtggttctttgatgaggcctcttcaaagctctgactgccccctccccaagaagatcgcacctgaggaccttccagacaagtattccatttataatgaaaagggaaagaatctggaagagaacataaatattctggacaaatcatatagcagcgaagaaaagtgtagaataacgctggccaacggagattggaagcaggattctttgttgcataaaaaccccacagtcacacacacaaaagagccagagacatacaagaaaaaagttgcagagcagacctacttttgcaagcaattggcaaaacgcaagtggcagctatataaaaattactgcggcgaaacagtcgccttgtttaagaataaggtgttctctgctttatttattgctatacttctgtttgatattgggggcttccctccctctctgctgatggaagatgttgcacgttcatcaaacgtcaaggaggaggagttcatcatgcccttgatttcaatcatcggaatcatgacagcagttggaaaactgttgctgggcatactggccgacttcaaatggatcaacaccttgtacctatacgtggcgacacttattataatgggcttagccttgtgcgctatccccttcgctaaaagctatgtcacactcgcgctcttgtccggaattctcggctttctgacgggtaattggagtatctttccctacgtgactactaagaccgtgggcatcgagaagttggcccacgcttacggcatcctgatgtttttcgcggggcttggcaacagtcttggccccccaattgtgggctggttctatgattggacccagacgtacgatatcgccttctacttctcaggtttttgcgttcttctgggtgggttcatactgttattagccgcactgccttcatgggacacatgtaacaaacagctacctaaacctgcaccgaccacttttttatacaaggtggcctcaaacgtgtag

SEQ ID NO: 258405 - DNA, 198 bp, Artificial Sequence
  derived and/or modified sequence
atggagctgaagaagagccccgacggcggctggggctgggtgatcgtattcgtctcgtttctcacacagtttttgtgctatgggtctcctctggcggtgggtgttctctatattgagtggctcgatgcgttcggagaggggaaagggaaaacggcttgggtgggttccctcgcaagcggggttggccttctggcttag

SEQ ID NO: 258406 - DNA, 1530 bp, Artificial Sequence
  derived and/or modified sequence
atggagctgaagaagtccccagatggcggatggggatgggtgatcgtgttcgtgagtttcctgacccagtttctatgctacgggtcccctctagctgtcggcgtgctctacatcgaatggctagacgccttcggagagggcaagggtaagaccgcctgggttggctctttagcttccggcgttggtctgctggctagtcctgtttgctcgctctgcgtatcatctttcggtgctcgaccagtgactattttttccgggtttatggtggcgggaggcctgatgctatcttcattcgcccctaatatctattttctatttttctcatatggcatagtcgtgggtctgggctgcggcctactgtataccgctaccgtcacaatcacatgtcagtattttgatgaccggagggggctggcactagggctgatcagcactggttccagtgtgggccttttcatttatgccgctctgcaacggatgctcgtcgaattttacggtctggacggttgtctgcttatcgtaggagccttagccctcaacattctcgcctgtggttccctgatgaggccactgcagtccagtgattgccctctccctaaaaaaattgccccagaggacttgccagataagtatagtatatataatgaaaaaggcaagaacctagaagaaaatatcaacattctggataagagctattcgtctgaggaaaaatgcaggatcacgctggccaatggagattggaaacaggacagcctgctgcacaaaaatcccaccgtgacacacaccaaagagcccgaaacatataaaaagaaagttgcggagcagacttatttttgcaagcagctcgccaagagaaaatggcagttatataaaaattattgtggagaaactgtggctctattcaagaacaaagtcttttccgcgctgttcatcgccatcctgctgtttgacatcggcggttttcccccttccctactcatggaagacgtggccagatcatcaaacgttaaggaagaggaatttatcatgcctttgatctccatcatcgggataatgacagccgtgggaaaactgctgctggggattttggcggacttcaagtggatcaataccttatacctgtatgttgctactctcattatcatgggcttggccctctgcgccatccccttcgctaagtcgtacgtgacgttggccttgctcagtgggattttaggtttcctaaccgggaactggtcaatttttccctatgtgacgaccaagaccgtcggaattgagaaactggcccatgcatacggtattctgatgttcttcgcagggttaggcaacagtctgggacctcccattgtcggttggttctatgactggacccagacgtacgatatagccttctacttctcaggcttttgcgtactcctgggcggatttatcctgctcctggccgcactgccttcctgggatacctgcaacaaacagttaccaaagcccgctcctaccacattcttgtacaaggtggccagtaatgtctag

SEQ ID NO: 258407 - DNA, 1530 bp, Artificial Sequence
  derived and/or modified sequence
atggagctcaagaaatccccggatggcggttggggctgggtgatagtttttgtgtcttttctgacgcagttcctgtgttacggttcgccactggccgtcggtgtgctgtatatcgagtggctggatgcttttggggaaggcaaaggcaagactgcgtgggtaggatcactggcgagcggagtcggattactggcatcccctgtctgtagcctgtgcgttagtagtttcggggctaggcctgtcaccatcttctccgggtttatggtggcgggtggactgatgttgagcagtttcgcaccgaatatttactttctattcttcagctacggcattgtggtcggactgggatgcggcctgctgtatactgctaccgtaaccattacatgtcagtacttcgatgacaggcgaggactggcactagggctgattagtacgggctcttcagtggggctgtttatatacgcggcactgcaaaggatgcttgttgagttttatggcctggacggctgtctcctgattgtcggagctcttgcccttaatattttagcatgtggctccttaatgagacccctccaaagcagcgattgcccccttcccaagaaaatcgcacccgaggacctgccagataagtacagtatttataatgagaagggcaaaaacctagaggagaacatcaatatcctcgacaaaagttacagtagcgaagagaaatgccggatcaccttggctaacggcgactggaaacaggattctctcctgcacaagaacccgacagtgacccatactaaagagcctgaaacatataagaagaaagttgcagaacagacctatttttgtaagcaattggctaagcgcaaatggcaactatataaaaattactgcggagagaccgttgcattgtttaaaaacaaggtcttttctgccctctttatcgccattctgctctttgatattggcggtttcccacctagcttgttgatggaggatgtggctcgtagtagtaatgttaaggaggaagagtttataatgcctttgattagcatcatcgggatcatgaccgccgttggtaagttgcttctggggatcttagcagactttaaatggattaacacactctacctgtacgtggctactctgattatcatgggcctcgccctctgcgcaatcccattcgccaaatcctacgtgacgttggccctgttgagcgggatcttaggctttctgacagggaactggagcatattcccctatgtgactacgaagacggtgggcattgagaagttggcccatgcatacgggattctgatgttctttgctgggctaggaaacagcctggggccaccaattgtggggtggttctatgactggactcagacctacgacatcgccttctatttctccggcttctgtgtcttacttggtgggttcatcctgctacttgccgctttgccctcttgggatacctgtaataagcagctccctaagcctgcgcctaccacgttcctctacaaagttgcatcgaatgtctag

SEQ ID NO: 258408 - DNA, 198 bp, Artificial Sequence
  derived and/or modified sequence
atggaattaaaaaagagcccggacggcggatggggctgggtcatcgtttttgtctcttttctaacccaattcctgtgttacgggagtcccctggcagtcggggtgttatatatcgaatggctagatgcattcggggaagggaaagggaaaactgcctgggtcggaagtctcgcctctggcgttggcctgctagcttag

SEQ ID NO: 258409 - DNA, 3646 bp, Artificial Sequence
  derived and/or modified sequence
agtttgaggccaacactaggaagtgtctggaaccggatccggaggcttcacaatctatatgttgcctccaaaggacctgcagagaaacgcctcctgattttgtcttacaatggaacttaaaaagtcgcctgacggtggatggggctgggtgattgtgtttgtctccttccttactcagtttttgtgttacggatccccactagctgttggagtcctgtacatagaatggctggatgcctttggtgaaggaaaaggaaaaacagcctgggttggatccctggcaagtggagttggcttgcttgcaagtcctgtctgcagtctctgtgtctcatcttttggagcaagacctgtcacaatcttcagtggcttcatggtggctggaggcctgatgttgagcagttttgctcccaatatctactttctgtttttttcctatggcattgttgtaggtcttggatgtggtttattatacactgcaacagtgaccattacgtgccagtattttgacgatcgccgaggcctagcgcttggcctgatttcaacaggttcaagcgttggccttttcatatatgctgctctgcagaggatgctggttgagttctatggactggatggatgcttgctgattgtgggtgctttagctttaaatatattagcctgtggcagtctgatgagacccctccaatcttctgattgtcctttgcctaaaaaaatagctccagaagatctaccagataaatactccatttacaatgaaaaaggaaagaatctggaagaaaacataaacattcttgacaagagctacagtagtgaggaaaaatgcaggatcacgttagccaatggtgactggaaacaagacagcctacttcataaaaaccccacagtgacacacacaaaagagcctgaaacgtacaaaaagaaagttgcagaacagacatatttttgcaaacagcttgccaagaggaagtggcagttatataaaaactactgtggtgaaactgtggctctttttaaaaacaaagtattttcagcccttttcattgctatcttactctttgacatcggagggtttccaccttcattacttatggaagatgtagcaagaagttcaaacgtgaaagaagaagagtttattatgccacttatttccattataggcattatgacagcagttggtaaactgcttttagggatactggctgacttcaagtggattaataccttgtatctttatgttgctaccttaatcatcatgggcctagccttgtgtgcaattccatttgccaaaagctatgtcacattggcgttgctttctgggatcctagggtttcttactggtaattggtccatctttccatatgtgaccacgaagactgtgggaattgaaaaattagcccatgcctatgggatattaatgttctttgctggacttggaaatagcctaggaccacccatcgttggttggttttatgactggacccagacctatgatattgcattttattttagtggcttctgcgtcctgctgggaggttttattctgctgctggcagccttgccctcttgggatacatgcaacaagcaactccccaagccagctccaacaactttcttgtacaaagttgcctctaatgtttagaagaatattggaagacactatttttgctattttataccatatagcaacgatattttaacagattctcaagcaaattttctagagtcaagactattttctcatagcaaaatttcacaatgactgactctgaatgaattatttttttttatatatcctattttttatgtagtgtatgcgtagcctctatctcgtatttttttctatttctcctccccacaccatcaatgggactattctgttttgctgttattcactagttcttaacattgtaaaaagtttgaccagcctcagaaggctttctctgtgtaaagaagtataatttctctgccgactccatttaatccactgcaaggcacctagagagactgctcctattttaaaagtgatgcaagcatcatgataagatatgtgtgaagcccactaggaaataaatcattctcttctctatgtttgacttgctagtaaacagaagacttcaagccagccaggaaattaaagtggcgactaaaacagccttaagaattgcagtggagcaaattggtcattttttaaaaaaatatattttaacctacagtcaccagttttcattattctatttacctcactgaagtactcgcatgttgtttggtacccactgagcaactgtttcagttcctaaggtatttgctgagatgtgggtgaactccaaatggagaagtagtcactgtagactttcttcatggttgaccactccaaccttgctcacttttgcttcttggccatccactcagctgatgtttcctgggaagtgctaattttacctgtttccaaattggaaacacatttctcaatcattccgttctggcaaatgggaaacatccatttgctttgggcacagtggggatgggctgcaagttcttgcatatcctcccagtgaagcatttatttgctactatcagattttaccactatcaaatataattcaagggcagaattaaacgtgagtgtgtgtgtgtgtgtgtgtgtgtgctatgcatgctctaagtctgcatgggatatgggaatggaaaagggcaataagaaattaatacccttatgcagttgcatttaaccttaagaaaaatgtccttgggataaactccaatgtttaatacattgattttttttctaaagaaatgggttttaaactttggtatgcatcagaattccctatagatctttttgaaaatataggtacctgggtatcacacatagaacttttaattctgctggtgtaggctgttgcccaaacatctataattttactgagctcttcaagtgattctgataacacagcctggattgagaatttttataagattggcaatggaaaaacatttattcttttaaataataatttttttaaaacccaagaggtcaggggattttataaaccaatagccaagtgttctttaaataggaggcacccttcccattgtgccaaaatcatcttttcatttattttgaaatttgtatgattattttatacttgtatgttgcctttcttcgaaggcgcctgaagcactttataaacacaaatcctcacaatacctctgtgaggtaggtaaatagtacttttctatgtagtaaacctggaatatggagaatttcataacagttcattctacttaataatgcaataatggagctccaagttgtcttggacttctacaccacactcagacttctggaaagttttctgtacctcattctttagtccctgtcaaggttagtaaataaaataagtgacataaaaaaaaaaaaaactaaactacttgttgtgttgaaagttcctttttgccagttatgttcaggaaacccaataacctgaaaaagtttgactttgatgtgacatcttcatattcatcaatgctgataattgtccaaaggcatcttcactatgtctgctaaataacatccaatgtgggcgttatctgttgtctaggggatgaattttaagttacaataaaatatttttctttgttttgc

SEQ ID NO: 258410 - DNA, 4174 bp, Artificial Sequence
  derived and/or modified sequence
gtgcgcaccgagagggcgcctggccgacggcgcccacctctctcgtggctttggtggctccaggcctggtagggccggggccgcggctcgggcagtgccctccctactcctggccgggccgggagcagcgggagcaggcgcagcgcccctaccgcccgcttttccgcctccatctcctccgcctcctcctcctccttcccccaaccacccgcgcagtcacaaccggttcagactggccggggtgccccgcaaagagagacaagggagaaaaagacagcagggaaaaccccggggaggagaaggcgaaagagaaggtggagctcagagaagggggccggctccccagctccatgtggccgccgccgctgcgggtctgtgggggcagagggcggcggctcccggggcagcgcgtagcgggaccgattgcctaatactccggcaggggccggggccgcagctggctcggataaatagccgcccggctggcccggagctgcaggggagagcggcggccgcgatccccaccacaccaccagcccggccgcacggggcactgagccgggtgctgagcaccggaggccccgccgaggccgggactcaggacctgcagagaaacgcctcctgattttgtcttacaatggaacttaaaaagtcgcctgacggtggatggggctgggtgattgtgtttgtctccttccttactcagtttttgtgttacggatccccactagctgttggagtcctgtacatagaatggctggatgcctttggtgaaggaaaaggaaaaacagcctgggttggatccctggcaagtggagttggcttgcttgcaagtcctgtctgcagtctctgtgtctcatcttttggagcaagacctgtcacaatcttcagtggcttcatggtggctggaggcctgatgttgagcagttttgctcccaatatctactttctgtttttttcctatggcattgttgtaggtcttggatgtggtttattatacactgcaacagtgaccattacgtgccagtattttgacgatcgccgaggcctagcgcttggcctgatttcaacaggttcaagcgttggccttttcatatatgctgctctgcagaggatgctggttgagttctatggactggatggatgcttgctgattgtgggtgctttagctttaaatatattagcctgtggcagtctgatgagacccctccaatcttctgattgtcctttgcctaaaaaaatagctccagaagatctaccagataaatactccatttacaatgaaaaaggaaagaatctggaagaaaacataaacattcttgacaagagctacagtagtgaggaaaaatgcaggatcacgttagccaatggtgactggaaacaagacagcctacttcataaaaaccccacagtgacacacacaaaagagcctgaaacgtacaaaaagaaagttgcagaacagacatatttttgcaaacagcttgccaagaggaagtggcagttatataaaaactactgtggtgaaactgtggctctttttaaaaacaaagtattttcagcccttttcattgctatcttactctttgacatcggagggtttccaccttcattacttatggaagatgtagcaagaagttcaaacgtgaaagaagaagagtttattatgccacttatttccattataggcattatgacagcagttggtaaactgcttttagggatactggctgacttcaagtggattaataccttgtatctttatgttgctaccttaatcatcatgggcctagccttgtgtgcaattccatttgccaaaagctatgtcacattggcgttgctttctgggatcctagggtttcttactggtaattggtccatctttccatatgtgaccacgaagactgtgggaattgaaaaattagcccatgcctatgggatattaatgttctttgctggacttggaaatagcctaggaccacccatcgttggttggttttatgactggacccagacctatgatattgcattttattttagtggcttctgcgtcctgctgggaggttttattctgctgctggcagccttgccctcttgggatacatgcaacaagcaactccccaagccagctccaacaactttcttgtacaaagttgcctctaatgtttagaagaatattggaagacactatttttgctattttataccatatagcaacgatattttaacagattctcaagcaaattttctagagtcaagactattttctcatagcaaaatttcacaatgactgactctgaatgaattatttttttttatatatcctattttttatgtagtgtatgcgtagcctctatctcgtatttttttctatttctcctccccacaccatcaatgggactattctgttttgctgttattcactagttcttaacattgtaaaaagtttgaccagcctcagaaggctttctctgtgtaaagaagtataatttctctgccgactccatttaatccactgcaaggcacctagagagactgctcctattttaaaagtgatgcaagcatcatgataagatatgtgtgaagcccactaggaaataaatcattctcttctctatgtttgacttgctagtaaacagaagacttcaagccagccaggaaattaaagtggcgactaaaacagccttaagaattgcagtggagcaaattggtcattttttaaaaaaatatattttaacctacagtcaccagttttcattattctatttacctcactgaagtactcgcatgttgtttggtacccactgagcaactgtttcagttcctaaggtatttgctgagatgtgggtgaactccaaatggagaagtagtcactgtagactttcttcatggttgaccactccaaccttgctcacttttgcttcttggccatccactcagctgatgtttcctgggaagtgctaattttacctgtttccaaattggaaacacatttctcaatcattccgttctggcaaatgggaaacatccatttgctttgggcacagtggggatgggctgcaagttcttgcatatcctcccagtgaagcatttatttgctactatcagattttaccactatcaaatataattcaagggcagaattaaacgtgagtgtgtgtgtgtgtgtgtgtgtgtgctatgcatgctctaagtctgcatgggatatgggaatggaaaagggcaataagaaattaatacccttatgcagttgcatttaaccttaagaaaaatgtccttgggataaactccaatgtttaatacattgattttttttctaaagaaatgggttttaaactttggtatgcatcagaattccctatagatctttttgaaaatataggtacctgggtatcacacatagaacttttaattctgctggtgtaggctgttgcccaaacatctataattttactgagctcttcaagtgattctgataacacagcctggattgagaatttttataagattggcaatggaaaaacatttattcttttaaataataatttttttaaaacccaagaggtcaggggattttataaaccaatagccaagtgttctttaaataggaggcacccttcccattgtgccaaaatcatcttttcatttattttgaaatttgtatgattattttatacttgtatgttgcctttcttcgaaggcgcctgaagcactttataaacacaaatcctcacaatacctctgtgaggtaggtaaatagtacttttctatgtagtaaacctggaatatggagaatttcataacagttcattctacttaataatgcaataatggagctccaagttgtcttggacttctacaccacactcagacttctggaaagttttctgtacctcattctttagtccctgtcaaggttagtaaataaaataagtgacataaaaaaaaaaaaaactaaactacttgttgtgttgaaagttcctttttgccagttatgttcaggaaacccaataacctgaaaaagtttgactttgatgtgacatcttcatattcatcaatgctgataattgtccaaaggcatcttcactatgtctgctaaataacatccaatgtgggcgttatctgttgtctaggggatgaattttaagttacaataaaatatttttctttgttttgc

SEQ ID NO: 258411 - DNA, 452 bp, Artificial Sequence
  derived and/or modified sequence
gccgggtgctgagcaccggaggccccgccgaggccgggactcaggtaacctgctctggcttcagcagcgcccagaggctttccagagagctgataaccacgaacaaacttggctgtcaaaagcaaatcaatgctttaccttgttttctgggtgcctagtctatccaacacaaactatccccgaagtttagtcaggatttacgctaaatatattacttatatagacctgcagagaaacgcctcctgattttgtcttacaatggaacttaaaaagtcgcctgacggtggatggggctgggtgattgtgtttgtctccttccttactcagtttttgtgttacggatccccactagctgttggagtcctgtacatagaatggctggatgcctttggtgaaggaaaaggaaaaacagcctgggttggatccctggcaagtggagttggcttgcttgc

SEQ ID NO: 258412 - DNA, 1530 bp, Artificial Sequence
  derived and/or modified sequence
atggagctgaagaagagccccgacggcggctggggctgggtgatcgtgttcgtgagcttcctgacccagttcctgtgctacggcagccccctggccgtgggcgtgctgtacatcgagtggctggacgccttcggcgagggcaagggcaagaccgcctgggtgggcagcctggccagcggcgtgggcctgctggccagccccgtgtgcagcctgtgcgtgagcagcttcggcgccagacccgtgaccatcttcagcggcttcatggtggccggcggcctgatgctgagcagcttcgcccccaacatctacttcctgttcttcagctacggcatcgtggtgggcctgggctgcggcctgctgtacaccgccaccgtgaccatcacctgccagtacttcgacgacagaagaggcctggccctgggcctgatcagcaccggcagcagcgtgggcctgttcatctacgccgccctgcagagaatgctggtggagttctacggcctggacggctgcctgctgatcgtgggcgccctggccctgaacatcctggcctgcggcagcctgatgagacccctgcagagcagcgactgccccctgcccaagaagatcgcccccgaggacctgcccgacaagtacagcatctacaacgagaagggcaagaacctggaggagaacatcaacatcctggacaagagctacagcagcgaggagaagtgcagaatcaccctggccaacggcgactggaagcaggacagcctgctgcacaagaaccccaccgtgacccacaccaaggagcccgagacctacaagaagaaggtggccgagcagacctacttctgcaagcagctggccaagagaaagtggcagctgtacaagaactactgcggcgagaccgtggccctgttcaagaacaaggtgttcagcgccctgttcatcgccatcctgctgttcgacatcggcggcttcccccccagcctgctgatggaggacgtggccagaagcagcaacgtgaaggaggaggagttcatcatgcccctgatcagcatcatcggcatcatgaccgccgtgggcaagctgctgctgggcatcctggccgacttcaagtggatcaacaccctgtacctgtacgtggccaccctgatcatcatgggcctggccctgtgcgccatccccttcgccaagagctacgtgaccctggccctgctgagcggcatcctgggcttcctgaccggcaactggagcatcttcccctacgtgaccaccaagaccgtgggcatcgagaagctggcccacgcctacggcatcctgatgttcttcgccggcctgggcaacagcctgggcccccccatcgtgggctggttctacgactggacccagacctacgacatcgccttctacttcagcggcttctgcgtgctgctgggcggcttcatcctgctgctggccgccctgcccagctgggacacctgcaacaagcagctgcccaagcccgcccccaccaccttcctgtacaaggtggccagcaacgtgtag

SEQ ID NO: 258413 - DNA, 198 bp, Artificial Sequence
  derived and/or modified sequence
atggagctgaagaagagccccgacggcggctggggctgggtgatcgtgttcgtgagcttcctgacccagttcctgtgctacggcagccccctggccgtgggcgtgctgtacatcgagtggctggacgccttcggcgagggcaagggcaagaccgcctgggtgggcagcctggccagcggcgtgggcctgctggcctag

SEQ ID NO: 258414 - protein, 896 aa, Artificial Sequence
  derived and/or modified sequence
MMAQKSQGSDNLQEGQEKSKREILKCTKSAWAPLDEWLPPDPEEESQSLTIPMLEDSKQESIQQWLDSGFFVSANENFQQVIDRTVSLYEQGMVQMTVKDYMRSLHQFSETPILSRGTSFNSCYSTASVPQSIPEWLEFWEIDPVEILLDLGFGADEPDICMQIPARFLGCGSAARGINIRVFLEAQKQRMDIENPNLYGRFRQLEILDHVTNAFSSLLSDVSILPNRAEEKAGGESVQRTSVQSFEEETGNPLDMTSGTVGARVDRANSCQSDSSGFLEEPLEPLPLQMPSLPNSQSPAENGGRKPRDQSHSLVSSQDCQLESDGPDSKSRASMSFSSQEANALEQRASVSVMEEEFLLEAMEGPPELYIPDMACAKTTTRGECPRKDSHLWQLLPMPHAEYEVTRPTATSKYDHPLGFMVTHVTEMQDSFVRPEGAGKVQSHHNESQRSPGNDHTQDKFLHVDSEAPREEESSGFCPHTNHSLLVPESSSQCIPKHSEITPYATDLAQTSEKLIPHLHKLPGDPAQVKSRSGTLGQILPGTEAEMENLPLNTGSSRSVMTQMSSSLVSAAQRAVALGTGPRGTSLECTVCDPVTATETRLGTKARQLNDASIQTSALSNKTLTHGPQPLTKSVSLDSGFSSICPMGTCHAIPAHCCICCHHHPHCHGERQSPGPEPSVCRHCLCSLTGHQEAQFMTTLKALQDTTVRELCSCTVHEMEAMKTICQSFREYLEEIEQHLMGQQALFSRDMSEEEREEAEQLQTLREALRQQVAELEFQLGDRAQQIREGILLQLEVLTAEPPEHYSNLHQYNWIEESNGQTSCSKIHPGMAPRTVFPPDDGQEAPCSGGTQLAAFTPPTLENSTRMSPSSSAWAKLGPTPLSNCPVGEKDADVFL

SEQ ID NO: 258415 - DNA, 2691 bp, Artificial Sequence
  derived and/or modified sequence
atgatggcccagaagagccagggcagcgacaacctgcaggagggccaggagaagagcaagagagagatcctgaagtgcaccaagagcgcctgggcccccctggacgagtggctgccccccgaccccgaggaggagagccagagcctgaccatccccatgctggaggacagcaagcaggagagcatccagcagtggctggacagcggcttcttcgtgagcgccaacgagaacttccagcaggtgatcgacagaaccgtgagcctgtacgagcagggcatggtgcagatgaccgtgaaggactacatgagaagcctgcaccagttcagcgagacccccatcctgagcagaggcaccagcttcaacagctgctacagcaccgccagcgtgccccagagcatccccgagtggctggagttctgggagatcgaccccgtggagatcctgctggacctgggcttcggcgccgacgagcccgacatctgcatgcagatccccgccagattcctgggctgcggcagcgccgccagaggcatcaacatcagagtgttcctggaggcccagaagcagagaatggacatcgagaaccccaacctgtacggcagattcagacagctggagatcctggaccacgtgaccaacgccttcagcagcctgctgagcgacgtgagcatcctgcccaacagagccgaggagaaggccggcggcgagagcgtgcagagaaccagcgtgcagagcttcgaggaggagaccggcaaccccctggacatgaccagcggcaccgtgggcgccagagtggacagagccaacagctgccagagcgacagcagcggcttcctggaggagcccctggagcccctgcccctgcagatgcccagcctgcccaacagccagagccccgccgagaacggcggcagaaagcccagagaccagagccacagcctggtgagcagccaggactgccagctggagagcgacggccccgacagcaagagcagagccagcatgagcttcagcagccaggaggccaacgccctggagcagagagccagcgtgagcgtgatggaggaggagttcctgctggaggccatggagggcccccccgagctgtacatccccgacatggcctgcgccaagaccaccaccagaggcgagtgccccagaaaggacagccacctgtggcagctgctgcccatgccccacgccgagtacgaggtgaccagacccaccgccaccagcaagtacgaccaccccctgggcttcatggtgacccacgtgaccgagatgcaggacagcttcgtgagacccgagggcgccggcaaggtgcagagccaccacaacgagagccagagaagccccggcaacgaccacacccaggacaagttcctgcacgtggacagcgaggcccccagagaggaggagagcagcggcttctgcccccacaccaaccacagcctgctggtgcccgagagcagcagccagtgcatccccaagcacagcgagatcaccccctacgccaccgacctggcccagaccagcgagaagctgatcccccacctgcacaagctgcccggcgaccccgcccaggtgaagagcagaagcggcaccctgggccagatcctgcccggcaccgaggccgagatggagaacctgcccctgaacaccggcagcagcagaagcgtgatgacccagatgagcagcagcctggtgagcgccgcccagagagccgtggccctgggcaccggccccagaggcaccagcctggagtgcaccgtgtgcgaccccgtgaccgccaccgagaccagactgggcaccaaggccagacagctgaacgacgccagcatccagaccagcgccctgagcaacaagaccctgacccacggcccccagcccctgaccaagagcgtgagcctggacagcggcttcagcagcatctgccccatgggcacctgccacgccatccccgcccactgctgcatctgctgccaccaccacccccactgccacggcgagagacagagccccggccccgagcccagcgtgtgcagacactgcctgtgcagcctgaccggccaccaggaggcccagttcatgaccaccctgaaggccctgcaggacaccaccgtgagagagctgtgcagctgcaccgtgcacgagatggaggccatgaagaccatctgccagagcttcagagagtacctggaggagatcgagcagcacctgatgggccagcaggccctgttcagcagagacatgagcgaggaggagagagaggaggccgagcagctgcagaccctgagagaggccctgagacagcaggtggccgagctggagttccagctgggcgacagagcccagcagatcagagagggcatcctgctgcagctggaggtgctgaccgccgagccccccgagcactacagcaacctgcaccagtacaactggatcgaggagagcaacggccagaccagctgcagcaagatccaccccggcatggcccccagaaccgtgttcccccccgacgacggccaggaggccccctgcagcggcggcacccagctggccgccttcaccccccccaccctggagaacagcaccagaatgagccccagcagcagcgcctgggccaagctgggccccacccccctgagcaactgccccgtgggcgagaaggacgccgacgtgttcctgtag

SEQ ID NO: 258416 - DNA, 3135 bp, Artificial Sequence
  derived and/or modified sequence
atgatggcccagaagagccagggcagcgacaacctgcaggagggccaggagaagagcaagagagagatcctgaagtgcaccaagagcgcctgggcccccctggacgagtggctgccccccgaccccgaggaggagagccagagcctgaccatccccatgctggaggacagcaagcaggagagcatccagcagtggctggacagcggcttcttcgtgagcgccaacgagaacttccagcaggtgatcgacagaaccgtgagcctgtacgagcagggcatggtgcagatgaccgtgaaggactacatgagaagcctgcaccagttcagcgagacccccatcctgagcagaggcaccagcttcaacagctgctacagcaccgccagcgtgccccagagcatccccgagtggctggagttctgggagatcgaccccgtggagatcctgctggacctgggcttcggcgccgacgagcccgacatctgcatgcagatccccgccagattcctgggctgcggcagcgccgccagaggcatcaacatcagagtgttcctggaggcccagaagcagagaatggacatcgagaaccccaacctgtacggcagattcagacagctggagatcctggaccacgtgaccaacgccttcagcagcctgctgagcgacgtgagcatcctgcccaacagagccgaggagaaggccggcggcgagagcgtgcagagaaccagcgtgagcgccgccaaggagcacagaagaagaatgggcaagctgctgagaagagccagcaagcagaacatcagaagagactgcaaccccgaggtgagcgagagcttcaaggtgaaggacgaggtgttcgtgcccttcaccaagccctgggactgcggcgccgagctggccgccaccagcatcaaccacaagcagaaccacctgagcctgagcgtggagcaccagagcctgcaggcctgcgacgacctgctgccctaccccccccacggcctgctgagcaagcagtggccctgcagcagcatgcccgccaagcaggccccccccagctgcgtgagcgagggcagcgtgaagggcagaacccagaaggagaacctgttccagaccaacaagctgaagagcctgagccacctggccggcaagggccccgacagcttcgagatggaggaggtgcagagcttcgaggaggagaccggcaaccccctggacatgaccagcggcaccgtgggcgccagagtggacagagccaacagctgccagagcgacagcagcggcttcctggaggagcccctggagcccctgcccctgcagatgcccagcctgcccaacagccagagccccgccgagaacggcggcagaaagcccagagaccagagccacagcctggtgagcagccaggactgccagctggagagcgacggccccgacagcaagagcagagccagcatgagcttcagcagccaggaggccaacgccctggagcagagagccagcgtgagcgtgatggaggaggagttcctgctggaggccatggagggcccccccgagctgtacatccccgacatggcctgcgccaagaccaccaccagaggcgagtgccccagaaaggacagccacctgtggcagctgctgcccatgccccacgccgagtacgaggtgaccagacccaccgccaccagcaagtacgaccaccccctgggcttcatggtgacccacgtgaccgagatgcaggacagcttcgtgagacccgagggcgccggcaaggtgcagagccaccacaacgagagccagagaagccccggcaacgaccacacccaggacaagttcctgcacgtggacagcgaggcccccagagaggaggagagcagcggcttctgcccccacaccaaccacagcctgctggtgcccgagagcagcagccagtgcatccccaagcacagcgagatcaccccctacgccaccgacctggcccagaccagcgagaagctgatcccccacctgcacaagctgcccggcgaccccgcccaggtgaagagcagaagcggcaccctgggccagatcctgcccggcaccgaggccgagatggagaacctgcccctgaacaccggcagcagcagaagcgtgatgacccagatgagcagcagcctggtgagcgccgcccagagagccgtggccctgggcaccggccccagaggcaccagcctggagtgcaccgtgtgcgaccccgtgaccgccaccgagaccagactgggcaccaaggccagacagctgaacgacgccagcatccagaccagcgccctgagcaacaagaccctgacccacggcccccagcccctgaccaagagcgtgagcctggacagcggcttcagcagcatctgccccatgggcacctgccacgccatccccgcccactgctgcatctgctgccaccaccacccccactgccacggcgagagacagagccccggccccgagcccagcgtgtgcagacactgcctgtgcagcctgaccggccaccaggaggcccagttcatgaccaccctgaaggccctgcaggacaccaccgtgagagagctgtgcagctgcaccgtgcacgagatggaggccatgaagaccatctgccagagcttcagagagtacctggaggagatcgagcagcacctgatgggccagcaggccctgttcagcagagacatgagcgaggaggagagagaggaggccgagcagctgcagaccctgagagaggccctgagacagcaggtggccgagctggagttccagctgggcgacagagcccagcagatcagagagggcatcctgctgcagctggaggtgctgaccgccgagccccccgagcactacagcaacctgcaccagtacaactggatcgaggagagcaacggccagaccagctgcagcaagatccaccccggcatggcccccagaaccgtgttcccccccgacgacggccaggaggccccctgcagcggcggcacccagctggccgccttcaccccccccaccctggagaacagcaccagaatgagccccagcagcagcgcctgggccaagctgggccccacccccctgagcaactgccccgtgggcgagaaggacgccgacgtgttcctgtag

SEQ ID NO: 258417 - DNA, 429 bp, Artificial Sequence
  derived and/or modified sequence
atgatggcccagaagagccagggcagcgacaacctgcaggagggccaggagaagagcaagagagagatcctgaagtgcaccaagagcgcctgggcccccctggacgagtggctgccccccgaccccgaggaggagagccagagcctgaccatccccatgctggaggacagcaagcaggagagcatccagcagtggctggacagcggcttcttcgtgagcgccaacgagaacttccagcaggtgatcgacagaaccgtgagcctgtacgagcagggcatggtgcagatgaccgtgaaggactacatgagaagcctgcaccagttcagcgagacccccatcctgagcagaggcaccagcttcaacagctgctacagcaccgccagcgtgccccagagcatccccgagtggctggagttctgggagatctag

SEQ ID NO: 258418 - DNA, 492 bp, Artificial Sequence
  derived and/or modified sequence
atgatggcccagaagagccagggcagcgacaacctgcaggagggccaggagaagagcaagagagagatcctgaagtgcaccaagagcgcctgggcccccctggacgagtggctgccccccgaccccgaggaggagagccagagcctgaccatccccatgctggaggacagcaagcaggagagcatccagcagtggctggacagcggcttcttcgtgagcgccaacgagaacttccagcaggtgatcgacagaaccgtgagcctgtacgagcagggcatggtgcagatgaccgtgaaggactacatgagaagcctgcaccagttcagcgagacccccatcctgagcagaggcaccagcttcaacagctgctacagcaccgccagcgtgccccagagcatccccgagtggctggagttctgggagatcgaccccgtggagatcctgctggacctgggcttcggcgccgacgagcccgacatctgcatgcagtag

SEQ ID NO: 258419 - DNA, 507 bp, Artificial Sequence
  derived and/or modified sequence
atgatggcccagaagagccagggcagcgacaacctgcaggagggccaggagaagagcaagagagagatcctgaagtgcaccaagagcgcctgggcccccctggacgagtggctgccccccgaccccgaggaggagagccagagcctgaccatccccatgctggaggacagcaagcaggagagcatccagcagtggctggacagcggcttcttcgtgagcgccaacgagaacttccagcaggtgatcgacagaaccgtgagcctgtacgagcagggcatggtgcagatgaccgtgaaggactacatgagaagcctgcaccagttcagcgagacccccatcctgagcagaggcaccagcttcaacagctgctacagcaccgccagcgtgccccagagcatccccgagtggctggagttctgggagatcgaccccgtggagatcctgctggacctgggcttcggcgccgacgagcccgacatctgcatgcagatccccgccagattctag

SEQ ID NO: 258420 - DNA, 4544 bp, Artificial Sequence
  derived and/or modified sequence
atcctcccagaaacccagccggcttcacctctcaccaacagtggctgcgggactttccagcacctagcctgggcattcccacagcccagagggagctcgtcccagacaaccaagaggaaaagaagggaaacaagaaagagatggagacccatcattgtggccaacgaccccacgaagagggaatagcggtccacgcacgggacccagcctccgatcaagcccagcaggcgccgggtgcgcctgtgctgggaggcagagcccacgcccacccggaaccgcgccggccagcgaggtccgtgcgcagccccggctgccgcctgcgcttctccctccacacctcaccgttagcagagggagccggctccggcctcagccagccccagagacaggcccccacagcacagcggcgggctgaagggctcctcgagcgtggccagagcagacgccgaggctaaggaggtgccgagagacagcgagggctgctagcacattgtcacctctcaatactggaactcagaataagaggtctccactgttctgagttatgggagaaagatgggtgtatggtagacagaatagtgcctccccacaacaaagatgtcaacatgttactgtgtgtgttaaaagggactttgtaggtgtgagtaagttgaagatcttgagaagaaaagattatcctgggttttttgggtggggccaatgtcataaaaaggtccagataagaaagaggcagaagagtcagggtcagaggaggagccatcatgataggagcagagaagcagagtcaggagagttgatgctacactgctaactttgaagatgaagaagccacgagctatggaatggagacagcctctgaaaggcaaggagatggatttcctttagagcttccaggaaggagtgcaggcctgctaacagatacgttttagcccagtgagactaatttttagacttctgacttccaggaccgtaagtttgcagaattactctcctatgatggcacagaaatcacaaggatctgacaaccttcaggaaggccaggaaaagagcaagagagagatcctgaagtgcaccaaaagcgcgtgggctccgctggatgagtggctgccccctgaccctgaggaggaaagccagagtctcaccatccccatgctggaagattccaagcaagaaagtattcagcagtggctggactctggattctttgtctctgcaaatgaaaactttcaacaagtcattgaccgcactgtttctttgtatgaacaagggatggttcaaatgactgtgaaagactacatgagatctttgcatcagttttcagaaactcccatcctatccagagggaccagtttcaactcttgctattctactgcaagtgtaccacaaagcattcctgaatggctggaattttgggagatagatccagtggagattctcttggatctggggtttggtgctgatgagccagacatctgcatgcaaatcccagccagattccttggttgtggctcagcagccagaggaatcaacatccgtgtttttcttgaagctcaaaagcagcgaatggacattgagaaccccaacttgtacggtcgtttccgacagctggaaatcctggaccatgtgaccaatgccttctcatctctgctgagtgatgtcagcatcctgccaaacagagctgaagagaaagctggaggagagagtgtgcaaagaacctcagtccaaagctttgaagaagagactggtaatcctcttgacatgacttcaggaactgtaggtgccagggtggacagagcaaatagctgccagtctgacagcagcgggttcctggaggagccgctggaaccgctgcccctccagatgccttccttgccaaacagccagagtcctgctgagaatggaggtagaaagccaagagatcagagccacagcttagtatcatcccaggactgtcagctagagtcggatgggccagattccaaaagtagggcgagcatgtctttttcaagccaagaagcgaatgccttggaacaaagggcctcagtatctgtgatggaggaagagtttctgcttgaggccatggaggggccaccagagctgtatatcccagacatggcctgtgccaagaccaccacgaggggagaatgcccaaggaaagacagccatctgtggcagcttctgccaatgccccatgctgagtatgaggtcaccagacccacagccacttccaaatatgatcatcctctggggtttatggtaacccacgtcacagaaatgcaggacagttttgtgaggcctgagggagctggcaaagtgcaaagccaccacaatgagtctcaaaggtcacctggaaatgatcatactcaagacaagttccttcatgttgactctgaggccccacgagaagaggaaagcagtggattctgtcctcacaccaaccacagcttactcgtaccagaaagctcatcacagtgtatccccaagcacagtgaaatcacaccttatgcaactgaccttgctcaaacatctgaaaagctcattccccacctccataaactgcctggagatcctgcccaggtgaagtcaaggtctggtactttgggtcagatactacctgggacagaagctgagatggaaaaccttcctctaaatactggcagctccaggtctgtaatgacccagatgtcctccagcctggtgtcggctgctcagagggctgtggccttggggactggtcccagaggaacatctttagaatgcactgtgtgtgatcctgttaccgcaacagaaacaagactggggacaaaagcaagacagttaaatgatgcttccattcagacttcagctctaagcaacaagaccttgacacatgggccccagcccctcaccaaatccgtctctctagactcaggcttctctagtatctgcccaatgggcacctgccatgctatacctgcccactgctgcatctgctgtcatcaccaccctcactgccacggggagaggcaaagccctggccctgaaccctcagtctgtaggcactgcctgtgttcactaactggtcaccaggaagcccagttcatgacgactttgaaagcccttcaggacactacagtgagggagctatgttcctgcacagtccatgagatggaagccatgaagacgatatgccaaagtttccgggagtatttagaagaaattgaacagcaccttatgggacagcaggccctcttttccagggacatgtcagaggaggaaagggaggaggccgagcaactgcaaacgttacgtgaggccctgaggcagcaggtggcagagttggaatttcagttaggagaccgggctcagcaaatcagagaagggattttactgcagctggaggttctcacagcagagccacctgaacactattcaaatctgcatcaatataactggatagaagaaagcaatgggcagacttcatgttctaaaatccacccaggcatggccccgaggactgtgtttcctcccgatgatggccaggaggctccctgttcaggtgggacccagttggctgccttcactccacccaccttggagaacagcaccaggatgtctccttcatcatcagcttgggcaaagttaggtccaacccctttgtcaaattgtcctgttggagaaaaggatgcagatgtcttcctctagatcagagcaggtttgttaaccttcatacaaaatataaaggcccagaacagatgtagcaaggaaatttcaattttccccaaggagaagggtctgccaacccattgtcagctatatctctcatattctaccctttggttaaacccaagaggagtttagaatactctaatactcattcagtatagaataactgagcacctagtatgtgcctggcacagagtatgcaacagtgactaaatagtatacggtctctgccctgctagaacttacagtgtagtgggggagatagaattgcaaacaaaaagtatctgagacagacctcagtcaatatagaagtttattttgccaaggttaaggatacacacccagaagacaggtctgtgcctttctccaaagatgattttgaggccttcaacatttagtggggaaagggtgctaatggggaaagaggtgtgggtacataggaggcaaacagttgcatttttttgagtctgatcagcttttctcatgagagaaggggtagaggaactgtcacttatgcattcacctagctcagtggatctgcacttttacagaaggtaaaataaacatagggcagaggaagcaatcagatatgcatttgtctcgggggagcagagggatggctttgagttctgttctttgtcctgtacctattaagagaagctatcaatatactttgtcaggataaaattcaacagaactgttttagactaaagattttagggaccacaaggaatttcccagtgggcaaattgtgagggaggtatttagcttttaaaaaaatctttgtagctatctcatttagaaataaaatgggaggcagattgcctgatgcagctcct

SEQ ID NO: 258421 - DNA, 2691 bp, Artificial Sequence
  derived and/or modified sequence
atgatggctcagaagagtcagggctcagataacctgcaagaaggtcaagagaaatctaaaagagaaattctcaaatgtaccaaatcagcttgggccccgctggacgagtggctcccccccgatcctgaagaagaatctcagagtttgactatcccaatgctggaagacagtaaacaggagagcatccagcaatggctggactctggcttctttgtgtctgcaaatgagaattttcagcaggtgatagaccggaccgtgtctttgtacgaacagggaatggtccagatgacagtaaaggattacatgcgaagcctgcatcagtttagcgaaacgcctattctctcacggggcacatcatttaactcctgttactccactgcatctgtaccccagagcatcccagagtggttggaattttgggagatcgatcccgtggaaatcctcctcgatctgggcttcggagctgatgagcccgacatttgcatgcaaattccagcccgctttctgggttgcgggagcgcagcgagaggtattaatatccgcgttttcttggaagcacagaagcaaaggatggatattgaaaaccccaatttgtacggcaggtttcgacagctggagatattggaccatgttacaaacgccttctcctctcttctctctgacgtgtccatcctccccaatcgcgcagaggaaaaggccggtggagagtcagtgcaacgcacgagtgttcaaagctttgaggaggagaccggcaatcctcttgacatgacatcaggaaccgtcggggctcgggtggatcgggcaaactcatgccagtccgacagttctggattcctggaggagcctctggagcccctgccgttacagatgccaagcttgcccaatagccagagcccagctgagaatggtggccggaaacccagagaccagtcacatagcctggtttcctctcaggattgccagctggaaagtgacggtccggacagtaaaagcagagcttctatgagcttcagctcccaggaggctaacgcactcgaacagagggcaagcgtctctgtgatggaggaagaattcctcctcgaggcaatggagggaccacctgaactgtacataccagacatggcgtgtgcgaaaactaccaccagaggcgagtgcccccgcaaagacagtcacttatggcagctgctcccaatgcctcatgcagaatacgaagttacccggccaactgccacctctaaatacgatcatcccctaggtttcatggtgacccacgtaacagagatgcaggactccttcgttcggccggaaggagctggcaaggtgcagtctcatcacaatgagtctcagcgctcacccgggaacgaccacacccaagacaagttccttcatgtggatagcgaggctcctagagaggaggagtcatcagggttctgccctcataccaatcactctctgctcgttcccgaatcaagttcccagtgtattcctaaacattccgagatcacgccatacgcaaccgatctcgcccagacttctgaaaagctgattccacatctacacaagctgcccggagacccagcccaggtcaaatctcggtccgggactctgggccagatcttgcctggaaccgaggctgaaatggaaaacttaccacttaacactggatcctcacgatccgttatgacacagatgtctagctcccttgtgtccgcagcacaaagagccgtagcattagggaccgggcctcgcggcacttccctggagtgcaccgtctgcgatccagtgacagccacggaaaccaggctgggcaccaaagctcgccaattgaatgatgccagtatccagacgagtgctctgtccaataaaacccttacgcacggacctcagccccttacgaagagcgtctccttggactccggcttctctagcatatgcccaatgggcacttgccacgccatacccgcccattgttgcatctgttgccaccatcatccacactgccacggagagcgccagagtcctggccctgagcctagtgtttgccggcattgcctctgtagtttaactggtcaccaagaagcccagtttatgaccaccctgaaggcactgcaggacacaaccgttcgggagctctgcagttgcacagtgcatgagatggaggcaatgaagaccatctgccagagcttcagggaatatttagaagagattgaacagcatctcatgggacagcaggcattgttttccagggatatgagcgaagaagaaagagaagaggctgagcagctacaaactctgcgtgaggccctgcgtcaacaggtggctgagctggaattccagttgggggatcgggcccagcagattcgggaaggcattctacttcagctggaggtgctcactgcagaacctcccgagcactacagtaacctccaccagtacaactggattgaggaaagcaatggccagacgtcctgcagcaagatccatccagggatggccccaagaactgtcttcccaccagatgacggacaagaggccccatgctccgggggaactcaactagctgcctttacgccacccactctcgaaaatagcactcgaatgagcccctcctcttccgcttgggccaaattgggccctacacctctctcaaactgtcccgttggagagaaggacgccgatgtctttctctag

SEQ ID NO: 258422 - DNA, 3135 bp, Artificial Sequence
  derived and/or modified sequence
atgatggcccagaaatctcaggggtcagacaatctacaggaggggcaggagaaatctaaacgagaaatcctcaaatgcacaaaatcagcctgggccccgctggacgagtggctcccccctgaccccgaagaagagagccagtctttgaccatcccaatgttggaggatagcaagcaggaatctatccagcagtggctcgattctggtttcttcgtcagtgccaatgaaaattttcaacaggtcatcgaccgcaccgtgagcctgtatgaacaggggatggtgcagatgaccgtcaaagattacatgagatcactccaccagttttctgagacaccaatactcagccggggcactagctttaactcctgctactcaacggcctctgtaccgcagagtattcctgaatggctcgaattctgggaaattgaccccgtggaaatattgctggatctcgggttcggcgccgatgaacctgatatttgcatgcaaatccccgctaggttcctggggtgcgggagcgccgcaaggggaatcaatattcgcgtgtttcttgaggcccagaagcaaaggatggacatcgagaatccaaacttatatgggcgctttagacagctggaaatcctggatcacgtgacaaatgctttctcttcactcctgagcgacgtgagcatcctgcccaatagggcagaggagaaagccggaggagagagcgttcagcgcacctcagtatccgctgccaaagagcaccggagacgcatggggaaattgctccgcagggccagcaagcagaacatcagacgcgactgcaaccctgaagttagcgaatcattcaaggtgaaagatgaagtgttcgtacccttcacaaaaccctgggattgcggggccgaattagcagctacttctattaaccataaacagaaccacctgtcactgtccgtggagcaccaatcgctgcaggcttgtgacgacctgctgccatatcccccacacggactgttgtccaagcagtggccttgctccagcatgccggctaagcaggccccaccatcgtgcgtcagtgagggctcagtgaaaggccgtacgcagaaagagaatctgttccagaccaacaagttaaagtccctctcccatttggctggaaaaggaccggattctttcgagatggaagaagtccagtctttcgaagaggagactggaaatcctttggacatgacatcgggcaccgtgggggcgcgggtggaccgagcaaattcctgccagtctgatagcagcggttttctggaagagcctctggaacccctgccattgcaaatgccaagcctcccaaattctcagtccccagccgagaacgggggccgaaagccccgggaccaatctcacagcttggtctcatctcaggattgtcagctagaaagcgacgggcctgactctaagagcagagcttctatgagtttctcatctcaggaggctaatgctttggagcagcgtgcttccgtgtcggtgatggaagaagagttcctgctggaagcaatggagggacctcccgaactatacatccctgatatggcctgtgccaaaaccaccacgaggggcgaatgcccgaggaaagactcacacctctggcagcttcttcctatgcctcacgccgaatatgaagttactcgccctacggcgacatccaaatacgaccaccccctgggctttatggtgactcacgtaaccgagatgcaggacagctttgtacggccagaaggagccggaaaagttcagagccaccataatgaaagccagcggtcaccaggcaatgaccacactcaggacaaattcctccacgtcgacagtgaagcgcctcgcgaggaagaatcctcaggattctgcccccacacaaatcactcgttattagtgccagagtcctccagccaatgcattcccaaacactctgagatcacaccatacgccacggatctggcacagaccagtgagaaactcataccacatctgcataagctccccggcgatcccgctcaggtgaagagtcgaagcggcacattagggcagatcttgcccggtactgaggctgagatggagaatctcccactgaacactggctccagcaggagcgtaatgactcagatgtcctcaagccttgtcagcgcagcacaacgcgccgtagccctgggaacaggacctaggggtaccagcctcgagtgcaccgtttgcgatccagtgacagcgactgagacgcgtctgggaactaaagcaaggcagctcaatgatgctagcatacagacgtccgccctaagcaacaagacactgacccacgggcctcagcccttaaccaaaagtgtatcactggattctggtttctcctctatatgccccatggggacgtgccacgcaatccccgcacactgctgcatctgctgtcatcatcaccctcactgccacggtgagcgccaaagcccagggccagaacccagtgtgtgcagacattgcctgtgttctttaaccggacatcaggaggcccagtttatgacgactctgaaagcattacaggacactactgtgagagagctttgctcatgcaccgtacacgagatggaagctatgaagaccatctgccagtcttttagagagtatctggaggagatcgaacagcatttgatggggcagcaagccctgttcagccgagacatgtcagaggaggagcgcgaggaggctgaacaactacagacgctgcgcgaagccctaaggcagcaggtcgccgagctcgagttccaactgggcgatcgagcccagcaaatccgtgagggaattctgcttcagctggaagtcctgacagctgaaccgccagaacattatagcaaccttcatcagtacaattggatagaagagagtaatggacagacttcatgtagcaaaatccaccccggaatggcccctaggacagtcttccccccagatgacggacaggaggccccctgctccggaggcactcagctggcagccttcaccccccccacccttgaaaattcaacgcggatgagcccatccagttccgcctgggccaagctcggacccactcccctctccaactgtcctgttggagaaaaggatgcagacgtcttcctctag

SEQ ID NO: 258423 - DNA, 429 bp, Artificial Sequence
  derived and/or modified sequence
atgatggctcagaagtcacagggtagtgacaacctgcaagaagggcaggagaagagcaaacgcgagatcctaaaatgtaccaagagcgcctgggctcctctagacgaatggctgccaccggatccagaagaggaatcgcaatccttaactatcccaatgctagaggatagcaagcaagagagtatccagcaatggttggattcgggtttttttgtgagcgcgaatgagaatttccagcaggtaatcgaccgaacagtgtccctgtacgaacaggggatggtccagatgaccgtgaaggactacatgcgatctctgcaccagttttccgagacccctatcttgagtagaggaacctcctttaattcgtgttattccaccgcctcagtgccccagtcaatccctgaatggctggagttttgggagatttag

SEQ ID NO: 258424 - DNA, 492 bp, Artificial Sequence
  derived and/or modified sequence
atgatggcccagaagtcccaaggtagcgataatctgcaggaggggcaggagaagtctaaaagagaaatcctgaaatgcacaaagagtgcctgggctcctttggatgaatggctccctcccgaccccgaagaggagtctcagagcctcactatccccatgcttgaagacagtaaacaggaaagtattcagcagtggctcgactcagggtttttcgtttccgccaatgagaacttccaacaggtgattgataggactgtgtctctttatgagcagggcatggtgcagatgacagtcaaagattatatgcgatcgcttcatcaatttagcgaaacaccaattctcagccgcggcacgtctttcaacagctgctacagtaccgccagtgtgcctcagtccattcctgaatggctcgaattttgggagatcgatcctgtggagatactgctcgatcttggatttggggcagatgaacccgatatctgtatgcagtag

SEQ ID NO: 258425 - DNA, 507 bp, Artificial Sequence
  derived and/or modified sequence
atgatggcacagaaaagtcaggggtcggacaatctccaggaggggcaggaaaaatccaaacgggagattttgaaatgtacaaagagcgcgtgggccccactggatgagtggttgccccccgatcccgaggaggaaagccaatctttaacgattcctatgctggaggatagcaaacaggaatcgatccagcaatggctcgactcaggattcttcgtttcggcgaacgagaatttccagcaggtcatcgatagaaccgtgtctctgtatgagcagggcatggtacagatgaccgttaaggattacatgaggtctctccaccaattttctgagacccctattctgtccaggggtacaagctttaactcttgttacagcactgcatccgttcctcagagtattccagagtggctggaattctgggagatagatccggttgaaattctattagatctgggattcggggctgatgagccggatatttgtatgcaaattccagcgcgattctag

SEQ ID NO: 258426 - DNA, 2691 bp, Artificial Sequence
  derived and/or modified sequence
atgatggcccagaagagccagggcagtgacaacctgcaggagggccaggagaagagcaagcgggagatcctgaagtgcaccaagagcgcctgggcccccctggatgagtggctgcccccagaccctgaggaggagagccagagcctgaccatccccatgctggaggacagcaagcaggagagcatccagcagtggctggacagcggcttctttgtgtctgccaatgaaaacttccagcaggtgattgacagaacagtgtccctgtatgagcagggcatggtgcagatgacagtgaaggactacatgaggagcctgcaccagttcagcgagacccccatcctgagccggggcaccagcttcaacagctgctacagcacagcctctgtgccccagagcatccctgagtggctggagttctgggagattgatcctgtggagatcctgctggacctgggctttggagcagatgagccagacatctgcatgcagatcccagcccgcttcctgggctgcggcagcgctgcccggggcatcaacatccgggtcttcctggaggcccagaagcagaggatggacatcgagaaccccaacctgtatggccgcttccggcagctggagatcctggaccacgtgaccaatgccttcagcagcctgctgagtgatgtgtccatcctgcccaacagagctgaggagaaggccggcggggagagcgtgcagaggacctctgtgcagagctttgaggaggagaccggcaaccccctggacatgaccagcggcaccgtgggcgcccgggtggaccgggccaacagctgccagagcgacagcagcggcttcctggaggagcccctggagcccctgcccctgcagatgcccagcctgcccaacagccagagccctgcagaaaatggaggcaggaagccccgggaccagagccacagcctggtgagcagccaggactgccagctggagagtgatggccctgacagcaagagccgggcctccatgtccttcagcagccaggaggccaatgccctggagcagagggcctctgtgtctgtgatggaggaggagttcctgctggaggccatggagggccccccagagctgtacatcccagacatggcctgtgccaagaccaccaccagaggagagtgccccaggaaggacagccacctgtggcagctgctgcccatgcctcatgctgaatatgaggtgacccggcccacagccaccagcaaatatgaccaccccctgggcttcatggtgacccacgtgacagagatgcaggacagctttgtgcggcctgagggcgctgggaaggtgcagagccaccacaatgaaagccagaggagccctggaaatgaccacacccaggacaagttcctgcacgtggacagcgaggccccccgggaggaggagagcagcggcttctgcccccacaccaaccacagcctgctggtgcctgagagcagcagccagtgcatccccaagcacagcgagatcaccccctatgccacagacctggcccagaccagcgagaagctgatcccccacctgcacaagctgcccggggaccctgcccaggtgaagagccgcagcggcaccctgggccagatcctgcctggaacagaagctgagatggagaacctgcccctgaacacaggcagcagccgctctgtgatgacccagatgagcagcagcctggtgtctgctgcccagagagctgtggccctgggcaccggcccccggggcaccagcctggagtgcaccgtgtgtgaccctgtgacagccacagagacccggctgggcaccaaggcccggcagctgaatgatgccagcatccagaccagcgccctgagcaacaagaccctgacccacggcccccagcccctgaccaagtctgtgtccctggacagcggcttcagcagcatctgccccatgggcacctgccacgccatcccagcccactgctgcatctgctgccaccaccacccccactgccacggggagcggcagagccctggccctgagcccagcgtgtgccgccactgcctgtgcagcctgaccggccaccaggaggcccagttcatgaccaccctgaaggccctgcaggacaccaccgtgcgggagctgtgcagctgcaccgtgcatgagatggaggccatgaagaccatctgccagagcttccgggagtacctggaggagattgagcagcacctgatgggccagcaggccctcttcagccgggacatgtctgaggaggagcgggaggaggccgagcagctgcagaccctgcgggaggccctgcggcagcaggtggccgagctggagttccagctgggggaccgggcccagcagatccgggagggcatcctgctgcagctggaggtgctgacagctgagcccccagagcactacagcaacctgcaccagtacaactggattgaggagagcaatggccagaccagctgcagcaagatccaccctggcatggcccccaggacagtgttccccccagatgatggccaggaggccccctgcagcggcggcacccagctggccgccttcaccccacccaccctggagaacagcaccaggatgagccccagcagcagcgcctgggccaagctgggccccacccccctgagcaactgccctgtgggggagaaggatgctgatgtgttcctgtag

SEQ ID NO: 258427 - DNA, 3135 bp, Artificial Sequence
  derived and/or modified sequence
atgatggcccagaagagccagggcagtgacaacctgcaggagggccaggagaagagcaagcgggagatcctgaagtgcaccaagagcgcctgggcccccctggatgagtggctgcccccagaccctgaggaggagagccagagcctgaccatccccatgctggaggacagcaagcaggagagcatccagcagtggctggacagcggcttctttgtgtctgccaatgaaaacttccagcaggtgattgacagaacagtgtccctgtatgagcagggcatggtgcagatgacagtgaaggactacatgaggagcctgcaccagttcagcgagacccccatcctgagccggggcaccagcttcaacagctgctacagcacagcctctgtgccccagagcatccctgagtggctggagttctgggagattgatcctgtggagatcctgctggacctgggctttggagcagatgagccagacatctgcatgcagatcccagcccgcttcctgggctgcggcagcgctgcccggggcatcaacatccgggtcttcctggaggcccagaagcagaggatggacatcgagaaccccaacctgtatggccgcttccggcagctggagatcctggaccacgtgaccaatgccttcagcagcctgctgagtgatgtgtccatcctgcccaacagagctgaggagaaggccggcggggagagcgtgcagaggacctctgtgtctgctgccaaggagcacagaagaaggatgggcaagctgctgcggcgggccagcaagcagaacatccggcgggactgcaaccctgaggtgtctgagagcttcaaggtgaaggatgaggtgtttgtgcccttcaccaagccctgggactgtggggctgagctggccgccaccagcatcaaccacaagcagaaccacctgagcctgtctgtggagcaccagagcctgcaggcctgtgatgacctgctgccctacccaccccacggcctgctgagcaagcagtggccctgcagctccatgcctgccaagcaggccccacccagctgtgtgtctgagggctctgtgaagggccgcacccagaaggagaacctcttccagaccaacaagctgaagagcctgagccacctggccgggaaaggaccagacagctttgagatggaggaggtgcagagctttgaggaggagaccggcaaccccctggacatgaccagcggcaccgtgggcgcccgggtggaccgggccaacagctgccagagcgacagcagcggcttcctggaggagcccctggagcccctgcccctgcagatgcccagcctgcccaacagccagagccctgcagaaaatggaggcaggaagccccgggaccagagccacagcctggtgagcagccaggactgccagctggagagtgatggccctgacagcaagagccgggcctccatgtccttcagcagccaggaggccaatgccctggagcagagggcctctgtgtctgtgatggaggaggagttcctgctggaggccatggagggccccccagagctgtacatcccagacatggcctgtgccaagaccaccaccagaggagagtgccccaggaaggacagccacctgtggcagctgctgcccatgcctcatgctgaatatgaggtgacccggcccacagccaccagcaaatatgaccaccccctgggcttcatggtgacccacgtgacagagatgcaggacagctttgtgcggcctgagggcgctgggaaggtgcagagccaccacaatgaaagccagaggagccctggaaatgaccacacccaggacaagttcctgcacgtggacagcgaggccccccgggaggaggagagcagcggcttctgcccccacaccaaccacagcctgctggtgcctgagagcagcagccagtgcatccccaagcacagcgagatcaccccctatgccacagacctggcccagaccagcgagaagctgatcccccacctgcacaagctgcccggggaccctgcccaggtgaagagccgcagcggcaccctgggccagatcctgcctggaacagaagctgagatggagaacctgcccctgaacacaggcagcagccgctctgtgatgacccagatgagcagcagcctggtgtctgctgcccagagagctgtggccctgggcaccggcccccggggcaccagcctggagtgcaccgtgtgtgaccctgtgacagccacagagacccggctgggcaccaaggcccggcagctgaatgatgccagcatccagaccagcgccctgagcaacaagaccctgacccacggcccccagcccctgaccaagtctgtgtccctggacagcggcttcagcagcatctgccccatgggcacctgccacgccatcccagcccactgctgcatctgctgccaccaccacccccactgccacggggagcggcagagccctggccctgagcccagcgtgtgccgccactgcctgtgcagcctgaccggccaccaggaggcccagttcatgaccaccctgaaggccctgcaggacaccaccgtgcgggagctgtgcagctgcaccgtgcatgagatggaggccatgaagaccatctgccagagcttccgggagtacctggaggagattgagcagcacctgatgggccagcaggccctcttcagccgggacatgtctgaggaggagcgggaggaggccgagcagctgcagaccctgcgggaggccctgcggcagcaggtggccgagctggagttccagctgggggaccgggcccagcagatccgggagggcatcctgctgcagctggaggtgctgacagctgagcccccagagcactacagcaacctgcaccagtacaactggattgaggagagcaatggccagaccagctgcagcaagatccaccctggcatggcccccaggacagtgttccccccagatgatggccaggaggccccctgcagcggcggcacccagctggccgccttcaccccacccaccctggagaacagcaccaggatgagccccagcagcagcgcctgggccaagctgggccccacccccctgagcaactgccctgtgggggagaaggatgctgatgtgttcctgtag

SEQ ID NO: 258428 - DNA, 429 bp, Artificial Sequence
  derived and/or modified sequence
atgatggcccagaagagccagggcagtgacaacctgcaggagggccaggagaagagcaagcgggagatcctgaagtgcaccaagagcgcctgggcccccctggatgagtggctgcccccagaccctgaggaggagagccagagcctgaccatccccatgctggaggacagcaagcaggagagcatccagcagtggctggacagcggcttctttgtgtctgccaatgaaaacttccagcaggtgattgacagaacagtgtccctgtatgagcagggcatggtgcagatgacagtgaaggactacatgaggagcctgcaccagttcagcgagacccccatcctgagccggggcaccagcttcaacagctgctacagcacagcctctgtgccccagagcatccctgagtggctggagttctgggagatctag

SEQ ID NO: 258429 - DNA, 492 bp, Artificial Sequence
  derived and/or modified sequence
atgatggcccagaagagccagggcagtgacaacctgcaggagggccaggagaagagcaagcgggagatcctgaagtgcaccaagagcgcctgggcccccctggatgagtggctgcccccagaccctgaggaggagagccagagcctgaccatccccatgctggaggacagcaagcaggagagcatccagcagtggctggacagcggcttctttgtgtctgccaatgaaaacttccagcaggtgattgacagaacagtgtccctgtatgagcagggcatggtgcagatgacagtgaaggactacatgaggagcctgcaccagttcagcgagacccccatcctgagccggggcaccagcttcaacagctgctacagcacagcctctgtgccccagagcatccctgagtggctggagttctgggagattgatcctgtggagatcctgctggacctgggctttggagcagatgagccagacatctgcatgcagtag

SEQ ID NO: 258430 - DNA, 507 bp, Artificial Sequence
  derived and/or modified sequence
atgatggcccagaagagccagggcagtgacaacctgcaggagggccaggagaagagcaagcgggagatcctgaagtgcaccaagagcgcctgggcccccctggatgagtggctgcccccagaccctgaggaggagagccagagcctgaccatccccatgctggaggacagcaagcaggagagcatccagcagtggctggacagcggcttctttgtgtctgccaatgaaaacttccagcaggtgattgacagaacagtgtccctgtatgagcagggcatggtgcagatgacagtgaaggactacatgaggagcctgcaccagttcagcgagacccccatcctgagccggggcaccagcttcaacagctgctacagcacagcctctgtgccccagagcatccctgagtggctggagttctgggagattgatcctgtggagatcctgctggacctgggctttggagcagatgagccagacatctgcatgcagatcccagcccgcttctag

SEQ ID NO: 258431 - DNA, 2691 bp, Artificial Sequence
  derived and/or modified sequence
atgatggcccagaagagccagggcagcgacaacctgcaggagggccaggaaaagagcaagcgcgaaatccttaaatgtacgaaatccgcttgggctcccttggacgagtggctgccgcctgatcctgaggaggaaagtcagtcccttaccataccaatgctggaggatagtaagcaggagagtatccagcagtggctggactccggattttttgttagtgccaacgagaattttcagcaagttatcgaccgaaccgttagcctgtacgagcaaggtatggtgcaaatgacggtgaaagactatatgcggtccttacatcagttctctgagacacccatcctgtcgaggggcacctcgttcaactcttgttactccaccgctagtgtcccccagtctatccctgaatggctggagttttgggaaatcgaccccgtagagatcctcctcgatttaggattcggagcagacgagccggatatttgtatgcagattccagcccggttcctggggtgcggatccgccgccagagggattaacatacgagtgtttctggaggctcaaaagcagcggatggatatcgaaaaccctaacctttacggtcgcttccgtcagcttgaaatccttgaccacgtcacaaatgccttcagctccttgttatctgatgtgagtatccttcctaaccgggcagaggaaaaggccggcggcgagtccgttcaacgtactagcgtacagtcctttgaagaggaaaccggcaacccgctggatatgactagtggtaccgtaggagctcgtgtagacagagcgaactcctgccagagtgattcctccggctttttggaggagcccctagagcctctgccacttcaaatgcctagcctccccaactcccagtccccggccgaaaacggggggagaaagccccgggatcagtctcattctctagtcagcagccaggactgtcagctagaaagtgatggtccagatagcaagtctcgcgcctcaatgagtttttcaagccaggaagctaacgctttggaacagagggcgtccgtctcagtaatggaagaggagttcctgttagaggctatggaaggccccccagagctgtatattccagatatggcgtgtgccaaaactactacccgaggcgagtgtccaagaaaagatagccacctgtggcagctgttacctatgcctcacgccgagtacgaagtgactagacccactgccaccagcaagtacgaccacccactcggtttcatggtcacacacgtgactgagatgcaggactctttcgtccgacccgaaggtgccggcaaggtccagtcacatcataacgagtcccaacgaagccccggaaatgaccatactcaagataagttcctccacgtggacagcgaagccccccgagaggaagaatctagtggattctgccctcataccaaccactcgctcctggtgcctgagagcagcagtcagtgcatcccaaagcattcagagattacgccatacgccactgatctcgcccagacctctgaaaaactgattcctcacctgcacaaacttcctggggatcctgctcaggtcaaaagcagatccggtactcttggacaaatccttcccgggacggaggccgaaatggagaatttgccattaaacacgggctcttcacgcagtgtaatgactcagatgtccagttccctcgtgtccgccgctcagagggctgtagctctcgggaccggtcccagaggcacctctctggagtgtaccgtatgtgatcctgtcacagccacagaaacgagactggggactaaagcccgtcagttgaacgacgcaagcattcagacttcggcgctgtccaataagactcttacccatggtccccaacccctgacgaaaagtgtgtcactcgattctggcttctcttctatttgcccaatgggtacatgccatgccatcccggcccattgttgtatctgctgtcaccatcatcctcattgtcacggcgagcgacagtcgcctggtccagagcctagtgtgtgccggcactgtctgtgttctttaaccggacatcaagaggcccagttcatgactaccctgaaagctttacaggacaccacggtccgtgagttgtgttcctgtacagtacacgagatggaagctatgaaaaccatttgtcagtccttcagagaatacctcgaagagatcgagcagcacctcatgggtcagcaggccctattcagtcgtgatatgtcagaggaggagagggaggaagccgagcagctgcagacattgagagaagcgctgcgtcagcaggtggccgaacttgagttccaactgggggacagagctcaacaaatacgggagggtatccttctgcagctggaggtgctcacggccgagccacccgaacattactcaaatttgcaccaatacaattggatagaggaaagtaatgggcaaacctcctgcagtaaaatccaccccggtatggcccctcgaacagtgttccctcctgacgatggccaggaagctccttgttccgggggaacccagctggcggccttcacgcctccaactctcgaaaactccacgcgcatgtctccgagctcctccgcgtgggcaaagctgggtccaacacccctgtctaattgcccagtaggcgaaaaggatgcagatgtgtttttgtag

SEQ ID NO: 258432 - DNA, 3135 bp, Artificial Sequence
  derived and/or modified sequence
atgatggcccagaagagccagggcagcgacaacctgcaggagggccaggagaagtctaaacgcgaaattctgaaatgcaccaaatcggcatgggctccattagatgaatggctgccacctgatcctgaggaagagtctcaatcattaaccataccaatgctggaagatagtaaacaagagagcattcaacagtggttagacagtgggtttttcgtttccgctaacgaaaacttccagcaggtcatcgaccggaccgtgagcctgtatgagcagggtatggtgcagatgactgtgaaagactatatgcgctccttgcaccagttctccgaaacacctatcttgagccgcggaacctccttcaattcctgctatagcacagctagtgtcccgcaatcaattcccgaatggctggaattttgggagatcgatcccgttgaaattttgctggacctgggattcggtgcagacgaacctgatatttgcatgcaaatcccggccagatttctgggttgtggctcggccgccagggggatcaacatccgagtttttctcgaggcacagaagcagaggatggatatcgagaatccgaatttgtatggcaggtttaggcaactggaaatcctggatcatgtgaccaatgccttcagctcccttctgagcgacgtttctatcctcccgaaccgagccgaagagaaagcggggggggaaagtgtccagaggacatcggtctctgccgccaaggagcatagaaggcgaatgggtaaactgttgcgaagagccagcaagcaaaatataagacgcgactgcaatccagaggttagtgagagttttaaagtgaaggatgaggtgttcgtgccctttacaaagccatgggactgcggagccgaattagcagcgacaagcatcaatcacaaacagaatcacttgagtttgagcgtggaacatcagtcactgcaggcatgcgacgacctgctgccgtacccccctcatggcctcctgtcgaaacagtggccttgcagttccatgcccgcaaagcaggccccaccctcatgtgtgtccgagggaagcgtaaagggtcggacgcagaaggaaaacctgttccaaaccaataaactaaaatctctttcccacctggcaggaaagggccctgactcttttgaaatggaagaagttcagtccttcgaggaggagactggcaaccccctagacatgacaagtgggactgttggagctcgggtggacagagctaatagttgtcagtccgactcatcgggtttcttggaagagcccctcgagcctctgccattacagatgccctctttgccaaactcacagagccctgctgagaacggcggcagaaagccgagagaccaatcccattcccttgtgagcagccaggactgccaactcgagtctgacgggcctgatagtaagtcccgggcaagcatgagtttttctagtcaggaagccaatgccctggagcagcgtgcctcagtctctgtaatggaggaagaattcttactggaagccatggagggcccgccagagctgtatattccggacatggcctgtgccaagactacaaccagaggagaatgcccacggaaggacagtcatctctggcaactgctccccatgcctcatgccgaatacgaagtgacacggccaaccgccaccagtaagtacgatcatcctctgggatttatggtgacacatgtgactgaaatgcaagacagcttcgtgcgtcctgagggggctggaaaggtccagagccatcacaatgaaagccagcgatcccccggcaatgatcatacgcaggacaaatttctgcatgttgactcggaagcgcctagggaggaagaaagtagcggattctgtccacacacaaatcacagtctgctcgtgccagaatcttcctcacagtgcatccctaaacatagcgaaattaccccatatgcgacagatttggcacagacaagcgagaaactgatcccccatctccataagcttcctggggatcctgctcaggtcaagtcacgtagcggaaccttgggacagattctacccggaacagaagccgaaatggagaacctcccgctcaatactggatcttcccggtctgtgatgactcagatgagcagctccctggtgtcagcagctcagcgcgccgtggctctggggaccggccctcggggcacctcgttggaatgtacagtgtgcgatcccgtgacagccaccgaaacacgactgggcaccaaagctcgccagctgaatgacgcatccatccagacgtccgccctgtctaacaaaactctcacacacggccctcaaccactgacaaagtcagtctcgcttgattctggcttctcctcaatatgccccatgggaacttgccatgccattcccgctcactgctgcatttgctgtcaccatcacccacattgccacggcgagcgccagagtccaggccccgaaccaagcgtatgtaggcactgtctctgtagtctcaccgggcatcaggaggcccagtttatgacgaccctcaaagccctacaggacacgactgtgagggagctctgcagctgtactgtgcacgagatggaggcaatgaagacaatttgtcaatccttcagagagtatcttgaagagattgagcagcaccttatggggcaacaagccttgtttagtcgtgacatgagcgaggaagagagagaagaggcagaacaactccagacgctgagagaggccctgcgtcagcaagtcgccgaactggaattccagttgggcgaccgagcgcagcagattagggaaggcatcctgctgcagcttgaggttctgactgcggaaccccccgagcattactctaacctacaccaatacaactggatcgaggaatccaacggacagaccagttgttcaaagatacatccaggcatggcgccccggaccgttttcccgccagatgacggacaagaagccccatgcagcggggggacccagctcgcagcctttaccccgccaaccttggagaactcaacccgcatgtcgccatccagtagcgcttgggccaagttaggccctacaccactgtccaactgtccagtcggcgaaaaagatgcggacgtcttcctgtag

SEQ ID NO: 258433 - DNA, 429 bp, Artificial Sequence
  derived and/or modified sequence
atgatggcccagaagagccagggcagcgacaacctgcaggagggccaggaaaagagcaaacgtgaaattcttaagtgcaccaagtcagcatgggcaccactggacgagtggctacctcccgacccggaggaagagagtcaatctctgacaatccccatgttggaagatagtaagcaagagtctatccagcagtggctggattcagggttcttcgtgagtgctaatgagaacttccagcaggtgattgaccgtaccgtgtcgctctacgaacagggcatggtccagatgaccgtgaaggactacatgcgcagcctgcaccagttctccgaaacacccattctcagcaggggaacttcatttaacagttgttattctacagctagtgtccctcagtccataccggaatggctggaattctgggaaatttag

SEQ ID NO: 258434 - DNA, 492 bp, Artificial Sequence
  derived and/or modified sequence
atgatggcccagaagagccagggcagcgacaacctgcaggagggccaggagaagagcaaacgcgagatcttaaagtgtacgaagtcagcatgggccccgctggatgaatggctaccaccggatcctgaggaggaatcacagtccctaacaatcccgatgctggaggactcaaagcaggagagcattcaacagtggctcgacagcggctttttcgtgagcgctaatgaaaattttcagcaggtcattgacagaacagtcagtctttatgaacaggggatggttcagatgaccgtgaaagattatatgagaagcctgcaccaatttagtgagacaccgatcctgagtcgggggacatcctttaatagttgctactctacggcgagcgtaccccaaagtatccccgagtggctggagttctgggagatcgacccagttgagattcttctggatctgggcttcggggccgatgagccagacatatgcatgcagtag

SEQ ID NO: 258435 - DNA, 507 bp, Artificial Sequence
  derived and/or modified sequence
atgatggcccagaagagccagggcagcgacaacctgcaggagggccaagagaaatccaagcgagaaattctgaaatgtactaaaagtgcatgggctcccctcgacgagtggcttcctcccgaccccgaggaagaatctcagagcctgactatccctatgctggaggattccaagcaagaatcaatccagcagtggcttgatagcggattctttgtgtccgcgaacgagaatttccagcaggtcattgatcgcaccgtcagcctgtacgagcaggggatggttcagatgacggtgaaagactatatgcgttcattacaccagttttccgagacccctatactgtcacgcgggacttcttttaacagctgctatagcacagcttctgttccacaatcgattcctgaatggctggagttttgggagattgacccagtagaaatactcctggatctgggtttcggggcagacgagcctgatatttgtatgcagatcccagcccgtttctag

SEQ ID NO: 258436 - DNA, 2691 bp, Artificial Sequence
  derived and/or modified sequence
atgatggcccaaaagtcccagggcagtgataatttgcaggagggtcaggaaaagtccaagagggagatcctgaagtgtaccaagtcggcatgggcaccactggacgagtggttgccacctgaccctgaagaagaatcccagtctctgaccatccctatgctggaagattccaagcaagagagtatccagcagtggctggactcgggctttttcgtgagcgcgaatgagaactttcagcaagtgattgacagaacggtcagtttatatgaacagggaatggtgcagatgaccgtcaaagactatatgaggagtttacatcagtttagcgagaccccaatcctgagtaggggaaccagcttcaatagctgctatagtactgcctctgtgcctcagagtatccccgaatggcttgagttttgggaaatagaccccgtcgaaatactcctggacttggggtttggtgctgacgaacccgatatttgcatgcaaattcctgctcggtttcttggatgcgggtccgccgcaaggggaattaatatccgggtctttctcgaagcacagaagcaacggatggatatagagaatccaaacctctatggaaggtttagacagttggagatacttgaccatgtcactaacgctttttcttcactccttagtgacgtgagtatccttccaaaccgagccgaagaaaaggccggtggtgaaagcgttcagaggacttctgtgcagagcttcgaagaggaaactgggaatcccttggatatgaccagcggcacagtaggggcacgagtcgaccgcgctaactcctgtcaaagtgatagttctggattcctggaagaaccgctggaacctctccctctgcaaatgccttccctccccaatagccaaagccccgctgaaaacggcggacgcaaaccaagggatcaatcccattcgttagttagttcacaagactgtcagctggaaagtgatggccctgatagcaagtcccgcgcttcaatgagctttagcagtcaagaggcaaatgccctggaacagagggcttctgtgtcagtcatggaagaagagttcctgttggaagcaatggagggtcctccagaactatacataccggatatggcctgcgccaaaacaaccacccgaggtgagtgcccaagaaaagattcacacctctggcaattactacctatgccccacgcggaatatgaggttactagacctactgcaacctcaaaatacgaccatcctttgggcttcatggtcacacacgtaacagagatgcaagatagcttcgtgaggcccgagggagctggaaaagtccaatctcatcataacgaatctcagagatcccccggtaatgatcacacacaggataaattcctgcatgtcgattctgaggcacctagagaggaagagagctctgggttttgtccccatacgaatcactcactccttgtgcccgaatcatcttcccagtgcattcccaagcacagtgagatcaccccctacgccacagacctggcacagacctcagaaaaactgatcccacatctgcataagctgccgggagatcccgctcaagtgaagtctaggtcaggaaccctcggacagatccttcctgggactgaggccgaaatggaaaatttgcccctaaataccggctcctctcgctctgtgatgacccagatgtcaagtagtctggttagtgctgctcaacgggctgttgccctcggaacgggacccagagggacctcactggagtgcaccgtttgcgaccctgttaccgcaacggagacacgtttagggacaaaggccaggcagttaaacgacgctagcatccagacaagtgcactgagcaacaaaacactgacccacggccctcagccgttgaccaagtccgtaagtttagactccggttttagcagcatttgccccatgggcacgtgccacgccatcccggcacactgttgcatatgttgtcatcatcacccccattgtcacggagagcggcaatctccaggccctgaaccttcagtgtgtcgccactgtctgtgtagcctcacaggccatcaggaagcacagtttatgaccacgctgaaagctctgcaggacacaacagtgagagaactctgcagctgtacagtccacgagatggaagccatgaagacgatctgtcaaagcttccgtgaatacttggaagaaattgaacagcatctgatgggacagcaggctttgttttctcgagacatgtctgaagaggaaagggaagaggctgagcagttacaaacgcttcgagaggcattaaggcaacaggtggctgagctagaattccagctgggagatcgcgcacagcagatacgcgaggggatcttactccagctagaggtgctcactgccgagcctcctgaacactactcgaatctgcatcagtacaactggattgaggagagcaatgggcagacatcatgctccaaaattcacccagggatggccccacgaaccgttttccccccagatgacggccaggaggcaccatgcagtggcggtacacaattggctgccttcacgcctccaacacttgagaacagcaccaggatgtccccctcaagttccgcctgggccaaacttggacccaccccgctatcaaactgtcccgtcggcgagaaggatgccgatgttttcctgtag

SEQ ID NO: 258437 - DNA, 3135 bp, Artificial Sequence
  derived and/or modified sequence
atgatggcccagaaaagccaaggctctgacaacctgcaagaaggacaagaaaagtccaagagggagattctgaagtgtaccaaatcggcttgggctccattggacgagtggctgccccctgaccccgaggaggagtcacagtccctcaccatcccaatgctagaggactccaaacaagagtccatacagcagtggctggatagtggcttctttgtatctgctaacgaaaattttcagcaggtgatcgaccggacagtttcgctgtatgagcagggcatggttcagatgactgtcaaagactacatgagatcactccatcagttctccgagactcctatactgtcccggggaaccagtttcaatagctgttacagtacggcctctgtgccccagtccatcccagagtggctggagttctgggagattgaccccgtggaaattctgcttgacctaggttttggcgctgatgaacctgatatttgtatgcaaataccagcccgattcctgggatgtggaagcgcagctaggggcataaacatcagggtgtttttggaggcacagaaacaacgtatggatatcgagaatccaaatctgtacggccgatttcgccaattggaaatcttggaccacgttacaaacgccttttcttccctattgtccgatgtgtccatactccctaacagggccgaggagaaagctggaggagagagcgtgcagaggacatcagtgagtgctgcaaaggagcatagacgacgtatgggcaagctcctcaggcgggcttctaagcaaaatatcaggagggattgtaaccctgaagtttcagaaagctttaaggtcaaagatgaggtgttcgtacccttcaccaaaccatgggactgcggcgctgagctggcggctacatcgatcaaccataagcaaaatcacctgagcctatccgttgaacatcagagcctgcaagcctgtgatgacctgcttccttatccacctcacggtctgctaagcaaacagtggccttgcagctctatgccagcaaagcaggcccctccttcctgcgttagtgagggctcagtaaagggcagaacccagaaagagaacctttttcagacaaacaaactcaagagtttgtcccacctggctggcaagggaccggatagctttgaaatggaggaggttcagtcctttgaggaggagacaggaaatccgttggacatgaccagcggaacagtgggggcacgcgtggaccgggctaactcatgccagtccgactcctcaggcttcctcgaggagccgttagagccactacctctgcaaatgccttctctgcccaattcacagagtcccgctgaaaacggagggaggaagccacgggatcagagccactccctggtaagcagtcaggattgccagttggagtccgacggtcctgactctaaatcgcgagcctctatgagtttcagcagtcaggaagcaaacgccttagagcaaagagccagtgtctcggtgatggaggaggagttcttgctggaggcgatggaggggccacccgagctgtacattcccgacatggcctgtgcaaaaaccacaacacggggtgagtgccctcgcaaagattcacacctgtggcagctactccccatgccccacgcagaatacgaagtcactcgccctaccgcaacatctaagtacgatcatcccctgggctttatggttacccacgtcacagaaatgcaagattcgtttgtgcggcctgaaggcgctggaaaagtgcagtcgcaccataatgagtctcagcgcagcccgggaaatgaccacacacaggacaaatttttgcatgttgatagtgaggcccctagagaggaagaatctagcggattttgcccccatactaaccacagtctgctggtgcctgaatcctcaagtcagtgcatcccaaagcactcggagattacaccttatgccactgatctggctcagacttcagaaaaactcatacctcatttacacaagttacccggtgaccccgctcaagttaaatccaggtccgggacactcggtcaaatccttccaggcaccgaagccgagatggagaatctgccactcaataccggtagcagtagatctgtgatgacccagatgtcctcttccttggtctcagccgctcagcgcgctgtggccttaggcaccgggcctagaggaacgagcttggagtgcacagtctgcgaccctgtgaccgctacagaaacccgattgggaaccaaggccagacagctgaatgacgcctctatccagacctcagctctttccaataaaactctcacacacggcccacagccgcttaccaaatctgtctccctcgacagcggtttctcatctatctgtccgatgggcacatgtcacgccatcccagcacactgttgtatctgttgccatcaccatccccactgccacggtgagcggcagtccccagggcctgaaccctcagtttgcagacactgcttgtgcagtctgaccgggcaccaggaggctcaatttatgactaccttgaaggccttgcaggacacgacggtgcgggagctctgcagctgcaccgtccacgaaatggaagccatgaagactatttgccaatcttttcgcgaatacctggaggagattgagcagcacctcatgggacaacaagctctgttttcccgggacatgagtgaggaggagagggaagaagcggaacagctccagaccctgcgcgaagcacttcgccagcaagtcgccgagctcgagttccagttgggtgatcgggcacaacagattagggaggggatactgctccagctggaggtgctcaccgccgaaccgccagaacactattctaatctgcatcagtataattggattgaagagtcgaatggccaaaccagttgtagcaagatccaccccggtatggcacctcgtaccgtgtttcccccagatgatggccaggaggccccatgctcaggcggaacccagctagcagcttttacaccacccacattagagaactcaacacggatgtccccctcatctagcgcttgggcaaaattagggccaacaccgctgagcaattgcccagttggcgaaaaagatgctgatgttttcctctag

SEQ ID NO: 258438 - DNA, 429 bp, Artificial Sequence
  derived and/or modified sequence
atgatggcacaaaaaagccaaggctccgacaacctgcaggaggggcaggagaaaagcaagcgcgagatactcaagtgtaccaagtctgcctgggcaccactggatgagtggttgcctccagaccccgaagaggagtcccagtcccttacaatccctatgttggaggactcaaaacaggaatcaatccagcagtggctggacagtggcttttttgtgtctgcaaatgaaaactttcagcaagttatcgatcggacggtgtctctctacgagcaaggaatggtccaaatgacagtcaaagactatatgaggagcttgcaccagttttccgaaacgcctattttaagccgagggacttcattcaactcctgctacagcacggcctctgtgcctcaatcaatcccagagtggctcgagttttgggagatatag

SEQ ID NO: 258439 - DNA, 492 bp, Artificial Sequence
  derived and/or modified sequence
atgatggcccagaaaagtcaggggagcgataatctgcaggaaggacaagagaagtcgaaacgcgaaatcctcaagtgcacgaagagcgcgtgggctcccctggacgagtggctgccacccgatcccgaagaggagtcgcagtctctcaccattcctatgctagaggactctaaacaggaatcaatccagcagtggctggactccggtttctttgtgagtgccaatgagaatttccagcaggtgatagacagaacagtctctctgtatgagcaaggtatggttcaaatgacagtcaaagactacatgcgtagcctgcatcagttcagcgagacgccaattctatctcgtggtaccagctttaacagttgttactccaccgccagcgtaccacagtcaataccagagtggctggagttctgggaaatcgatcccgtggagattctgctggacctcggatttggcgctgatgaaccagatatctgtatgcagtag

SEQ ID NO: 258440 - DNA, 507 bp, Artificial Sequence
  derived and/or modified sequence
atgatggcacagaaatcacagggaagtgataatctgcaagaaggccaggagaagtcgaagcgtgaaattctgaagtgtactaagtctgcgtgggcccctctggacgaatggctgccccctgaccctgaagaagagagccagagcctgaccattcccatgttggaggactcaaaacaggaaagtatccagcaatggctggattctggcttctttgtgtccgctaatgaaaacttccaacaggtgatcgatcggaccgtgtctctgtacgagcagggaatggttcagatgactgtcaaagactacatgcgttccctgcatcagttctccgagaccccgattctctcgcgagggacttctttcaactcatgctactcaaccgcaagtgtgccacagtccattcctgaatggcttgagttctgggaaatcgacccagtagaaattctgctggacctgggcttcggcgctgacgaacccgatatctgtatgcagatccccgctagattctag

SEQ ID NO: 258441 - protein, 2083 aa, Artificial Sequence
  derived and/or modified sequence
MFSKKPHGDVKKSTQKVLDTKKDALTRLKHLRIVIENAESIDLKQFFDQHFSHIYYVFFENFVTIEASLKQKGHKSQREELDAILFIFEKILQLLPERIHQRWQFHSIGLILKKLLHTGNSLKIRREGVRLFLLWLQALQNNCSKEQLWMFSCLIPGFSAPQSEHGPRTLDNLINPPLNLQETQVTIEEITPLVPPQSGDKGQEDLTSYFLEALLKYIVIQVKSLEWKNKENQERGFSFLFSHFKKYYLPYIFPNICKENSLYHPILDIPQMRPKPHYVVIKKDAETNEAIYCTKEPFIKARVIVIRWLVSFWLEPKPHTGPHIPGMEGEVLPKNIQRAAASLVSREESKNDNADKTDRTTEPEQSHSNTSTLTEREPSSSSLCSIDEEHLTDIEIVRRVFSSKRSNVNFVTEIFRQAFLLPICEAAAMRKVVKVYQEWIQQEEKPLFMQEPEEIVITSSDLPCIENVTDHDISMEEGEKREEENGTNTADHVRNSSWAKNGSYQGALHNASEEATEQNIRAGTQAVLQVFIINSSNIFLLEPANEIKNLLDEHTDMCKRILNIYRYMVVQVSMDKKTWEQMLLVLLRVTESVLKMPSQAFLQFQGKKNMTLAGRLAGPLFQTLIVAWIKANLNVYISRELWDDLLSVLSSLTYWEELATEWSLTMETLTKVLARNLYSLDLSDLPLDKLSEQKQKKHKGKGVGHEFQKVSVDKSFSRGWSRDQPGQAPMRQRSATTTGSPGTEKARSIVRQKTVDIDDAQILPRSTRVRHFSQSEETGNEVFGALNEEQPLPRSSSTSDILEPFTVERAKVNKEDMSQKLPPLNSDIGGSSANVPDLMDEFIAERLRSGNASTMTRRGSSPGSLEIPKDLPDILNKQNQMRPIDDPGVPSEWTSPASAGSSDLISSDSHSDSFSAFQYDGRKFDNFGFGTDTGVTSSADVDSGSGHHQSAEEQEVASLTTLHIDSETSSLNQQAFSAEVATITGSESASPVHSPLGSRSQTPSPSTLNIDHMEQKDLQLDEKLHHSVLQTPDDLEISEFPSECCSVMAGGTLTGWHADVATVMWRRMLGILGDVNSIMDPEIHAQVFDYLCELWQNLAKIRDNLGISTDNLTSPSPPVLIPPLRILTPWLFKATMLTDKYKQGKLHAYKLICNTMKRRQDVSPNRDFLTHFYNIMHCGLLHIDQDIVNTIIKHCSPQFFSLGLPGATMLIMDFIVAAGRVASSAFLNAPRVEAQVLLGSLVCFPNLYCELPSLHPNIPDVAVSQFTDVKELIIKTVLSSARDEPSGPARCVALCSLGIWICEELVHESHHPQIKEALNVICVSLKFTNKTVAHVACNMLHMLVHYVPRLQIYQPDSPLKIIQILIATITHLLPSTEASSYEMDKRLVVSLLLCLLDWIMALPLKTLLQPFHATGAESDKTEKSVLNCIYKVLHGCVYGAQCFSNPRYFPMSLSDLASVDYDPFMHLESLKEPEPLHSPDSERSSKLQPVTEVKTQMQHGLISIAARTVITHLVNHLGHYPMSGGPAMLTSQVCENHDNHYSESTELSPELFESPNIQFFVLNNTTLVSCIQIRSEENMPGGGLSAGLASANSNVRIIVRDLSGKYSWDSAILYGPPPVSGLSEPTSFMLSLSHQEKPEEPPTSNECLEDITVKDGLSLQFKRFRETVPTWDTIRDEEDVLDELLQYLGVTSPECLQRTGISLNIPAPQPVCISEKQENDVINAILKQHTEEKEFVEKHFNDLNMKAVEQDEPIPQKPQSAFYYCRLLLSILGMNSWDKRRSFHLLKKNEKLLRELRNLDSRQCRETHKIAVFYVAEGQEDKHSILTNTGGSQAYEDFVAGLGWEVNLTNHCGFMGGLQKNKSTGLTTPYFATSTVEVIFHVSTRMPSDSDDSLTKKLRHLGNDEVHIVWSEHTRDYRRGIIPTEFGDVLIVIYPMKNHMFSIQIMKKPEVPFFGPLFDGAIVNGKVLPIMVRATAINASRALKSLIPLYQNFYEERARYLQTIVQHHLEPTTFEDFAAQVFSPAPYHHLPSDAGSYPEILPSETPTATQVDGADLASPMSPRTSKSRMSMKLRRSSGSANKS

SEQ ID NO: 258442 - protein, 2073 aa, Artificial Sequence
  derived and/or modified sequence
MFSKKPHGDVKKSTQKVLDTKKDALTRLKHLRIVIENAESIDLKQFFDQHFSHIYYVFFENFVTIEASLKQKGHKSQREELDAILFIFEKILQLLPERIHQRWQFHSIGLILKKLLHTGNSLKIRREGVRLFLLWLQALQNNCSKEQLWMFSCLIPGFSAPQSEHGPRTLDNLINPPLNLQETQVTIEEITPLVPPQSGDKGQEDLTSYFLEALLKYIVIQVKSLEWKNKENQERGFSFLFSHFKKYYLPYIFPNICKENSLYHPILDIPQMRPKPHYVVIKKDAETNEAIYCTKEPFIKARVIVIRWLVSFWLEPKPHTGPHIPGMEGEVLPKNIQRAAASLVSREESKNDNADKTDRTTEPEQSHSNTSTLTEREPSSSSLCSIDEEHLTDIEIVRRVFSSKRSNVNFVTEIFRQAFLLPICEAAAMRKVVKVYQEWIQQEEKPLFMQEPEEIVITSSDLPCIENVTDHDISMEEGEKREEENGTNTADHVRNSSWAKNGSYQGALHNASEEATEQNIRAGTQAVLQVFIINSSNIFLLEPANEIKNLLDEHTDMCKRILNIYRYMVVQVSMDKKTWEQMLLVLLRVTESVLKMPSQAFLQFQGKKNMTLAGRLAGPLFQTLIVAWIKANLNVYISRELWDDLLSVLSSLTYWEELATEWSLTMETLTKVLARNLYSLDLSDLPLDKLSEQKQKKHKGKGVGHEFQKVSVDKSFSRGWSRDQPGQAPMRQRSATTTGSPGTEKARSIVRQKTVDIDDAQILPRSTRVRHFSQSEETGNEVFGALNEEQPLPRSSSTSDILEPFTVERAKVNKEDMSQKLPPLNSDIGGSSANVPDLMDEFIAERLRSGNASTMTRRGSSPGSLEIPKDLPDILNKQNQMRPIDDPGVPSEWTSPASAGSSDLISSDSHSDSFSAFQYDGRKFDNFGFGTDTGVTSSADVDSGSGHHQSAEEQEVASLTTLHIDSETSSLNQQAFSAEVATITGSESASPVHSPLGSRSQTPSPSTLNIDHMEQKDLQLDEKLHHSVLQTPDDLEISEFPSECCSVMAGGTLTGWHADVATVMWRRMLGILGDVNSIMDPEIHAQVFDYLCELWQNLAKIRDNLGISTDNLTSPSPPVLIPPLRILTPWLFKATMLTDKYKQGKLHAYKLICNTMKRRQDVSPNRDFLTHFYNIMHCGLLHIDQDIVNTIIKHCSPQFFSLGLPGATMLIMDFIVAAGRVASSAFLNAPRVEAQVLLGSLVCFPNLYCELPSLHPNIPDVAVSQFTDVKELIIKTVLSSARDEPSGPARCVALCSLGIWICEELVHESHHPQIKEALNVICVSLKFTNKTVAHVACNMLHMLVHYVPRLQIYQPDSPLKIIQILIATITHLLPSTEASSYEMDKRLVVSLLLCLLDWIMALPLKTLLQPFHATGAESDKTEKSVLNCIYKVLHGCVYGAQCFSNPRYFPMSLSDLASVDYDPFMHLESLKEPEPLHSPDSERSSKLQPVTEVKTQMQHGLISIAARTVITHLVNHLGHYPMSGGPAMLTSQVCENHDNHYSESTELSPELFESPNIQFFVLNNTTLVSCIQIRSEENMPGGGLSAGLASANSNVRIIVRDLSGKYSWDSAILYGPPPVSGLSEPTSFMLSLSHQEKPEEPPTSNECLEDITVKDGLSLQFKRFRETVPTWDTIRDEEDVLDELLQYLGVTSPECLQRTGISLNIPAPQPVCISEKQENDVINAILKQHTEEKEFVEKHFNDLNMKAVEQDEPIPQKPQSAFYYCRLLLSILGMNSWDKRRSFHLLKKNEKLLRELRNLDSRQCRETHKIAVFYVAEGQEDKHSILTNTGGSQAYEDFVAGLGWEVNLTNHCGFMGGLQKNKSTGLTTPYFATSTVEVIFHVSTRMPSDSDDSLTKKLRHLGNDEVHIVWSEHTRDYRRGIIPTEFGDVLIVIYPMKNHMFSIQIMKKPEVPFFGPLFDGAIVNGKVLPIMVRATAINASRALKSLIPLYQNFYEERARYLQTIVQHHLEPTTFEDFAAQVFSPAPYHHLPSDAEERNAVIVLFLPKPPLENIGHLKAPTQRFYPVKLPQQRR

SEQ ID NO: 258443 - DNA, 6252 bp, Artificial Sequence
  derived and/or modified sequence
atgttctcaaaaaagccacacggcgatgtgaaaaagtctactcagaaggtgttggacaccaaaaaagatgcccttacccgactgaagcaccttcggattgtgattgagaacgctgagtccatagacctcaagcagttttttgatcagcattttagtcacatctactacgtcttctttgaaaatttcgtgacaattgaagcttctctgaagcagaagggacataaaagtcaaagagaagagttagatgccatacttttcatctttgaaaagatcttgcagcttttgccagaacgtatccaccagagatggcagttccattctatcggcctgattctgaagaagcttttacataccgggaactcactcaagatccggagggagggtgtacggctgttccttctgtggctgcaggctttacagaacaactgctccaaggagcagctctggatgttttcttgcttgatccctgggttcagcgccccccagagtgaacacggacccagaacccttgacaacctgatcaatcctcccctgaatctgcaagagacgcaagtcaccattgaagagattacccctcttgttccacctcagtccggagacaagggacaggaggacctgactagctatttcctcgaagctctcctgaaatacattgtgattcaggtgaagtctctggagtggaagaacaaggagaatcaggagcgagggtttagcttcttgtttagccacttcaagaagtactatttgccttacatctttcccaatatctgcaaggagaattcactatatcacccgattcttgatatcccccagatgcgccctaaaccacactatgtggttattaagaaagacgccgaaaccaacgaagctatatattgtaccaaggaacctttcatcaaagcacgcgttatcgtcatcagatggcttgtgagtttttggctggagcccaaaccacacactggcccccacatccctggcatggagggcgaagttttacccaagaacatccaacgagccgctgcatcactggtttcacgagaggaatccaagaatgacaatgccgataagacagacagaacaacagagcccgaacagtcccacagtaacaccagtaccctcaccgagagggagcctagtagtagcagcctttgtagcattgacgaggagcacctgacagatatcgagatcgttagaagggtgtttagttcgaagcggtctaatgtcaacttcgtgacagaaatctttaggcaggctttcctcttgccgatttgtgaggccgctgctatgcggaaagtcgtcaaggtataccaagagtggattcagcaggaggaaaagccactgttcatgcaggaaccagaggagatcgtgattacttcatcagaccttccctgtattgagaatgtgacagatcacgatatctcaatggaagaaggagagaagcgcgaagaggaaaacggaaccaataccgccgatcatgtacggaatagttcatgggcgaaaaatggatcctatcaaggcgctctgcataacgctagcgaggaggctacagaacaaaatatccgcgcgggcacccaggctgtgctacaggtatttattattaacagttctaacattttcttgctcgagccagccaacgaaatcaagaacttactggatgaacacactgatatgtgcaagaggattctgaacatttaccggtacatggtggtacaagtctcgatggataagaaaacgtgggagcaaatgttacttgtgctgctgcgcgtaaccgaatctgttctgaaaatgccatcccaggcgtttctacagttccaggggaagaagaacatgaccttggcggggcgattagctggtccgctgttccagacattaatcgtggcttggattaaagcgaatcttaatgtgtacatttcacgggagttatgggacgatttgcttagtgtcttaagtagcctgacttactgggaagagctagccactgagtggtcactcaccatggaaaccttaaccaaagtgctggcaagaaatctgtattcccttgacctgtccgacttgccactcgataagctcagcgaacaaaaacagaagaaacataaaggcaaaggggtggggcatgagttccaaaaagtgagcgtagataagagtttctcgagggggtggtccagagatcagcccggtcaggcccctatgagacaacggtcggctaccaccaccggcagtcccggaaccgagaaagcacggagtatagtccggcaaaaaactgtagatattgatgacgcacaaatcttaccaaggtcaactcgggtaaggcatttctcgcagtctgaggaaacaggcaacgaggtcttcggcgcactcaacgaggagcagcctctgcctcggtcctcatccacttcagacatccttgagccattcacggtggagcgggcaaaggtcaacaaggaggatatgtcacagaagttgcctccactgaactcagacattggcggctcttcagctaacgtcccggatctcatggacgaattcattgccgagaggctgcgcagcggcaacgccagtacaatgacccgacgggggtccagtcctggcagcctcgaaatccccaaagacctgcccgatattcttaacaagcaaaaccagatgaggccaatcgacgacccaggcgtgccgtcggaatggacctcgcctgccagcgccggcagtagtgatctcatcagtagcgacagccacagcgacagcttttccgctttccagtacgatggcaggaagttcgataactttggtttcggcacagataccggtgtaacctcatctgccgacgtggacagcgggagcggccaccaccagtcggcggaggaacaggaagtagcaagtttaacaaccctccatatcgattccgagaccagctcactgaaccaacaggctttcagcgccgaggtggccacgattaccggctcagagagcgcctctccagtccattctcctttggggagcagatcacagacacctagcccttccaccttgaatattgaccacatggaacagaaggatctgcaacttgacgagaagttacaccactcagtgctgcagaccccagatgatttagagatctccgaattcccatccgagtgttgttctgtcatggcggggggcacgctgacaggttggcacgcagacgttgcgaccgttatgtggcggaggatgcttgggatcctgggcgatgttaacagtatcatggatccagaaattcacgcccaagttttcgattacctgtgcgaattgtggcagaatctcgcaaagatcagggacaatctggggattagtacggataacctgacatctccctccccccccgtcctcattcctcctcttagaattttaactccttggttgttcaaagccacaatgttgacggataaatataaacagggcaagctccacgcctataaactgatctgtaatactatgaagcgtcgccaggacgtaagtcccaatcgcgattttctgacccatttctacaatattatgcactgtggattattgcatatcgatcaggacattgtgaataccataatcaagcactgcagcccccagttcttctcacttggcctcccaggggctaccatgctgatcatggattttattgtggctgccgggcgcgtggcctccagcgcattcctgaacgccccaagagtggaggcacaggtgctcttaggatccctcgtctgtttcccgaacctgtattgtgagttaccaagtctccaccctaatattccagacgtggcggtgagccaatttacagatgtgaaggaacttatcatcaaaacggtactaagctccgcgagagatgagccatctggcccagcacggtgtgtggccctttgctccctcgggatttggatctgcgaggagttagtccatgagtcccaccacccccagatcaaagaagccctgaatgttatatgcgtcagcctcaagttcacaaacaaaacagtggcacatgtggcctgcaacatgcttcacatgctcgtccactacgtccctcggctgcaaatctatcaacctgattcacctctgaagatcatacagatcctgatcgccacaattacccatcttttgccgagcacagaggcctcttcctacgagatggataaacgactggttgtctctctgttgctgtgcctgctagattggattatggcccttcctctgaagacactattgcagcctttccatgctactggcgccgagtctgacaagaccgaaaagagcgtgctgaactgcatttacaaggtactgcatggatgcgtgtacggcgcccaatgcttttccaacccacgttatttcccaatgtctctctcagacttggcttctgttgactatgatccgttcatgcatctggaaagcctgaaggagcctgagccactccactccccagactccgaacgatcctcgaaactgcagccagtgactgaggttaagactcagatgcagcacggacttatctcaatcgccgctcgaacagttattacgcatctcgtcaaccatctgggccattatcccatgtccggcggcccggccatgctaacttcacaggtgtgtgaaaatcatgacaaccactactcggaaagcactgaattatcgcctgagctgttcgagtcaccaaacatccagttcttcgttcttaacaacacaacactggtgtcatgtattcagatcaggtctgaggagaacatgcctggaggcgggctgtccgctgggctggcgtcagctaatagcaacgtgcgcattatcgttagggatttgtccgggaagtactcctgggactcggctattttgtatggcccaccaccggtaagcggtctgagtgaacctacctcttttatgctgtctctgtcacaccaagaaaagcccgaggaaccccccaccagtaatgaatgccttgaggatattaccgtgaaggacggtctaagcttgcaattcaaaaggttccgggagacagtaccaacctgggacactatccgcgacgaggaggacgtgttggatgaactactgcagtacctcggtgtaacgtcaccagaatgcttacaacggacagggatctccctgaacatccctgcccctcaaccggtctgtatttccgaaaagcaggagaacgatgttattaatgcgatcctgaagcagcacacagaggagaaagaattcgttgagaagcactttaatgaccttaacatgaaggccgttgaacaagatgagcctataccacaaaagccccagtccgccttctattattgtagactcctactgtcaattcttgggatgaactcctgggacaagagacgatcctttcacctgctgaaaaaaaatgaaaagctgctacgggaactgaggaacctggattcaaggcagtgtcgggagacccataagattgcagtcttctatgtcgccgagggacaagaagacaagcattccatcctcacgaacactgggggatcccaggcatacgaagacttcgtggcaggcttaggctgggaggttaatctgacaaaccattgtggattcatggggggactgcagaagaataaatctacaggactgaccaccccatattttgcgaccagcacagtggaggtcatttttcacgtgtcaaccagaatgccttccgatagtgatgacagcctcacaaaaaaactccggcatctaggcaatgatgaagtgcatatcgtctggagcgagcacacaagggactataggcggggcatcattcctaccgaattcggtgatgtactgattgtaatttatccaatgaaaaaccacatgttttctattcagattatgaaaaaacccgaggtccctttcttcgggccactctttgacggagcaatagtgaacggtaaagtgttgcccatcatggtgagggctacagcgataaatgcttccagagccctcaaaagtctcattccactgtaccagaacttttacgaagaacgcgcgcgctatcttcagacaatcgtacagcaccacctggagcccacaactttcgaagatttcgccgcccaggtttttagtccagcaccttaccaccatctgcccagcgatgcagggtcataccccgagatacttccctccgaaacccccacagccacccaagtggatggggcagatttagcaagcccgatgagtcctcgtacttctaagtcacgcatgtccatgaaacttcgacgcagtagtggctcagctaacaagagttag

SEQ ID NO: 258444 - DNA, 6252 bp, Artificial Sequence
  derived and/or modified sequence
atgttcagcaagaagccccatggagatgtgaagaagagcacccagaaggtgctggacaccaagaaggatgccctgacccggctgaagcacctgagaattgtgattgaaaatgctgagagcattgacctgaagcagttctttgaccagcacttcagccacatctactacgtgttctttgagaactttgtgaccatcgaggccagcctgaagcagaagggccacaagagccagcgggaggagctggatgccatcctcttcatctttgagaagatcctgcagctgctgcctgagcgcatccaccagcgctggcagttccacagcatcggcctcatcctgaagaagctgctgcacacaggcaacagcctgaagatcagaagagagggcgtgcggctcttcctgctgtggctgcaggccctgcagaacaactgcagcaaggagcagctgtggatgttcagctgcctgatccctggcttcagcgccccccagagcgagcacggccccaggaccctggacaacctgatcaacccccccctgaacctgcaggagacccaggtgaccatcgaggagatcacccccctggtgcccccccagagcggggacaagggccaggaggacctgaccagctacttcctggaggccctgctgaagtacatcgtcatccaggtgaagagcctggagtggaagaacaaggagaaccaggagcggggcttctccttcctgttcagccacttcaagaagtactacctgccctacatcttccccaacatctgcaaggagaacagcctgtaccaccccatcctggacatcccccagatgaggcccaagccccactacgtggtgatcaagaaggatgctgagaccaatgaggccatctactgcaccaaggagcccttcatcaaggcccgggtcatcgtcatccgctggctggtgtccttctggctggagcccaagccccacacaggcccccacatccctggcatggagggggaggtgctgcccaagaacatccagagagctgctgccagcctggtgtcccgggaggagagcaagaatgacaatgctgacaagacagacaggaccacagagcctgagcagagccacagcaacaccagcaccctgacagagcgggagcccagcagcagcagcctgtgcagcattgatgaggagcacctgacagacatcgagatcgtgcggcgggtcttcagcagcaagaggagcaatgtgaactttgtgacagagatcttccggcaggccttcctgctgcccatctgtgaggccgccgccatgaggaaggtggtgaaggtgtaccaggagtggatccagcaggaggagaagcccctcttcatgcaggagcctgaggagatcgtcatcaccagcagtgacctgccctgcattgaaaatgtgacagaccatgacatctccatggaggagggggagaagcgggaggaggagaatggcaccaacacagctgaccacgtgaggaacagctcctgggccaagaatggcagctaccagggcgccctgcacaatgccagcgaggaggccacagagcagaacatccgggccggcacccaggccgtgctgcaggtgttcatcatcaacagcagcaacatcttcctgctggagcccgccaatgagatcaagaacctgctggatgagcacacagacatgtgcaagaggatcctgaacatctaccgctacatggtggtgcaggtgtccatggacaagaagacctgggagcagatgctgctggtgctgctgcgggtgacagagagcgtgctgaagatgcccagccaggccttcctgcagttccagggcaagaagaacatgaccctggccggccgcctggccggccccctcttccagaccctgattgtggcctggatcaaggccaacctgaatgtgtacatcagccgggagctgtgggatgacctgctgtctgtgctgagcagcctgacctactgggaggagctggccacagagtggagcctgaccatggagaccctgaccaaggtgctggccaggaacctgtacagcctggacctgagtgacctgcccctggacaagctgtctgagcagaagcagaagaagcacaagggcaaaggagtgggccacgagttccagaaggtgtctgtggacaagagcttcagccggggctggagccgggaccagcccggccaggcccccatgaggcagaggtctgccaccaccaccggcagccctggaacagagaaggcccggagcatcgtgcggcagaagacagtggacattgatgatgcccagatcctgcccaggagcaccagggtgcgccacttcagccagagcgaggagactggaaatgaggtgtttggagccctgaatgaggagcagcccctgcccaggagcagcagcaccagtgacatcctggagcccttcaccgtggagcgggccaaggtgaacaaggaggacatgagccagaagctgccccccctgaacagcgacatcggcggcagcagcgccaacgtgcctgacctgatggatgagttcatcgccgagcggctgcggtctggaaatgccagcaccatgacccggcggggcagcagccctggcagcctggagatccccaaggacctgcctgacatcctgaacaagcagaaccagatgaggcccattgatgatcctggggtgcccagcgagtggaccagccctgccagcgctggcagcagtgacctgatcagcagtgacagccacagcgacagcttcagcgccttccagtatgatggcaggaagtttgacaactttggatttggaacagacacaggagtgaccagcagcgcagatgtggacagcggcagcggccaccaccagagcgctgaggagcaggaggtggccagcctgaccaccctgcacatcgacagcgagaccagcagcctgaaccagcaggccttctctgctgaggtggccaccatcaccggcagcgagagcgccagccctgtgcacagccccctgggcagccgcagccagacccccagccccagcaccctgaacatcgaccacatggagcagaaggacctgcagctggatgagaagctgcaccacagcgtgctgcagaccccagatgacctggagatcagcgagttccccagcgagtgctgcagcgtgatggccggcggcaccctgaccggctggcacgcagatgtggccaccgtgatgtggaggaggatgctgggcatcctgggagatgtgaacagcatcatggaccctgagatccacgcccaggtgtttgactacctgtgtgagctgtggcagaacctggccaagatccgggacaacctgggcatcagcacagacaacctgaccagccccagcccccctgtgctgatcccccccctgcgcatcctgaccccctggctgttcaaggccaccatgctgacagacaagtacaagcagggcaagctgcacgcctacaagctgatctgcaacaccatgaagaggcggcaggatgtgagccccaacagagacttcctgacccacttctacaacatcatgcactgcggcctgctgcacatcgaccaggacatcgtgaacaccatcatcaagcactgcagcccccagttcttcagcctgggcctgcccggggccaccatgctgatcatggacttcatcgtggccgccggccgggtggccagcagcgccttcctgaatgccccccgggtggaggcccaggtgctgctgggcagcctggtgtgcttccccaacctgtactgtgagctgcccagcctgcaccccaacatcccagatgtggccgtgtcccagttcacagatgtgaaggagctgatcatcaagacagtgctgagcagcgccagagatgagcccagcggccctgcccgctgtgtggccctgtgcagcctgggcatctggatctgtgaggagctggtgcatgagagccaccacccccagatcaaggaggccctgaatgtcatctgtgtgtccctgaagttcaccaacaagacagtggcccacgtggcctgcaacatgctgcacatgctggtgcactacgtgccccggctgcagatctaccagcctgacagccccctgaagatcatccagatcctgattgccaccatcacccacctgctgcccagcacagaggccagcagctatgagatggacaagaggctggtggtgtccctgctgctgtgcctgctggactggatcatggccctgcccctgaagaccctgctgcagcccttccacgccaccggggctgagagtgacaagacagagaagtctgtgctgaactgcatctacaaggtgctgcacggctgtgtgtatggagcccagtgcttcagcaacccccgctacttccccatgagcctgagtgacctggcctctgtggactatgaccccttcatgcacctggagagcctgaaggagcctgagcccctgcacagcccagattctgagaggagcagcaagctgcagcctgtgacagaggtgaagacccagatgcagcacggcctcatcagcattgctgccaggacagtcatcacccacctggtgaaccacctgggccactaccccatgtctgggggccctgccatgctgaccagccaggtgtgtgaaaatcatgacaaccactacagcgagagcacagagctgagccctgagctgtttgagagccccaacatccagttctttgtgctgaacaacaccaccctggtgtcctgcatccagatccgctctgaggagaacatgcctgggggcggcctgtctgctggcctggccagcgccaacagcaatgtgcgcatcatcgtgcgggacctgagcggcaagtacagctgggacagcgccatcctgtatggccccccacctgtgtctggcctgtctgagcccaccagcttcatgctgagcctgagccaccaggagaagccagaggagccccccaccagcaatgaatgtctggaggacatcaccgtgaaggatggcctgagcctgcagttcaagcgcttccgggagaccgtgcccacctgggacaccatcagagatgaggaggatgtgctggatgagctgctgcagtacctgggcgtgaccagccctgagtgcctgcagaggacaggcatcagcctgaacatcccagccccccagcctgtgtgcatcagcgagaagcaggagaatgatgtgatcaatgccatcctgaagcagcacacagaggagaaggagtttgtggagaagcacttcaatgacctgaacatgaaggctgtggagcaggatgagcccatcccccagaagccccagagcgccttctactactgccgcctgctgctgagcatcctgggcatgaacagctgggacaagaggaggagcttccacctgctgaagaagaatgagaagctgctgcgggagctgaggaacctggacagccggcagtgccgggagacccacaagattgctgtgttctacgtggccgagggccaggaggacaagcacagcatcctgaccaacacaggaggcagccaggcctatgaggactttgtggccggcctgggctgggaggtgaacctgaccaaccactgcggcttcatgggcggcctgcagaagaacaagagcacaggcctgaccaccccctactttgccaccagcacagtggaggtgatcttccacgtgtccaccaggatgcccagcgacagtgatgacagcctgaccaagaagctgcggcacctgggcaatgatgaggtgcacatcgtgtggagcgagcacacccgggactaccgccggggcatcatccccacagaatttggagatgtgctgattgtcatctaccccatgaagaaccacatgttcagcatccagatcatgaagaagccagaggtgcccttcttcggccccctgtttgatggagccatcgtgaatggcaaggtgctgcccatcatggtgcgggccacagccatcaatgccagccgggccctgaagagcctcatccccctgtaccagaacttctatgaggagcgggcccgctacctgcagaccatcgtgcagcaccacctggagcccaccacctttgaagattttgctgcccaggtgttcagccctgccccctaccaccacctgcccagtgatgctggcagctacccagagatcctgcccagcgagacccccacagccacccaggtggatggagctgacctggccagccccatgagccccaggaccagcaagagcaggatgtccatgaagctgcggcgcagcagcggcagcgccaacaagagctag

SEQ ID NO: 258445 - DNA, 6252 bp, Artificial Sequence
  derived and/or modified sequence
atgttcagcaagaagccccacggcgacgtgaagaagagcacccagaaagtcctggataccaagaaggatgcactcacacgcctgaaacacctgcgcattgtcatcgagaatgcggaatccatcgatctgaagcagttttttgaccagcatttttcgcatatctattacgtattctttgagaacttcgttactatcgaagcctccctgaagcagaagggacataagagccaaagggaggagctagacgccatactctttatttttgagaagattcttcagctcctgcccgagagaatacaccagcggtggcagttccactcaatcgggctgatcctcaagaagctcctgcataccggaaacagcttgaagataaggcgcgagggcgtacggttgtttcttctgtggctgcaggcattacaaaacaattgttcaaaagagcagctgtggatgttctcctgcctgatccccggcttctcagcaccacagagcgaacacggaccacgcaccctggataatctaatcaaccctccactcaatctgcaagagacacaggtgactatagaggagatcactcctctggttccaccacaaagtggcgataaaggtcaggaggatctcacaagctactttctcgaggccctgcttaagtacatagttattcaggtgaaatcccttgagtggaagaataaagaaaaccaggagagggggttctcttttctatttagccactttaagaagtactacctcccctacatctttcccaatatttgcaaggagaattctctgtaccatcccatcctggacatcccccagatgcggcctaaaccccactacgtcgtcattaagaaagatgcggaaacaaacgaggcgatttattgcactaaggaacccttcatcaaggcacgcgtcatcgttattcgctggctggtgtctttttggctcgagcccaagccccacaccggaccccatatccctggaatggagggagaagttctaccgaagaatatacagcgagctgccgcttcacttgtctccagggaagaaagtaagaacgataatgctgacaagaccgatcggaccaccgaacctgaacaatcacactcgaacaccagcactcttacagagagggaaccctctagctcttccctctgcagtattgatgaggagcacctaactgatattgagatcgttaggcgggtgttctcctccaaaagatcaaacgtaaactttgtcacagaaatcttccgacaggccttcctgctgcctatctgcgaagcagcagccatgcgtaaagtggtgaaagtgtatcaggaatggatccaacaagaagaaaaaccgctgtttatgcaggagcccgaggagattgtaatcacgtcttctgatttgccctgtattgagaacgtcacggaccacgatatttcaatggaggaaggggaaaagcgagaagaggagaacggtaccaacactgctgatcatgtgcgaaactcttcctgggccaaaaatggcagctatcaaggggcgttacacaacgcttctgaggaagccacggaacagaatattagggccgggactcaagccgttctgcaggttttcattattaactcctccaacatcttcctgctggagccagcaaatgagatcaaaaacctgctcgacgaacataccgatatgtgtaagagaattttgaatatatataggtacatggtggttcaagtatcaatggacaagaagacttgggagcagatgctgctggtcctgctcagagtgacagagtcggtcctgaaaatgccatcccaggcttttctccaattccagggcaaaaagaatatgactctggccgggaggttagctggcccacttttccagaccctgatcgtggcctggatcaaagccaacctgaacgtctatatctctcgggaactctgggacgaccttctaagcgtcctgagctccctaacatactgggaggaactggcaacggaatggagtctgacaatggagaccctgaccaaggtcttagctaggaatctgtattctctcgatctgtccgacctaccccttgacaaactgtccgaacaaaaacagaagaagcacaagggcaagggtgtgggccacgagttccaaaaggtaagcgtggataagtcattcagcagaggatggtcacgcgaccagcccgggcaggcgccaatgcgccaaagatccgctactacaactgggtctcctgggaccgagaaggcccggtctatagtgcgccagaagaccgtggacatcgacgatgcccaaatccttcctcgatccacacgtgtgcgacacttctcccagtctgaagagacagggaacgaggtatttggcgcacttaatgaggagcagcctttaccaaggagcagttccacttctgacatcctggaaccctttaccgtggagcgggccaaggttaacaaggaagatatgtcccagaaactccctccgctgaactctgatattggtgggagctctgccaatgtcccagacctgatggacgagttcattgcggagcgtttacgatcaggtaacgcctccacaatgactcgcagagggtcatctcctggcagcctcgagatcccgaaggacctgccggatattctcaataagcaaaaccagatgcggccaatcgacgacccaggcgtgccatctgagtggacgtcacccgcgagcgccggaagcagtgatctgatctcatcagacagccactctgacagcttcagcgcgtttcagtacgatgggcgaaagttcgacaacttcgggtttggcaccgacacaggcgttacctccagtgcagatgtcgactccggcagcggacatcatcagtcagctgaggaacaggaggtggcttcattgactactctgcatatcgactccgaaacatcctctctaaatcagcaggccttctccgcggaagtagcgacaattacggggtccgagtcggcatctcccgttcattccccactgggcagcaggtctcaaacgcctagccccagcaccttgaacattgaccacatggagcagaaagacctgcagcttgacgagaagttacaccactctgtccttcagacccccgacgatctggagattagtgaattcccctcggaatgctgcagcgttatggccggtggcaccttgacggggtggcacgctgacgtggccaccgtaatgtggcgcagaatgctgggtatattaggagacgtgaattccataatggatccagagatccacgcccaggtgttcgattatctctgcgagttgtggcagaatctggccaagattcgcgataacctgggtatatccacagacaaccttacatcgccatccccacctgtgctgattcctcctctgaggatcctgaccccctggctcttcaaggcgacaatgttgaccgataagtataagcagggaaaattgcacgcatacaagctcatttgcaacactatgaaaagaagacaggacgttagtcctaaccgggatttcctgacgcatttttacaacatcatgcattgtggtttactgcacattgatcaggacatcgtcaacacgataatcaagcactgtagtccccagttctttagtcttggcctgccaggtgcgactatgctgattatggactttattgtggccgcgggtagggttgctagctcagccttcctcaacgcccccagagtagaagcacaagtcctcttgggaagcctagtttgcttcccaaacttatattgcgagctgccctcgctccaccccaatattcctgatgtggctgtgtctcagttcaccgacgtcaaagaactcatcatcaaaaccgtgctgtcgagcgccagagacgagccttcaggccccgctaggtgcgtggcgttgtgttctttggggatttggatctgtgaggagttggtgcacgaaagccatcatcctcagattaaagaggcactgaacgttatctgcgtgtctcttaagtttacgaataaaactgtggctcacgtggcttgcaacatgttgcacatgttagtccactatgtaccacggcttcagatctaccagcccgatagtcccttgaagattattcaaatccttatagctaccattacacacctcctcccttccaccgaggcgagttcttatgaaatggacaagcgcctggttgtaagtctactgctgtgtctgttggattggatcatggcactgcctctgaaaacactgttgcagccatttcacgctacgggggcagagtccgataagactgagaaaagcgttctgaactgcatctataaggtgctgcacggttgtgtctatggggcacaatgcttttcaaacccaagatacttccctatgtctctatccgatttagcctcagtcgattacgatcctttcatgcatctggaatctttaaaggagccagagcccttgcattctcccgatagcgaaaggtcctctaagctgcagcctgtcaccgaagtcaagactcagatgcagcatggactgatcagcattgcggctaggactgtcatcacgcatctcgtcaaccaccttggacactaccctatgtctggcggccccgctatgttaacgtcgcaggtctgtgagaaccacgataatcactacagcgaatctactgagctctcacccgaactttttgaatcgcccaacattcagtttttcgttcttaataatacgacgttggtgagttgcatccagatcagatccgaggaaaatatgcccggcggcgggctctctgccggcttggcatccgccaactccaacgtgcgcattatagtgagggacttgagcgggaagtacagctgggacagtgccatcctctacggacctcctcccgtgagcgggctgtcagagcccacatcattcatgctcagcctgtcacatcaggagaagccagaggaacccccaacgtccaacgagtgtctggaagatatcactgttaaggacggactgagcttacaatttaagagattccgggaaactgtgcctacttgggataccatccgggatgaggaggatgtactggatgaattattgcaatatctcggcgtaacttcccccgagtgcttgcagaggacaggcatctctcttaacatccccgcgccccagccagtctgcatttctgaaaagcaggagaatgacgtgataaatgccattctgaagcaacacactgaagagaaggagtttgtggagaagcatttcaacgatttgaacatgaaagctgtcgagcaggatgagcccattcctcagaagccacagagcgctttttactactgcaggcttctgctctctattctcggcatgaactcttgggacaaaaggaggtcattccatctgctgaaaaaaaacgaaaaacttctcagagagcttagaaatcttgattcccgccaatgccgagaaacgcataaaatcgcggtgttctatgtcgctgaaggacaggaagacaaacacagcattctgactaatacaggagggtcccaagcctacgaagacttcgtagcaggtctgggctgggaggttaacctcaccaatcactgcgggtttatgggcgggctgcaaaagaataagtctacagggctgacaactccctacttcgccacaagtacagtggaggtgatttttcacgtgtccaccagaatgcccagcgatagcgatgattcactgactaagaagctgagacatctcggcaacgatgaagtgcatattgtctggtctgagcacactcgggactacaggaggggaatcatccctaccgagttcggcgacgtcttgatcgtcatttacccaatgaaaaaccacatgttctctatccagattatgaagaaaccagaggttccattctttgggcccctgttcgacggcgccatcgttaatggaaaagtcctgccaatcatggtcagggctactgctatcaatgctagtcgagctctcaaaagtcttattccactgtaccagaatttttacgaagagagggctcggtacctccagacaatcgtgcagcaccacctcgaaccaaccacctttgaagacttcgcagcacaagtgtttagccctgcaccgtaccatcatctgccctctgacgccggctcgtacccggaaattctgcctagcgagactcccaccgccacccaggtagacggagcggacctggcgtcccctatgagccctcggacttctaaatcccgaatgagcatgaagctgcggcgcagctctggctctgcaaacaagagttag

SEQ ID NO: 258446 - DNA, 6252 bp, Artificial Sequence
  derived and/or modified sequence
atgttctccaagaagcctcatggagatgtaaagaaatctacccaaaaagtgctcgatacaaaaaaggacgctctgacccggctaaagcacctaagaatcgtcatcgagaacgcagagagtatagacttaaaacagttttttgatcagcacttctcgcacatctactacgtgttcttcgagaatttcgtgactatcgaagcctctcttaaacagaagggacataagagtcagcgggaagagctggatgcaatactgtttatattcgagaaaattctccagttgctccccgagagaatccaccaacgctggcagttccacagcattggacttatcctgaaaaaacttctgcatactggaaactctctcaaaatccgcagggagggggtgcgcctgttcttgctgtggctccaggccctgcagaacaactgcagcaaagagcagctgtggatgttcagctgtttaatccctgggttctctgcgcctcaatccgaacacgggcctagaacccttgataacctcatcaatcctcccttaaatttacaagagactcaggtgacaattgaagagattactccactggtccccccacagtcgggtgataaggggcaagaagacttaactagttattttctggaagcactcctgaagtacatcgttattcaggttaaatctctggagtggaaaaacaaggaaaatcaagagcgtggcttttcatttctgttctcccatttcaaaaagtattacctgccatatatcttccctaacatttgcaaggaaaattccctgtaccaccctatactagatatccctcaaatgagacccaaaccccattatgtggtgattaaaaaagacgccgagaccaatgaggctatctactgcaccaaagaaccttttataaaggcgcgagttatcgttatacgatggcttgtgtccttctggctcgaacccaaaccccacactggcccacacatccccggaatggagggtgaggtgctgcccaaaaatatccaacgcgcagcggcttccctcgtttcccgggaggagtccaagaacgacaacgctgacaagaccgaccgaacaaccgagcccgagcagtctcatagtaacactagtacactgacggaacgggagcccagtagctccagcctctgctccatcgatgaggagcatctgacagacatagaaatcgtgaggcgggtgttctcttcaaagcgcagcaatgtgaacttcgtcactgaaatctttcgccaggctttcctgcttcccatttgcgaggctgcagctatgcgaaaggtcgttaaggtgtatcaggagtggatccaacaggaggagaaaccattgtttatgcaagagccagaagagatagtgattacgagcagcgatctgccctgtatcgagaacgttactgaccatgatatcagtatggaagagggggaaaagcgggaagaagaaaacgggaccaacacagcagatcacgtccgcaatagctcatgggccaagaatggcagctaccaaggcgcactgcacaacgctagcgaggaagccacggagcagaacatacgtgccggtacacaggccgtcctccaggtcttcatcattaactcctctaatatttttctgttggagccagcaaatgaaatcaaaaatcttctggacgaacacacagatatgtgtaaacgcatactgaatatttaccggtacatggtggtgcaggtgagcatggacaagaaaacttgggagcagatgctcctggttctgctgagggtgaccgaaagcgtgcttaagatgccttcacaggcctttctgcagtttcaaggaaagaaaaatatgactcttgccggaagactggccggtcctctttttcagaccctgatagttgcctggattaaggctaatctgaatgtctatattagccgtgaactctgggatgacctactctccgtgctcagctcactgacttactgggaggaactggctaccgagtggtctttgacaatggagacgctgactaaggttttagctcgcaatttgtactcgcttgacctgtcagatttacctctggacaagcttagcgagcagaagcagaaaaaacataagggcaagggagttggacacgagtttcagaaagtgtccgttgataaatcattcagcagaggttggagtagagaccagccgggacaggctcctatgaggcagcgcagcgcaacgacaactgggtcccctgggacagaaaaagccaggtctatagtgaggcagaaaaccgtggacattgacgacgctcagatcctgccaagatctacccgcgtaaggcacttctcccaatctgaggaaactggtaatgaagtattcggagctctcaacgaagagcagcccctccctagatcatctagcacatcagacatcctggaaccatttacagtcgaaagagccaaggtaaataaagaggacatgtctcagaagctgccccctctcaatagcgacatcggagggtctagtgcgaacgtgcctgacctcatggatgagttcattgccgagcgcctccggtccggtaatgccagtacgatgactagacggggaagcagccccggaagcctggagattccaaaggacctccctgatatcctgaacaaacaaaaccagatgaggccaatcgatgaccctggcgttccttccgaatggacttcgccagcatcagccggtagtagcgacctcattagcagcgatagtcactcggactccttcagtgctttccagtacgatggaaggaaatttgacaacttcgggttcggcacggatactggagtaactagcagtgctgacgtagactccggcagcggacaccaccagtcggccgaagaacaggaggtggcttccctcacgacactgcacattgactctgagacgtcctctctgaatcagcaggccttctctgccgaggtcgccacgattactggttcggaatcagcttctcctgtgcactcgcctctgggttccaggagccaaaccccatccccatccacactcaacatcgatcacatggaacagaaggatcttcagcttgacgaaaagctgcaccactctgttctccaaacgcccgacgacctggagatctccgagttcccatccgaatgttgttctgttatggcagggggaacactgaccggctggcatgctgacgttgccaccgtcatgtggcggaggatgttgggaatcttaggcgatgtgaactctatcatggatcccgagattcatgctcaagttttcgactacctctgtgagctgtggcagaacctggccaagatccgcgataacctggggatcagtactgacaaccttaccagtccttcaccgccagtgcttatccccccactgagaatcctgacaccatggcttttcaaagcgaccatgcttactgacaaatacaaacaagggaagcttcatgcttataagctgatctgcaacaccatgaaaaggagacaggacgtcagtcccaatcgggatttcctgactcacttctataatataatgcattgtgggctcctgcatatcgaccaagacatcgttaacaccatcatcaagcactgctcccctcagtttttctccttgggtctgcctggcgcaaccatgctcatcatggacttcatcgtcgcagctggccgagtggccagcagcgcatttctgaatgcacccagggtggaggcgcaagtgcttctaggctccctggtgtgctttccaaacttgtactgtgagttgccctcgctgcatccaaatataccagacgttgcagttagtcagttcaccgacgttaaggagctgattataaaaactgtgctgagctcagcgagggacgaaccctccggccctgccagatgtgtggcactctgcagtttagggatttggatttgcgaagaattagttcacgagtctcatcatccacaaattaaggaggccctgaatgtaatttgtgtctctctgaaattcaccaacaagacagttgcacatgtggcatgcaatatgcttcacatgctcgtacactacgtgcctcggctgcagatttaccagcccgattcccccctgaaaatcatccagatattgatcgctaccatcactcacctgctcccctctactgaggccagttcttatgagatggataaaagactggtggtgtcactcttactctgcctgttagactggatcatggctctacccttgaaaacactgctgcagcctttccatgctaccggggctgagtcggacaaaacagaaaaatcggtgctgaattgtatatataaagttctccacggctgcgtatatggcgctcagtgcttctctaaccccaggtatttcccgatgtccttaagcgacctggcctcagtggactatgacccttttatgcacctagagtcactcaaagaacccgaaccgctgcacagtccagacagcgaacggagctccaaattgcaaccagtgaccgaggtgaaaacccaaatgcagcacggcctcatttctatcgccgctagaaccgtgatcacccacctagttaaccacctaggacattacccaatgtccggcggtccagccatgcttacctctcaggtgtgcgaaaaccacgataatcattatagtgagagtactgaactgtctcccgaacttttcgagtcgcctaatatccagtttttcgtactcaataacacaacactcgtgtcgtgtattcagatccggtctgaggaaaatatgcccggtggcggtctctcagccggactggcatccgccaattcaaacgtgagaatcattgttagagacctgagcggcaagtattcttgggatagcgcaatcctatacggtcccccaccggtgtctggactttcggaacccacatcatttatgttatccctatcacatcaggagaagcctgaagaacctccaacgtccaacgagtgtctggaagacatcacagtgaaagacgggttgagcctgcagttcaagaggtttagagagactgtgccaacatgggataccattcgtgacgaggaggacgtcttggatgagctgcttcaatacctcggggttacttcccctgaatgcctccagcggactggcatctctctcaacattcctgcccctcagcctgtctgcatcagcgagaaacaggagaacgatgtgatcaatgccatacttaagcagcacacagaagagaaggaatttgtggagaaacacttcaatgatctcaacatgaaggccgtcgagcaggacgaacccatcccccaaaagccccaatccgctttctactactgtaggctgttgctgtcgattctgggcatgaactcgtgggacaaaaggcgaagcttccacctccttaagaagaacgaaaaacttttgagggaactgcggaacttagattctagacagtgccgggagacccataagattgcagtcttctatgtggccgagggacaggaagacaaacactcaatccttacgaataccggcggtagccaagcatatgaggattttgtcgcgggacttggctgggaggtgaatttaactaatcactgcgggttcatgggcggtctgcagaaaaacaagtctactggattaactaccccctacttcgctacgtctaccgtggaggtcatctttcacgtatctacaagaatgccctctgattctgacgatagcttgactaagaagctgcgacatctcgggaatgatgaagttcacattgtatggtcagagcacacaagagattataggcgaggcattattccaactgagttcggcgatgtgctgatagttatttatcccatgaaaaatcacatgttcagcatccagattatgaaaaagcccgaggtaccatttttcggccctttgttcgacggcgctatcgtgaacggaaaggtactccctatcatggtgagggccacagcaataaatgcttctagagccttaaagagcctcatcccactgtatcaaaatttctacgaggagagggccaggtacctgcagacaattgtccagcaccatctcgagccgactacctttgaggattttgctgcccaggtattctctcccgcaccataccaccatcttcctagtgatgccggtagctatccagagatattgccaagcgagactccaactgcaacccaggtggatggcgctgatctggcatccccaatgtcacctaggacctctaagtcccgtatgtctatgaaacttcggagatccagtggcagcgccaataaatcctag

SEQ ID NO: 258447 - DNA, 7911 bp, Artificial Sequence
  derived and/or modified sequence
atcactaccacactcgtctccgtttcggcctctgcagggtgtaagctgctaaagaagcttcaaccttaagggggcctcagggagagagttgtgctcctgccgccgagagctccaccttcgtggctctgggtccggggccccggcctgtggcggcgagcggcggccgctggagacgagcggcggcggcaggcggccagcccgggtctgcctcgctccgtgcagggccgggagagggatccgccatattggagctggggccgaaggtgccttggagccgcggcgcgaggcgggtggaggtggcggccctggcctggatcgggaaggagtcggctctgccctggcccgcaaggctggggagctaatgagcctctctggctagtctcctccccgtccactccctccactttctgccgccgggacccggctgggagccggctgtggcagtggcagtggcagtggcagcgacaggatgttctccaagaagccgcacggggacgtgaagaagtccacccagaaggtgctagacaccaagaaggacgcactgactcgcctcaagcacctgcgcatcgtcatcgagaatgcagaatctattgatcttaaacagtttttcgaccaacatttttcacatatatactatgtgttctttgaaaattttgtgactattgaagctagtcttaaacagaaaggtcacaagtctcaaagagaggaattggatgctatactttttatttttgagaaaattttacaacttcttccagaaagaattcatcagcgatggcagtttcatagtattggattgattttaaagaagctacttcacacaggaaactccttaaagattaggcgggaaggtgttcgtcttttcttactatggttgcaagctcttcagaataactgtagcaaagaacagctctggatgttttcatgcttaatccctggattttcagcaccacagtctgaacatggacctcgaactttagataatctcattaatcctccactcaaccttcaagaaactcaagtcactatagaagaaatcactcctcttgtccccccacaatcaggagataaagggcaagaagatctcacaagctattttcttgaagcacttctaaaatacatagtcattcaggtaaaaagtttagaatggaagaacaaagaaaaccaagaaaggggattttcatttttgttttcacattttaagaaatattacttgccttatatttttccaaacatctgtaaggaaaacagtttatatcatcctatacttgacatcccgcagatgagaccaaagccacattatgtcgtgataaagaaagatgctgaaaccaatgaagcaatctattgtacaaaggagcctttcattaaggctcgtgttattgtcattcgttggctggtttctttctggctggagccaaaaccacatacaggacctcatattcctgggatggaaggtgaagtcttgccaaagaatattcagagagcagctgctagtttagtatccagagaagaaagcaaaaatgataatgctgataaaacagacagaactacagaacccgaacagtctcattccaatacaagcactctcacggagcgagaacctagctcatctagtctctgtagtattgatgaagaacatctcacagacattgaaatagttcgcagagttttttcttctaaaaggagtaatgtaaactttgtgacagagatatttcgtcaggcatttttattaccaatttgtgaagcagcagctatgagaaaagtggtaaaagtatatcaagaatggatccaacaagaggaaaaacctttgttcatgcaagagcctgaagaaattgtgatcacttcttcagacctcccttgcattgaaaatgtcacagaccatgatatttcaatggaagaaggagaaaaaagagaagaggaaaatgggaccaatactgctgatcatgttcgaaattccagttgggcaaaaaacggctcctaccaaggtgctcttcataacgcctctgaagaagccacagaacaaaacatacgagctggtacccaggcagttttgcaggtgtttattataaactcatcaaatatatttcttcttgaacctgcaaatgaaataaaaaatcttctggatgaacacacagatatgtgtaaacgcattcttaacatttatcggtacatggttgtacaagtatcaatggacaaaaagacttgggaacagatgctgcttgtgttgctcagagtcacggaatctgtactgaagatgccatcacaagcttttctacagttccaagggaaaaaaaatatgaccttggcaggtcgacttgcaggaccacttttccagacccttatagttgcctggatcaaagcaaacctaaatgtgtacatctcccgagaactttgggatgacttactgtcagtattgtcatcgctgacctattgggaagagttggccactgagtggtcactgactatggagacattaactaaagttttagctaggaatttatatagtttggatctcagtgatttaccattggataagctgagtgaacagaaacaaaaaaagcacaaagggaaaggagttggacatgaatttcagaaagtttcagttgacaagtcattttctagaggatggagtcgtgatcagcctggccaagccccaatgagacagaggagtgcaacaaccactggttctccaggaaccgaaaaggcgaggagtatagtacggcaaaaaactgtcgatattgatgatgctcaaatacttccccgctcaactagagtcagacatttttcacaaagtgaagaaactggaaatgaagtttttggtgctttgaatgaggagcagccattgcctcgaagtagcagcacttctgacatcttggaaccattcactgttgaacgagccaaagtcaataaagaggacatgagccaaaaactgcctcctcttaatagtgatattggcggcagcagtgctaatgttcctgatctgatggatgagtttatagcagaacgacttcgaagtggtaatgcctcgactatgacaagaagaggaagtagtccaggcagcctggaaattcccaaagacctccctgatattctaaacaagcagaaccagatgcgccctattgatgacccaggtgtgccctcagaatggacttctcctgccagtgcagggagcagtgatcttatcagctcagatagtcattcggattctttcagcgctttccaatatgatggccgaaaatttgacaattttggctttggaaccgacactggggttacgtcctctgctgatgtggattcaggttctggccatcatcagagtgctgaagagcaggaagtggctagtctaactactcttcatatagattctgaaacaagcagtcttaatcagcaagctttctctgctgaagttgcaactattactggttcagaaagtgcttccccagtccactcacctctgggctccaggtcacagactccttccccttctacattgaatatagatcacatggaacagaaggatctgcagctcgacgagaagctccaccactctgttcttcagacaccagatgatctagaaattagtgaatttccatcagaatgttgtagtgtgatggcaggaggtactctgactggatggcatgctgatgttgctactgtaatgtggcgaagaatgctaggcattttgggagatgtaaattcaatcatggatcctgaaatacatgctcaagtttttgattacctctgtgaactttggcagaatctagctaagattagagataaccttggcatttcaactgataacctgacctccccttctccaccagttttaattcctccactgagaattcttacaccttggctttttaaggcaaccatgttgactgataaatataaacaaggtaaattacatgcatataaacttatttgtaatacaatgaaaagaagacaagatgtttctccaaatagagattttctaacacatttctacaatataatgcattgtggattacttcatattgaccaggatattgtcaatacaatcatcaaacactgctcacctcaatttttttcacttggtttgcctggtgccacaatgcttattatggattttattgtagcagctggtagagtggcttcttcagcttttctcaatgcaccaagagtagaagcacaagttcttctgggatctttggtttgctttcccaacttatattgtgaactgccttctcttcatcccaacattcctgatgttgctgtgtctcagtttacagatgttaaggaacttataatcaaaactgtattaagctcggcaagagatgagccctctggtcctgcacgatgtgtagcactttgtagtttaggtatttggatttgtgaagaactagtccatgagtctcatcatcctcaaattaaggaagctctgaatgtgatttgtgtttccttaaagtttactaataaaacagtagcccacgtagcttgtaacatgcttcacatgctggttcattatgtacctagacttcagatttaccagcctgattctcccttgaaaattattcaaatcctaatagctaccatcacccatcttttaccaagtacagaggcttcatcttatgaaatggacaagaggttggtagtatctttacttctctgccttctggactggatcatggccttacctctaaagacactgctccaaccatttcatgctacgggagcagaaagcgataaaacagaaaaatctgttctcaattgcatttataaggttttacatgggtgtgtttatggagctcagtgttttagcaatccaaggtattttcccatgagcctctctgatttggcatctgtagattatgatccttttatgcatttggaaagtctgaaagagcctgagcctctgcactctcctgactcagaacgatcttctaaactccagccagtaacagaagtgaaaactcaaatgcagcatggattaatctctatagcagcccgcactgttattacacatctggtaaatcacctgggccattatccaatgagcggtggtcctgctatgctaacaagtcaggtgtgtgaaaatcacgacaatcattacagtgaaagtactgaactttctcctgaactctttgagagtccaaatatccagttctttgtgttaaataatacaaccttagtgtcctgtatccagatcagatcagaagagaatatgcctggaggaggtttatctgctggccttgcatcagccaattcaaatgtcagaatcatagtacgtgatctctctggaaaatattcatgggattctgctatactgtatggcccacctcctgtaagtggcttgtcagaacctacatctttcatgctttcattgtctcaccaagagaagccagaagagcctccgacatctaatgaatgcttagaagatataaccgtaaaagatggactttctctccagtttaaaagatttagagaaactgtaccaacttgggatacaataagagatgaagaagatgttcttgatgagctcttgcagtatttgggtgttactagtcctgaatgcttacagagaactggaatctcacttaatattcctgctccacaacctgtgtgcatttctgaaaaacaagaaaatgatgttattaatgctatccttaagcaacatacagaagaaaaagaatttgttgagaagcactttaatgacttaaacatgaaagctgtggaacaagatgaaccaatacctcaaaaacctcagtcagcattttattattgcagattgcttcttagtatattgggaatgaattcctgggacaaacggaggagctttcatctcctgaagaaaaatgaaaagctacttagagaacttaggaacttggattcaaggcagtgccgagagacacacaagattgcagtattttatgttgctgaaggacaagaagacaaacactccattctcaccaatacaggaggaagtcaagcatatgaagattttgtagctggtcttggttgggaggtaaatcttacaaaccattgtggttttatgggaggactacaaaaaaacaaaagcactggattgaccactccatattttgctacctctacagtagaggtaatatttcacgtgtcaacaagaatgccttctgattctgatgattctttgaccaaaaaattgagacatttgggaaatgatgaagtgcacattgtttggtcagagcatactagagactacaggagaggaattattcccacagaatttggtgatgtccttattgtaatatatccaatgaaaaatcacatgttcagtattcagataatgaaaaaaccagaggttcccttctttggtcccctttttgatggtgctattgtgaatggaaaggttctacccattatggttagagcaacagctataaatgcaagccgtgctctgaaatctctgattccattgtatcaaaacttctatgaggagagagcacgatacctgcaaacaattgtccagcaccacttagaaccaacaacatttgaagattttgcagcacaggttttttctccagctccctaccaccatttaccatctgatgccggctcctacccagagattctacccagtgaaactcccacagcaacgcaggtagatggggctgacctggcctctccaatgtctcctcgaactagcaaaagccgcatgtccatgaagctgcgtcgttcctctggctcagccaataaatcctaaggagacaagcagcccagcagtgatcagcagtagccaccttagcacgaacatagggttaaccctttcaggccttcatgtctgccataacatgcatgtttcttcctgtacatttatttgagaaaacactggatttaaataattttaaataatttgtagcttaatattaaagatttaagttatttattgtttcattttttttcccacaatccaagctgccatattttgagggcagggggagttttattctacaccctttaccttcctagataattatgtctaagtagttttatctttaatttcatggttaactgtgagccaaaatacaattggacaattagtctcattatttattgtgccccattgcaactttatggttcaataaatatataattttttacaaatgtaaaattttacatttaagcatttgtaaagttacagcaaaagatgtacctgttaatacacagaatgtgtacagattatttgttatgacaataaaacactcaaaataaatggtctttagcatctcaaattccaactgaaatcattttagtattaactcttcttcccaaagcaatgtctcatttcttggctgtgcaggtgatgccatgttatatccaataactagaaaaatcactgtgctgaacttttatgtttagcttccaagtatttttctaatgttttgcatttcaagtggtatcactgttaaatgccatttgttttcagattgtggccttttattattggctgctagatcctggtgtttctatgttcttttttaagcaccaaaaagaagatggggaagaaaagaaggaaaattttctgatataaatatgttgttcaaattatgagtattatttaaaaaagaaaaaggaacataacccaggagtctaagttaaatctaatattgttaatactgaacttgcaggtccaggttggtatacattccaccctctagaagtattttcttacagtagataagctgctcacattttgttttgaatgggcatctcctgaggaaatgtagcatgacattggtactaactgcatgtgtaaatacatcatactggcaaaccgtaaaatataaattatgtatcatcattcatgtagtatctataatttgtaacagtgggggggaaagatgacatggtatttaataatacaataaaaatattcttatcacttcctatcca

SEQ ID NO: 258448 - DNA, 6252 bp, Artificial Sequence
  derived and/or modified sequence
atgttcagcaagaagccccacggcgacgtgaagaagagcacccagaaggtgctggacaccaagaaggacgccctgaccagactgaagcacctgagaatcgtgatcgagaacgccgagagcatcgacctgaagcagttcttcgaccagcacttcagccacatctactacgtgttcttcgagaacttcgtgaccatcgaggccagcctgaagcagaagggccacaagagccagagagaggagctggacgccatcctgttcatcttcgagaagatcctgcagctgctgcccgagagaatccaccagagatggcagttccacagcatcggcctgatcctgaagaagctgctgcacaccggcaacagcctgaagatcagaagagagggcgtgagactgttcctgctgtggctgcaggccctgcagaacaactgcagcaaggagcagctgtggatgttcagctgcctgatccccggcttcagcgccccccagagcgagcacggccccagaaccctggacaacctgatcaacccccccctgaacctgcaggagacccaggtgaccatcgaggagatcacccccctggtgcccccccagagcggcgacaagggccaggaggacctgaccagctacttcctggaggccctgctgaagtacatcgtgatccaggtgaagagcctggagtggaagaacaaggagaaccaggagagaggcttcagcttcctgttcagccacttcaagaagtactacctgccctacatcttccccaacatctgcaaggagaacagcctgtaccaccccatcctggacatcccccagatgagacccaagccccactacgtggtgatcaagaaggacgccgagaccaacgaggccatctactgcaccaaggagcccttcatcaaggccagagtgatcgtgatcagatggctggtgagcttctggctggagcccaagccccacaccggcccccacatccccggcatggagggcgaggtgctgcccaagaacatccagagagccgccgccagcctggtgagcagagaggagagcaagaacgacaacgccgacaagaccgacagaaccaccgagcccgagcagagccacagcaacaccagcaccctgaccgagagagagcccagcagcagcagcctgtgcagcatcgacgaggagcacctgaccgacatcgagatcgtgagaagagtgttcagcagcaagagaagcaacgtgaacttcgtgaccgagatcttcagacaggccttcctgctgcccatctgcgaggccgccgccatgagaaaggtggtgaaggtgtaccaggagtggatccagcaggaggagaagcccctgttcatgcaggagcccgaggagatcgtgatcaccagcagcgacctgccctgcatcgagaacgtgaccgaccacgacatcagcatggaggagggcgagaagagagaggaggagaacggcaccaacaccgccgaccacgtgagaaacagcagctgggccaagaacggcagctaccagggcgccctgcacaacgccagcgaggaggccaccgagcagaacatcagagccggcacccaggccgtgctgcaggtgttcatcatcaacagcagcaacatcttcctgctggagcccgccaacgagatcaagaacctgctggacgagcacaccgacatgtgcaagagaatcctgaacatctacagatacatggtggtgcaggtgagcatggacaagaagacctgggagcagatgctgctggtgctgctgagagtgaccgagagcgtgctgaagatgcccagccaggccttcctgcagttccagggcaagaagaacatgaccctggccggcagactggccggccccctgttccagaccctgatcgtggcctggatcaaggccaacctgaacgtgtacatcagcagagagctgtgggacgacctgctgagcgtgctgagcagcctgacctactgggaggagctggccaccgagtggagcctgaccatggagaccctgaccaaggtgctggccagaaacctgtacagcctggacctgagcgacctgcccctggacaagctgagcgagcagaagcagaagaagcacaagggcaagggcgtgggccacgagttccagaaggtgagcgtggacaagagcttcagcagaggctggagcagagaccagcccggccaggcccccatgagacagagaagcgccaccaccaccggcagccccggcaccgagaaggccagaagcatcgtgagacagaagaccgtggacatcgacgacgcccagatcctgcccagaagcaccagagtgagacacttcagccagagcgaggagaccggcaacgaggtgttcggcgccctgaacgaggagcagcccctgcccagaagcagcagcaccagcgacatcctggagcccttcaccgtggagagagccaaggtgaacaaggaggacatgagccagaagctgccccccctgaacagcgacatcggcggcagcagcgccaacgtgcccgacctgatggacgagttcatcgccgagagactgagaagcggcaacgccagcaccatgaccagaagaggcagcagccccggcagcctggagatccccaaggacctgcccgacatcctgaacaagcagaaccagatgagacccatcgacgaccccggcgtgcccagcgagtggaccagccccgccagcgccggcagcagcgacctgatcagcagcgacagccacagcgacagcttcagcgccttccagtacgacggcagaaagttcgacaacttcggcttcggcaccgacaccggcgtgaccagcagcgccgacgtggacagcggcagcggccaccaccagagcgccgaggagcaggaggtggccagcctgaccaccctgcacatcgacagcgagaccagcagcctgaaccagcaggccttcagcgccgaggtggccaccatcaccggcagcgagagcgccagccccgtgcacagccccctgggcagcagaagccagacccccagccccagcaccctgaacatcgaccacatggagcagaaggacctgcagctggacgagaagctgcaccacagcgtgctgcagacccccgacgacctggagatcagcgagttccccagcgagtgctgcagcgtgatggccggcggcaccctgaccggctggcacgccgacgtggccaccgtgatgtggagaagaatgctgggcatcctgggcgacgtgaacagcatcatggaccccgagatccacgcccaggtgttcgactacctgtgcgagctgtggcagaacctggccaagatcagagacaacctgggcatcagcaccgacaacctgaccagccccagcccccccgtgctgatcccccccctgagaatcctgaccccctggctgttcaaggccaccatgctgaccgacaagtacaagcagggcaagctgcacgcctacaagctgatctgcaacaccatgaagagaagacaggacgtgagccccaacagagacttcctgacccacttctacaacatcatgcactgcggcctgctgcacatcgaccaggacatcgtgaacaccatcatcaagcactgcagcccccagttcttcagcctgggcctgcccggcgccaccatgctgatcatggacttcatcgtggccgccggcagagtggccagcagcgccttcctgaacgcccccagagtggaggcccaggtgctgctgggcagcctggtgtgcttccccaacctgtactgcgagctgcccagcctgcaccccaacatccccgacgtggccgtgagccagttcaccgacgtgaaggagctgatcatcaagaccgtgctgagcagcgccagagacgagcccagcggccccgccagatgcgtggccctgtgcagcctgggcatctggatctgcgaggagctggtgcacgagagccaccacccccagatcaaggaggccctgaacgtgatctgcgtgagcctgaagttcaccaacaagaccgtggcccacgtggcctgcaacatgctgcacatgctggtgcactacgtgcccagactgcagatctaccagcccgacagccccctgaagatcatccagatcctgatcgccaccatcacccacctgctgcccagcaccgaggccagcagctacgagatggacaagagactggtggtgagcctgctgctgtgcctgctggactggatcatggccctgcccctgaagaccctgctgcagcccttccacgccaccggcgccgagagcgacaagaccgagaagagcgtgctgaactgcatctacaaggtgctgcacggctgcgtgtacggcgcccagtgcttcagcaaccccagatacttccccatgagcctgagcgacctggccagcgtggactacgaccccttcatgcacctggagagcctgaaggagcccgagcccctgcacagccccgacagcgagagaagcagcaagctgcagcccgtgaccgaggtgaagacccagatgcagcacggcctgatcagcatcgccgccagaaccgtgatcacccacctggtgaaccacctgggccactaccccatgagcggcggccccgccatgctgaccagccaggtgtgcgagaaccacgacaaccactacagcgagagcaccgagctgagccccgagctgttcgagagccccaacatccagttcttcgtgctgaacaacaccaccctggtgagctgcatccagatcagaagcgaggagaacatgcccggcggcggcctgagcgccggcctggccagcgccaacagcaacgtgagaatcatcgtgagagacctgagcggcaagtacagctgggacagcgccatcctgtacggccccccccccgtgagcggcctgagcgagcccaccagcttcatgctgagcctgagccaccaggagaagcccgaggagccccccaccagcaacgagtgcctggaggacatcaccgtgaaggacggcctgagcctgcagttcaagagattcagagagaccgtgcccacctgggacaccatcagagacgaggaggacgtgctggacgagctgctgcagtacctgggcgtgaccagccccgagtgcctgcagagaaccggcatcagcctgaacatccccgccccccagcccgtgtgcatcagcgagaagcaggagaacgacgtgatcaacgccatcctgaagcagcacaccgaggagaaggagttcgtggagaagcacttcaacgacctgaacatgaaggccgtggagcaggacgagcccatcccccagaagccccagagcgccttctactactgcagactgctgctgagcatcctgggcatgaacagctgggacaagagaagaagcttccacctgctgaagaagaacgagaagctgctgagagagctgagaaacctggacagcagacagtgcagagagacccacaagatcgccgtgttctacgtggccgagggccaggaggacaagcacagcatcctgaccaacaccggcggcagccaggcctacgaggacttcgtggccggcctgggctgggaggtgaacctgaccaaccactgcggcttcatgggcggcctgcagaagaacaagagcaccggcctgaccaccccctacttcgccaccagcaccgtggaggtgatcttccacgtgagcaccagaatgcccagcgacagcgacgacagcctgaccaagaagctgagacacctgggcaacgacgaggtgcacatcgtgtggagcgagcacaccagagactacagaagaggcatcatccccaccgagttcggcgacgtgctgatcgtgatctaccccatgaagaaccacatgttcagcatccagatcatgaagaagcccgaggtgcccttcttcggccccctgttcgacggcgccatcgtgaacggcaaggtgctgcccatcatggtgagagccaccgccatcaacgccagcagagccctgaagagcctgatccccctgtaccagaacttctacgaggagagagccagatacctgcagaccatcgtgcagcaccacctggagcccaccaccttcgaggacttcgccgcccaggtgttcagccccgccccctaccaccacctgcccagcgacgccggcagctaccccgagatcctgcccagcgagacccccaccgccacccaggtggacggcgccgacctggccagccccatgagccccagaaccagcaagagcagaatgagcatgaagctgagaagaagcagcggcagcgccaacaagagctag

SEQ ID NO: 258449 - DNA, 5778 bp, Artificial Sequence
  derived and/or modified sequence
atgttcactctgactggttgccgattagtggaaaaaacccagaaggtggagaaccccagtgtcagcttcgcctcatctttccctctgattccgctgctgctgcgagggaagtctgtacaaaaaaagcaggcagagagtaagtctcagatcaagctgcatactcagagcgctccttttggtctgtgcccgaaggatatgatgctcactcaggccccgagttctgtggtgagatccagaaatagtaggaaccataccgtgaattctgggggttcttgtctctccgcctctacggtcgcaataccggcaataaatgatagcagcgcggccatgagcgcttgttctactatttccgcccaaccagcttctagcatggatactcagatgcattctccaaagaagcaggagcgagtcaacaagagagtcatttgggggatagaggttgccgaagagctgcattggaaaggatgggagctgggcaaggagaccacccgtaaccttgtcctgaaaaaccgatctctaaaactacagaagatgaagtatcgacctcctaagacgaaattttttttcacagtcatcccgcaacccatcttcctgtctcccgggataactttaaccttgccaatcgtgtttcgccccctggaagctaaagaatatatggatcagctctggttcgaaaaagcagagggcatgttctgtgtcggcctccgcgcaacactgccctgccatagactaatttgccggcctccttcgctgcagcttcccatgtgtgccgtcggtgacaccaccgaggcttttttttgtctggacaatgtgggcgacctgccgactttcttcacctgggagtttagctcacccttccagatgctgcctgcaactgggctgttggagcccggccaggccagtcaaatcaaagtcacctttcagccactgacagccgtaatttatgaggtccaggcaacatgctggtatggtgcgggttcccgccagcgcagctccatccagcttcaagctgtggccaagtgcgcccaacttctcgtctcaatcaaacataaatgtccagaagatcaggatgccgagggcttccagaaactgctttatttcggctctgtggctgtcggttgtactagcgagcggcagatccgcctgcataacccatccgctgtgaacgcaccctttcgcatcgaaatctctcccgatgaactagctgaggaccaggcattttcttgccccacagcacatgggatcgttctcccaggtgaaaagaagtgtgtgagtgtgtttttccaccctaagacgctggatacacggacagtcgattactgctcaataatgccttccggatgtgcgtcgaagaccctgctcaaagttgtgggattttgcaggggtcccgccgtttcactccagcattactgtgtgaacttctcctgggtgaacctgggcgaaaggtccgaacagcctctgtggatagaaaaccaatccgactgtactgcccattttcaatttgccatcgattgcctggagtcagtattcacaattcggccagctttcggaacccttgtcggtaaagcacgtatgacattacactgcgccttccagccgactcaccctattatttgctttcgccgtgtggcttgtctgattcaccaccaagacccactgttcctggatctaatggggacatgccatagtgattctaccaaaccggcgattctgaaaccacagcacctgacttggtatcggacgcacctggctcgcggactcacactctacccccctgatatcttggacgctatgctgaaggagaagaagctggcccaggatcaaaatggagctcttatgatcccaatccaggaccttgaagacatgcccgccccccagtatccatatatcccccccatgacagagtttttcttcgatggtactagtgacatcactattttcccgcctcccatttcagtcgagcccgtggaagtcgacttcggcgcctgtcctggccctgaagcaccaaaccccgtgccattatgtctgatgaaccacaccaagggcaagatcatggtggtgtggaccaggcggagcgactgccccttctgggtcacacccgagtcctgcgatgtgccacctcttaagtcaatggcgatgagattacatttccagccgccacaccctaattgtctgtatactgtcgaattagaggcttttgccatttacaaggtactgcagagctactccaatattgaggaagattgtaccatgtgtccctcctggtgtcttaccgtgcgagcaaggggccactcgtacttcgctgggttcgagcatcatatacctcagtattcactggacgttcccaagctgttccctgccgtgagtagcggtgaaccaacttataggagcctgcttctggtcaacaaggactgtaaacttttgactttttcactggctccacaacgcggaagtgacgtaatcctgcgaccaacgtccggcttggtggcgcctggggcacaccaaataatcctaatttgcacctacccagagggatcctcctggaagcagcacacgttttacctccaatgtaatgcaagccctcagtaccttaaggaggtgagcatgtattctagggaggagcctttgcagctcaagcttgacacccataagtccctgtacttcaaaccaacatgggtgggctgctcaagcacatctccattcactttcagaaatccttccagacttcctttgcaattcgaatggcgggtgtcagagcagcatcgcaaacttcttgcagtccagccatcgagagggttgatacagccaaacgaacggctgacccttacttggaccttctcacctcttgaagagaccaagtatttattccaagtgggaatgtgggtgtgggaagccggcctgagcccaaatgccaatcctgccgcaacgacgcactatatgctgcgattggtcggagtcggcttaacctcttccctgagtgcaaaagagaaggagctggcctttggcaatgtcctagtgaatagcaagcagagccggtttttagtactgctaaatgatggaaactgcacactttactataggctctatctggaacaggggagtccggaggcagtcgataatcatccgctggcactacagctggataggacagaaggttccatgcctccccggagtcaggatacaatctgcttgacagcgtgtcccaagcagagaagccagtactcttggaccattacatattccctcttgagccaccgggataataaagccggggagaagcaggagctgtgttgcgttagtctggtggctgtgtatcccctgctttccattcttgacgtctcctcaatgggcagcgcggaaggtatcacgcggaagcacttatggcgactgtttagccttgatctccttaactcctatctggagagggatcccaccccttgcgagttgacctataaagtccctaccaggcactcaatgtctcaaatacctcctgtgctgacacccttaagacttgactttaatttcggtgctgcaccgttcaaggcacccccaagtgtggtcttcctcgccctcaaaaatagcggtgtagtcagcctggactgggcctttttgctgcccagcgaccaacgtattgatgtggagctgtgggcagagcaggctgaactgaacagcacagagctccaccagatgcgggtgcaggacaattgtctgtttagcatttctcctaaggccggatcgttgagccctggccaggagcagatggttgaactgaagtattcccacctgttcatcggcacagaccacctgccggtactgtttaaggtgagtcacggaagagagatcttgctaaacttcattggcgtaactgtaaagccagagcagaagtatgtgcattttacctctaccacacatcagtttatcccaatccctatcggagacacattgccaccaaggcagatctatgaactgtacaacggaggatccgttccggttacatacgaggtccagacagacgtcctcagccaggtacaggagaaaaactttgatcacccaattttttgttgcctcaacccgaagggcgagatccaaccgggcagcaccgccagagtgttgtggatcttctcacctatagaagccaaaacatacactgtcgacgtgcctatacacatcttgggttggaattctgccctgatccatttccaaggtgtcgggtacaatccgcatatgatgggagacacagctccatttcataatatttccagctgggataattctagcattcactccaggttagtggttccagggcagaacgtctttctgtcacaatcgcacatcagtttgggcaatatcccggttcagtctaagtgttctagactcctctttctgaataatataagtaaaaacgaggaaatcgcctttagctggcaaccttctccactggacttcggggaagtaagcgtctcgcctatgatcggggtagtcgcacccgaggaaacagtgcccttcgttgtgacactcagagcttctgtccacgcctccttctattccgccgatttggtttgtaagctctacagtcagcaactcatgcgtcagtaccacaaagaactgcaggaatggaaagatgaaaaagtgcgccaagaggtggaattcactataacagacatgaaagtcaagaaacgcacatgctgcacagcatgtgaacccgccaggaaatataagacattgcctcccattaagaatcaacagtctgtgtcccgacccgcctcctggaaattgcagactcctaaggaggaggtgtcatggccttgtcctcagccaccctctccagggatgctgtgcctcggtctaacggccagggcacacgcaaccgactatttcctcgccaatttttttagcgaattcccttgccacttcctgcatagggagttgcctaaacggaaggccccccgggaagagagtgaaacctccgaagagaagtcacccaataagtgggggcctgtgtcaaaacaaaagaagcaactgttagtggacatccttacaaccataataagaggactgttggaggataagaacttccatgaggccgtggatcaaagtctggtggagcaggtgccttatttccggcagttttggaacgaacagagtaccaaatttatggaccagaagaatagtctgtacctcatgccaatcctgcctgttccaagctcttcctgggaagacgggaaaggtaaacagcccaaagaagataggccggaacactaccccggcctgggtaaaaaagaagagggcgaggaggagaagggcgaagaggaagaagaagagttagaggaagaggaagaggaagaggaggagaccgaggaagaggagctgggtaaagaagagatcgaggaaaaggaagaagaacgggatgagaaggaggagaaggtgtcctgggccggcattggccctaccccacagccggaaagccaggagagtatgcagtggcaatggcagcagcagttgaacgtgatggtcaaagaggaacaggagcaagacgaaaaggaagccatccggaggttacctgcttttgctaatctgcaagaagcgctgttggaaaacatgatccaaaatatcttggtggaggcatcacgcggtgaggtggtcttaacatctagacctagagtcatcgccctccccccgttctgcgttcccaggagcctcacgcctgatacactgctgccgacacagcaggcagaggtcctccacccagttgtgccgctaccgacagatcttccctag

SEQ ID NO: 258450 - DNA, 5778 bp, Artificial Sequence
  derived and/or modified sequence
atgttcaccctgaccgggtgtcgcttggtggagaagactcagaaggtggagaacccttctgtgagctttgcctcttcctttcccctgatcccattactgctgaggggcaagtctgttcagaagaaacaggccgagtctaaaagtcagataaagctgcatactcagtccgctccatttgggctgtgcccgaaggatatgatgctcacccaggccccttcctcagtcgtgcgtagcaggaacagccgcaatcacactgtgaacagcggcggttcctgcttgtccgctagtaccgtcgcaatcccggcaatcaatgattctagcgctgccatgtcagcctgtagcaccatcagcgctcagcctgccagttctatggacactcagatgcacagcccaaagaaacaggaacgagttaataaacgggtgatttggggaattgaggtcgcagaggaactgcattggaagggatgggagctgggcaaagaaactacccggaacctggttttaaagaatagaagtctcaaacttcagaagatgaaatacagaccacccaagaccaagtttttcttcactgtaatcccacaaccaatttttctgtctccgggaatcacactgacactgcctattgtgtttcgccctttagaagccaaggagtatatggatcaactgtggttcgaaaaggccgaggggatgttttgtgtgggactgcgagctaccctgccgtgtcaccggctcatttgtagaccacctagcctgcaactgcccatgtgtgccgtcggcgatactaccgaagcatttttctgtctggacaacgtcggtgatctccccacattcttcacctgggaattctcgtcaccattccagatgttgcccgcgaccggtctcctggagcccggacaggctagccagatcaaggtgactttccagcccctgaccgctgtcatctacgaagtgcaggccacatgctggtatggagccggctcgagacagcggagcagcattcagttgcaggccgtggcaaagtgcgctcaattgcttgtgtccatcaaacacaagtgcccagaagatcaggacgctgaaggctttcagaagctactgtacttcgggagcgtggccgtgggctgcacttccgaacgccagatccgcctgcacaatccatccgcggtgaacgccccctttagaattgagatctcgcctgacgaacttgccgaggaccaggccttcagttgccccaccgcccacggaattgtcctgcccggtgaaaagaagtgcgtgtccgtctttttccatccaaaaacccttgacacacgcaccgtcgattactgctccatcatgccttccggatgcgcttccaagaccctgttgaaagtagtcggcttctgtcgcgggccggctgtgtcactacaacactattgtgtcaacttttcctgggtcaaccttggcgagcggagcgagcaacccttatggatcgaaaatcaatctgactgcacggcccatttccagtttgcaatagattgcctggaaagcgtgttcactatcagacctgccttcggtaccctggtcggtaaggctagaatgacactgcattgcgcgttccagcctacacatccgatcatatgttttaggagggttgcgtgcttgatccaccaccaagatcctttgttcctggacctaatgggaacctgtcattctgattcaacaaaacctgctatccttaaaccccagcatttgacatggtatcgaactcacctggctcggggtttgacgctataccctccggatattctcgatgctatgttaaaagagaagaagctggctcaggaccagaatggagctctcatgatacctatccaagatttagaggatatgcctgccccccaatatccatatatccctcccatgactgagttcttcttcgacggaacatctgacattacaatctttccgccacccatctctgtggaacctgtagaggtggacttcggcgcgtgcccaggtcccgaggcccctaaccccgttccactctgtctgatgaatcacactaaaggaaaaattatggtcgtgtggacacgacggtccgactgtccgttctgggtgacccccgagagctgtgacgttcccccactcaagtccatggccatgcgattacactttcaaccccctcatccaaattgcctgtatacagtagagctggaggcattcgctatctataaagtgcttcagagctacagcaacatagaagaagactgcactatgtgcccctcatggtgcctgactgtgagagcacgaggccacagctattttgccggttttgagcaccacattccccagtactcgctggatgtccccaagctttttcccgccgtgagctctggcgaacctacgtataggtccctgctgcttgtcaacaaggattgcaagctgctgacattttcgttggccccccagcgcggctcagatgttatcttacgtcccacctcaggcctggttgctcctggcgcccaccagattatcctcatatgtacttatcctgagggttcaagttggaagcagcatactttttaccttcagtgcaatgcaagtccgcagtatttgaaagaggtgtctatgtattcacgggaagaacccctgcagctgaagctggatacccacaagagcttatactttaaaccaacttgggtgggatgctcatccaccagtcctttcacatttagaaatcctagcaggttgcccctccagttcgaatggagagtttcagagcagcaccgcaaactcctcgcggttcagccctcacgagggttgatacagcctaacgaaaggttaactctaacctggacctttagccctctggaagagactaaatacctgttccaggtcggcatgtgggtttgggaggccggcctgtctccaaatgcaaatcctgccgccaccacccattacatgctgcgactggtgggagttggactgactagttctcttagcgcgaaggagaaagaattggccttcggcaatgtgttagtaaacagtaaacagagccgatttctcgtcctattgaatgatggcaactgcactctgtactacagactgtacctcgagcagggttcccccgaggccgtagacaatcaccctctggccttgcagttggaccggaccgaaggctcaatgccaccgcgaagtcaggataccatctgcctgacagcatgccctaaacagagatctcagtattcctggactatcacatactctctgctcagccacagggacaataaggcgggtgaaaagcaggagctttgctgcgtgtccctggtggccgtttaccccctcctgtcaattctggacgtgtcctcaatgggcagtgctgaaggtataaccagaaaacatctgtggcggctgtttagtctggacctgctgaactcgtatcttgaaagggatcctaccccctgtgaactcacttataaggttcctacgcggcattccatgtcacaaatcccacccgtcctgacaccactcaggctcgacttcaattttggcgccgccccctttaaagccccaccctcagtggtgttcctggccctgaaaaacagcggtgtggtgagtttggactgggcctttctgttgcccagcgaccagagaatagatgttgagttatgggctgaacaggctgaactgaactctacagagttacatcagatgcgggtccaggataattgcctcttttcaatctctccaaaggccggctcgctcagtcctggacaggagcagatggtcgaattgaaatatagtcacctgtttatcggtaccgatcatttgccagtgctgtttaaagtgagtcatggcagagaaattctgctgaactttatcggggtgacggtaaaacctgaacagaaatatgtccatttcacctcaacaacacatcaattcatccccattccaatcggagacaccttaccccctaggcagatctatgagctatataacggcgggtccgtacctgtgacctacgaggtacaaactgacgttctgtcccaggtgcaagaaaagaactttgatcatcccattttctgctgtttaaaccccaagggagaaatccagcctggaagtaccgccagagtcctttggatattctcacccatcgaggctaaaacctacacggtagatgtgccaatccatatcctggggtggaattcggctctcatacatttccagggtgtcgggtataacccgcatatgatgggtgacaccgctccttttcacaacatctcttcatgggataactctagcatacactctcgcctcgtggttccaggacagaacgtattcttatctcaaagtcacatttcgctcgggaacattccagtccagagtaagtgctcaagactcctgtttctgaacaacatctccaagaatgaagaaatcgcttttagctggcagccttcgcctctggatttcggggaggtgagcgtgtcaccgatgatcggagttgtggctcccgaggaaacggtccctttcgtggtgacactgcgcgcaagtgtccacgccagtttctattcagccgacctcgtgtgcaagttgtactcccagcaattgatgaggcagtaccacaaagagctgcaggaatggaaggacgaaaaagtccgacaggaggttgaattcacaatcactgatatgaaggtaaagaaaagaacatgctgcacggcgtgcgagcccgccaggaaatataaaaccctccctcctattaaaaaccagcaaagcgtgtcccgcccggccagctggaaactgcagaccccgaaagaggaggtgagttggccttgcccgcaacctccatcccccggtatgctctgcctaggcctgaccgcaagggcacacgccactgattacttccttgctaacttcttttcagagtttccctgtcattttctacaccgggaactccccaaaaggaaggcccccagggaagaatcagaaacttccgaggaaaagtcacccaacaaatggggccccgtatccaaacagaaaaagcaactcttggtcgatattttgactaccattatccgaggactgcttgaagacaagaactttcacgaagccgtggaccagtccttggttgagcaggtaccttatttccgacagttttggaatgagcagtccaccaaatttatggatcaaaagaattctctgtacctcatgccaatactcccggtgccatcatctagctgggaggacgggaagggaaagcagcctaaagaggacaggccagagcactatcccggattgggaaaaaaagaggagggggaggaggaaaagggggaagaagaggaggaggagctggaggaggaagaggaagaggaagaggagacagaggaggaagagcttggtaaggaggaaattgaggagaaggaggaggagagagatgagaaagaggaaaaagtttcctgggcaggaatcggccctactccccagcccgagagtcaggagtccatgcagtggcagtggcagcagcagcttaatgtgatggttaaggaagagcaggagcaagatgaaaaggaggccattaggaggctacccgctttcgccaatctccaagaagccctgttggaaaacatgatccaaaacattctggtggaagcctcccgcggcgaagttgtattgacctcaagacccagagtaattgctcttccacccttttgcgtccctcggtcccttacccccgataccctactgcctactcagcaagctgaggtcttgcatcccgtggtgccactgccaactgacctaccttag

SEQ ID NO: 258451 - DNA, 5778 bp, Artificial Sequence
  derived and/or modified sequence
atgttcacactcacaggttgtaggttggttgagaaaacacagaaagtcgagaaccccagtgtgagtttcgcctcctctttccccttgattcccctgctcctacgcggcaaatccgtgcaaaaaaaacaggccgaatctaaaagtcagattaagctgcacacccagtccgcacccttcggcttgtgccctaaagacatgatgctgacccaggctccgtcttcggtggttagatctcgtaattcaaggaatcacacagtcaactccggcgggagctgcctttctgctagcaccgtggcaattcccgctatcaatgactcttcggctgctatgtcggcatgttccaccatctccgcccagcccgcatccagcatggacactcagatgcacagccccaagaagcaggagcgtgtgaacaagagagtgatctggggcatcgaagtcgccgaagagctgcattggaaggggtgggaactgggcaaagagacaacacggaacctggtgttgaaaaacagatcactgaaactccaaaaaatgaaataccgcccacccaaaacaaagttcttctttacggtaatcccccaacccatatttcttagccccggcatcaccttgacccttccaatagtgttccgccctctcgaggccaaagaatacatggatcaactgtggttcgagaaggctgagggcatgttctgcgtaggcctgagagctacgctcccgtgtcacaggctgatctgtcgcccaccttcactccagctgcccatgtgtgctgtgggagacaccacggaggcattcttctgcctcgataacgtgggagatttaccgaccttcttcacgtgggaatttagcagccccttccagatgctgccagcaactgggctgctggagcccggccaggcctcccagattaaagtgactttccagcctctgacagccgtaatttatgaggtgcaggccacctgttggtacggcgccggaagcaggcagcgttcctccattcagctgcaagccgtcgccaagtgtgcacagcttctagtctccattaagcacaaatgtccagaggaccaggatgccgagggctttcagaagttattatatttcggcagtgttgcggtcggttgtacatctgaaagacagatccgactgcacaatccctccgccgtcaacgcacctttccgaattgaaattagcccggatgaactggccgaggaccaggcttttagctgcccaacagctcacggaatcgtgctgcccggggaaaaaaagtgtgtttcagtcttcttccatcccaagactctagatacaaggacggtggattattgttctattatgccgtcagggtgtgccagcaaaactctgttaaaggtagtgggtttctgtcggggtcccgccgtttccctgcagcactactgcgttaatttcagctgggtaaatctaggggagagaagtgaacagcccctttggattgaaaatcaatcagactgcacagctcatttccagttcgctattgactgtttggagtcagtcttcaccattcgacctgcctttggcacactagtgggcaaagcaagaatgaccctccattgtgcttttcaacctacccatccaatcatttgtttccgtcgggtagcttgtctgatccatcaccaagacccactctttctcgatctaatgggtacctgccattctgattctacgaagccagccattttgaaaccacagcacctgacctggtaccgcacgcacctggcccgtgggctgaccctgtatccccctgatatcttggacgccatgctcaaagagaagaagttagcccaggatcaaaacggagctctgatgattcctattcaagaccttgaagatatgcctgcccctcaatacccgtatatacctccaatgacagaatttttctttgatgggacaagcgatatcacaatcttcccgccaccaatatcagtcgagcctgtagaagtagactttggagcttgtcccggtccagaagcgcccaatcccgtgccactgtgtctgatgaaccacacaaaagggaaaatcatggttgtctggacccggaggagtgactgtccattttgggtgactcccgagtcttgtgacgtccctcccctgaaaagtatggccatgaggctgcacttccaaccgcctcatcccaattgcctgtacacagtcgagctggaggctttcgcaatttacaaagtcctgcagtcttatagtaatattgaagaggactgcactatgtgcccttcttggtgtctgaccgtgcgcgccagggggcactcttacttcgcaggtttcgaacatcacattccgcagtacagcctagacgtgccaaagctatttccagctgttagcagtggtgagcccacctacagaagcctcctgctagtgaacaaggattgcaaactgctaaccttctccctggcgccacagcgcgggtcagacgtgatcctgcggcccacctccggtctcgtggcccctggtgctcaccagatcattcttatctgtacgtatccggaggggtcatcttggaaacagcacacattctacctgcagtgtaacgcaagcccccagtacttaaaagaagtgtcaatgtacagcagagaggagccactgcagttaaaactggacactcacaaatctctctattttaaaccaacctgggtgggttgctcaagcacgtctcccttcacatttagaaaccctagcaggctcccattacagtttgaatggcgcgtgtctgaacagcatcgtaagctgcttgccgtgcagccctcacggggcctcatccaacccaacgagagactcaccctcacttggacgttcagtcccttggaggagaccaagtacttgttccaggtcggtatgtgggtgtgggaggctggtcttagcccaaacgccaaccctgcagccactacacattacatgctacgtttggtcggcgtggggctcacgtcttccctttcggccaaggaaaaggaattggcattcggaaacgtgctcgttaattcaaaacagtcccgatttctcgtgctcttaaatgatggtaactgtaccctctactacaggctgtatctggagcagggctccccagaggcggttgacaaccacccgttggcgctgcaactagaccggacagaaggaagcatgcctccccgctcccaggacaccatctgtctaaccgcatgtcctaagcaaaggtcccagtactcatggaccattacttacagcctgctttcccacagggataataaggccggggaaaagcaggagctgtgttgcgtttccttggttgctgtgtatccattactgtcaatcttagatgtgagtagcatgggatccgcggaaggcattacgcgcaaacatctctggagactattctcgcttgatctgttaaactcataccttgagagggatcctacaccctgtgagttgacatacaaggttccaactcggcattcgatgagccagattccacccgttctcacccccttgcgcctggatttcaactttggggctgccccattcaaagcccctccatctgtcgtgtttctggccctcaaaaactcgggggtggtcagtctggactgggcattcctgctgccctcagaccaacgaatagatgtggagttatgggctgagcaggccgagctgaattctacagagctgcatcaaatgcgcgtgcaagataattgcctgttctctatttctcccaaggccggcagtcttagccctgggcaggagcagatggtggagttaaagtactcgcatctctttatcggtacagaccatctgcctgtgcttttcaaagttagccacggtagggagattctgctgaatttcattggagtaacggtgaagcctgagcagaagtatgtacatttcacaagtacaactcatcaattcattcccataccgatcggggataccctgccgccgcgacagatctacgagctgtataatgggggatccgttcctgtcacatacgaagtacagacggacgtgctctctcaggtccaggaaaagaacttcgatcaccctatattttgttgcttgaatcccaagggtgaaatacagccgggtagcacagctagagtcctctggattttctccccgattgaagcaaaaacatataccgtggatgtgcctattcacatcctcggctggaattcagctctcatccacttccaaggtgtagggtataacccacatatgatgggcgacactgctccctttcataatatttcatcgtgggataattcctccatccactctcgcttagtggtgccaggacagaacgtcttcctttcacagtcccacatttctctcggcaacatcccggtccagtccaaatgctcccgcctgctctttctgaataacatttccaaaaacgaagagattgcattttcctggcagccaagccccctggattttggggaggtcagcgtttcccctatgatcggtgttgtcgctccagaggagacagtgcctttcgtcgtcaccctgagggcaagcgtccacgcaagtttctactccgcagatctggtgtgtaaactgtacagccagcaactcatgcgccagtatcacaaagaactgcaggaatggaaggatgaaaaggtaagacaggaagtagagtttaccattacggacatgaaagtcaagaagagaacatgttgtacagcttgcgagcctgcgcgcaaatataaaaccctacctcccataaaaaatcagcagtctgtgtcgcggcctgccagctggaagttgcagaccccgaaggaggaggtgtcctggccctgcccacaaccaccgtcaccaggcatgctgtgccttggattgactgcacgcgctcatgctacggactatttccttgcaaacttcttctccgagttcccttgccatttcctgcatcgagagctcccaaagaggaaagcaccgcgagaggagagcgagacatccgaagagaaatcacctaataagtggggcccggtgagcaagcaaaagaaacaattactcgttgatatactgactaccataatacgcgggttgctggaagacaagaattttcacgaagcagttgaccagtcactagttgaacaggtgccttacttccgccagttttggaatgagcagtcaacaaaattcatggatcaaaaaaactcgctatatcttatgcctattcttcccgtcccgtccagttcgtgggaggatgggaaaggtaaacaacctaaggaagaccgaccagaacactacccagggctgggaaaaaaggaagaaggagaagaggagaaaggagaagaggaggaagaggagcttgaggaagaggaggaggaggaggaagagaccgaggaggaagaattggggaaggaggaaatcgaagaaaaagaagaagagcgggacgagaaagaagagaaggtgagttgggctgggatcggtccaacaccccagccagaatctcaggagtccatgcagtggcaatggcagcaacagcttaacgtgatggtcaaggaagaacaggaacaggatgagaaagaagccatcagacggcttcccgcttttgccaacctccaagaagcgctgttagaaaacatgatacaaaatatcctcgtggaggcctctagaggagaggttgtcctgacgtcgcgcccgcgcgttatagcgttgcccccattttgcgtaccccgtagcctgacaccagatacactgctcccaacgcagcaggccgaagtcttgcaccctgtagtgccactcccaactgatctgccatag

SEQ ID NO: 258452 - DNA, 5778 bp, Artificial Sequence
  derived and/or modified sequence
atgttcaccctgaccggctgccgcctggtggagaagacccagaaggtggagaaccccagcgtgtcctttgccagcagcttccccctcatccccctgctgctgcggggcaagtctgtgcagaagaagcaggccgagagcaagagccagatcaagctgcacacccagagcgcccccttcggcctgtgccccaaggacatgatgctgacccaggcccccagctctgtggtgcgcagcaggaacagcaggaaccacacagtgaacagcggcggcagctgcctgagcgccagcacagtggccatcccagccatcaatgacagcagcgctgccatgtctgcctgcagcaccatcagcgcccagcctgccagctccatggacacccagatgcacagccccaagaagcaggagcgggtgaacaagagggtcatctggggcatcgaggtggccgaggagctgcactggaagggctgggagctgggcaaggagaccaccaggaacctggtgctgaagaacagaagcctgaagctgcagaagatgaagtaccggccccccaagaccaagttcttcttcaccgtcatcccccagcccatcttcctgagccctggcatcaccctgaccctgcccatcgtgttccggcccctggaggccaaggagtacatggaccagctgtggtttgagaaggccgagggcatgttctgtgtgggcctgcgggccaccctgccctgccacaggctcatctgccggccccccagcctgcagctgcccatgtgtgctgtgggggacaccacagaggccttcttctgcctggacaacgtgggggacctgcccaccttcttcacctgggagttcagcagccccttccagatgctgcctgccaccggcctgctggagcccggccaggccagccagatcaaggtgaccttccagcccctgacagctgtgatctatgaggtgcaggccacctgctggtatggagctggcagccggcagaggagcagcatccagctgcaggccgtggccaagtgtgcccagctgctggtgtccatcaagcacaagtgcccagaggaccaggatgctgagggcttccagaagctgctgtactttggatctgtggccgtgggctgcaccagcgagcggcagatccggctgcacaaccccagcgctgtgaatgcccccttccgcatcgagatcagcccagatgagctggccgaggaccaggccttcagctgccccacagcccatggaattgtgctgcccggggagaagaagtgtgtgtctgtgttcttccaccccaagaccctggacaccaggacagtggactactgcagcatcatgcccagcggctgtgccagcaagaccctgctgaaggtggtgggcttctgccggggccctgctgtgtccctgcagcactactgtgtgaacttctcctgggtgaacctgggggagaggtctgagcagcccctgtggattgagaaccagagcgactgcacagcccacttccagtttgccatcgactgcctggagagcgtcttcaccatccggcctgccttcggcaccctggtgggcaaggccaggatgaccctgcactgtgccttccagcccacccaccccatcatctgcttcagaagagtggcctgcctgatccaccaccaggaccccctcttcctggacctgatgggcacctgccacagcgacagcaccaagccagccatcctgaagccccagcacctgacctggtaccgcacccacctggcccggggcctgaccctgtaccccccagacatcctggatgccatgctgaaggagaagaagctggcccaggaccagaatggagccctgatgatccccatccaggacctggaggacatgcctgccccccagtacccctacatcccccccatgacagagttcttctttgatggcaccagtgacatcaccatcttccccccacccatctctgtggagcctgtggaggtggactttggagcctgccccggccctgaggcccccaaccctgtgcccctgtgcctgatgaaccacaccaagggcaagatcatggtggtgtggacccggcggagtgactgccccttctgggtgaccccagagagctgtgatgtgccccccctgaagtccatggccatgaggctgcacttccagcccccccaccccaactgcctgtacacagtggagctggaggcctttgccatctacaaggtgctgcagagctacagcaacatcgaggaggactgcaccatgtgccccagctggtgcctgactgtgcgggcccggggccacagctactttgctggctttgagcaccacatcccccagtacagcctggatgtgcccaagctgtttcctgctgtgagcagcggggagcccacctaccgcagcctgctgctggtgaacaaggactgcaagctgctgaccttcagcctggccccccagaggggcagtgatgtgatcctgcggcccaccagcggcctggtggcccctggggcccaccagatcatcctgatctgcacctacccagagggcagctcctggaagcagcacaccttctacctgcagtgcaatgccagcccccagtacctgaaggaggtgtccatgtacagccgggaggagcccctgcagctgaagctggacacccacaagagcctgtacttcaagcccacctgggtgggctgcagcagcaccagccccttcaccttcaggaaccccagccggctgcccctgcagtttgagtggagggtgtctgagcagcacaggaagctgctggccgtgcagcccagccggggcctcatccagcccaatgaaaggctgaccctgacctggaccttcagccccctggaggagaccaagtacctgttccaggtgggcatgtgggtgtgggaggccggcctgagccccaatgccaacccagctgccaccacccactacatgctgcggctggtgggcgtgggcctgaccagcagcctgagcgccaaggagaaggagctggcctttggaaatgtgctggtgaacagcaagcagagccgcttcctggtgctgctgaatgatggcaactgcaccctgtactaccgcctgtacctggagcagggcagccctgaggccgtggacaaccaccccctggccctgcagctggacagaacagagggctccatgccacccaggagccaggacaccatctgcctgacagcctgccccaagcagaggagccagtacagctggaccatcacctacagcctgctgagccaccgggacaacaaggccggggagaagcaggagctgtgctgcgtgtccctggtggccgtgtaccccctgctgagcatcctggatgtgtcctccatgggcagcgctgagggcatcaccaggaagcacctgtggaggctcttcagcctggacctgctgaacagctacctggagcgggaccccaccccctgtgagctgacctacaaggtgcccaccaggcacagcatgagccagatcccccctgtgctgacccccctgcggctggacttcaactttggagctgcccccttcaaggcccctccttctgtggtgttcctggccctgaagaacagcggcgtggtgtccctggactgggccttcctgctgcccagcgaccagagaattgatgtggagctgtgggccgagcaggccgagctgaacagcacagagctgcaccagatgagggtgcaggacaactgcctcttcagcatcagccccaaggccggcagcctgagccctggccaggagcagatggtggagctgaagtacagccacctgttcatcggcacagaccacctgcctgtgctcttcaaggtgagccacggccgggagatcctgctgaacttcatcggcgtgacagtgaagccagagcagaagtatgtgcacttcaccagcaccacccaccagttcatccccatccccatcggggacaccctgcccccccggcagatctatgagctgtacaatggaggctctgtgcctgtgacctatgaggtgcagacagatgtgctgagccaggtgcaggagaagaactttgaccaccccatcttctgctgcctgaaccccaagggggagatccagcccggcagcacagcccgggtgctgtggatcttcagccccatcgaggccaagacctacacagtggatgtgcccatccacatcctgggctggaacagcgccctgatccacttccagggcgtgggctacaacccccacatgatgggagacacagcccccttccacaacatcagctcctgggacaacagcagcatccacagccggctggtggtgcccggccagaatgtgttcctgagccagagccacatcagcctgggcaacatccctgtgcagagcaagtgcagccggctgctcttcctgaacaacatcagcaagaatgaggagatcgccttctcctggcagcccagccccctggactttggagaggtgtctgtgagccccatgattggagtggtggcccctgaggagaccgtgccctttgtggtgaccctgcgggcctctgtgcacgccagcttctacagcgctgacctggtgtgcaagctgtacagccagcagctgatgaggcagtaccacaaggagctgcaggagtggaaggatgagaaggtgcggcaggaggtggagttcaccatcacagacatgaaggtgaagaagaggacctgctgcacagcctgtgagcccgccaggaagtacaagaccctgccccccatcaagaaccagcagagcgtgtccaggcctgcctcctggaagctgcagacccccaaggaggaggtgtcctggccctgcccccagccccccagccctggcatgctgtgcctgggcctgacagcccgggcccacgccacagactacttcctggccaacttcttcagcgagttcccctgccacttcctgcaccgggagctgcccaagaggaaggccccccgggaggagagcgagaccagcgaggagaagagccccaacaagtggggccctgtgtccaagcagaagaagcagctgctggtggacatcctgaccaccatcatccggggcctgctggaggacaagaacttccatgaagctgtggaccagagcctggtggagcaggtgccctacttccggcagttctggaatgagcagagcaccaagttcatggaccagaagaacagcctgtacctgatgcccatcctgcctgtgcccagcagctcctgggaggatggcaagggcaagcagcccaaggaggacaggcctgagcactacccaggcctgggcaagaaggaggagggggaggaggagaagggggaggaggaggaggaggagctggaggaggaggaggaggaggaggaggagacagaggaggaggagctgggcaaggaggagattgaggagaaggaggaggagagagatgagaaggaggagaaggtgtcctgggccggcatcggccccaccccccagcctgagagccaggagagcatgcagtggcagtggcagcagcagctgaatgtgatggtgaaggaggagcaggagcaggatgagaaggaggccatccggcggctgcctgcctttgccaacctgcaggaggccctgctggagaacatgatccagaacatcctggtggaggccagcagaggagaggtggtgctgaccagccggccccgggtgattgccctgccccccttctgtgtgcccaggagcctgaccccagacaccctgctgcccacccagcaggccgaggtgctgcaccctgtggtgcccctgcccacagacctgccctag

SEQ ID NO: 258453 - DNA, 5778 bp, Artificial Sequence
  derived and/or modified sequence
atgttcaccctgaccggctgccggctggtggagaagacccagaaggtcgagaacccctcagtctcattcgcttctagctttcccttgattccactcctcttaagaggcaaatccgtacagaaaaaacaggcagagtctaagtctcagattaaactccatacacagagtgccccgttcggcctatgtccaaaggacatgatgctgactcaggccccaagctcagttgtgcgttctcgaaatagtagaaatcatacagtcaattcggggggaagttgcctatctgcgtccacagttgcgatccccgctataaacgactcttcagcagctatgagcgcatgtagcacgatatcagcccaacccgcctccagcatggacactcagatgcattctccaaagaagcaggagcgtgttaacaaacgagttatttggggcatcgaggtggccgaggagctgcattggaaagggtgggagctgggaaaggaaacaacgcggaaccttgtcttgaagaatcgctccctgaaactgcaaaagatgaagtatcgtcctccgaagactaaatttttctttacagtcatcccccagcccattttcctgtcacctggaattacgctcacactgcctatagtgttcaggcccttggaagccaaggagtacatggaccagttgtggttcgaaaaggctgaggggatgttttgtgttggcctcagggcaaccctcccatgccaccgcctcatttgtcgacctccatccttacagctccccatgtgcgccgtaggggacaccaccgaagcctttttctgcctagataatgtaggagatttgcctaccttcttcacatgggagttctcgagtcccttccaaatgctgccagccaccgggttgctcgagcccgggcaagcctcccaaatcaaagtcacgttccaaccactgactgcggtgatttatgaggtgcaagccacgtgctggtacggagcaggtagcagacagcggagcagcatccagttacaggctgtcgcaaagtgtgctcagttactggtttccattaaacacaaatgtcccgaagatcaagatgccgagggctttcagaagctgttgtattttggttctgtggccgtcgggtgtacatctgaaaggcagattagacttcacaatccaagcgcagttaatgcaccgtttaggattgagatctcccccgacgaacttgccgaagatcaggccttctcctgccccaccgcccacggaattgtgctccccggcgagaaaaaatgtgtgagcgtgtttttccaccctaagacactggacacaaggacagtggactactgtagcattatgccatcaggctgcgcaagcaagacgctgctcaaagtggtgggattctgccgggggcctgctgtttcccttcagcactactgcgtaaactttagctgggtgaatctcggagaaagatcggagcagcccctgtggatcgaaaatcagagtgattgtacagcgcacttccagtttgctatagactgtctggagagcgtgttcactatccgtcccgcttttggcacactcgtggggaaagcacggatgactctgcattgtgcgtttcagcccacgcacccaattatttgctttaggagggtcgcatgccttattcaccaccaggatcctttgttcctggatctgatggggacgtgccactccgactcgactaaaccagctatactaaagcctcagcatctgacatggtacaggactcatcttgcaagaggactgaccctctacccacccgatatcctcgacgccatgttgaaggagaaaaagctcgcacaggaccagaacggggccttaatgatccctatccaggatctggaggacatgcccgctcctcagtacccctatatccccccaatgacagaatttttttttgatgggactagtgatattactatcttcccaccaccaataagcgtcgaacctgttgaggtggactttggtgcttgccccggccccgaggctcctaatcccgtgcccctttgcctcatgaaccacacaaagggcaaaattatggtggtctggactagacggagcgattgccccttctgggttacccctgaatcctgcgacgttccccccttgaagtccatggcaatgaggctgcacttccagccacctcatcccaactgcctgtacactgtggaactcgaggctttcgctatatataaagtcctgcagagttactctaatatcgaggaggattgcactatgtgtcccagttggtgcctcaccgtgagggcaagaggccatagctactttgcaggtttcgagcatcacatcccccaatatagccttgacgtcccaaagctcttccccgctgtcagctcgggggagcccacttacaggtcactactgctggtgaacaaagactgcaagctattgacattcagcctggctccccagcggggttctgatgtgatcctacggccaacctccggcctggtcgcacccggggcgcaccagatcattctcatttgtacctatcccgagggaagctcctggaagcagcacacgttctatctgcaatgtaatgcaagcccccagtacctcaaagaagtaagtatgtactccagggaggaacccctccagctgaaactggacactcataagtcactttatttcaagccgacatgggtgggctgtagcagcacttcaccttttacctttaggaatccgagtcgactccccctacagtttgaatggcgggttagcgaacaacaccgtaaactgttggccgtacagccatcacgcggtctgattcagccaaatgaacggctgactttgacctggactttctcacctctggaagagactaaatacctgtttcaggttggtatgtgggtttgggaagctggactttctcctaatgccaatcccgccgccaccacccattatatgctgcgactggtcggcgttggcctgacaagctctctgagcgccaaggaaaaggaactcgccttcggaaacgtacttgtaaatagcaagcagtccaggttcctggtcctactgaacgatggaaattgcacactctattaccgcctgtatctggaacaagggagccccgaggcagtggacaatcatccgctggcattacaacttgataggactgagggatcaatgcccccacgcagccaggacaccatctgcctgacagcttgccctaagcaaagatcccaatactcatggacgatcacctactcgctgctcagccaccgggataacaaggcaggggagaaacaagaactgtgttgtgtaagcctagtcgctgtgtatcctttattgtctattctggatgtgtcgagtatgggttctgccgaggggatcacacgtaagcacctctggagactcttctcccttgatttgctaaacagctatttggaacgcgatccaacaccatgcgaattgacatacaaggtccccacacgccacagcatgtcccagattcctcccgtgctgaccccactgagactggacttcaactttggggcagcaccgttcaaggccccccccagtgttgtgttcttggctttgaaaaactccggcgtggtgagcctggattgggcttttcttctccccagcgatcagaggatcgacgtagagctgtgggccgagcaagcggagctaaattctacagagttgcaccagatgagggtacaagacaactgcctgttctcaatcagcccaaaggccggatctttaagccctgggcaggagcagatggtcgagttgaagtactctcacttattcataggaaccgatcatctgccagtgctgtttaaagtgtctcacggacgggaaattctcttgaactttatcggcgtgaccgtgaagccggagcaaaagtacgtgcactttacctctacaacgcaccagttcatacctataccaatcggcgacacactccctcctagacaaatatatgaactttataacggtggcagcgttcctgtgacatatgaggtacagacggatgtgctctcccaggtgcaggaaaagaatttcgaccaccccatcttttgttgtttgaatcctaagggggagattcagcctggttctaccgcccgagtgttatggatcttctcccctatagaagccaagacgtatactgtggatgtccctatacacatcttaggctggaactctgccctcatacatttccaaggagtaggatacaacccccatatgatgggcgatacggccccctttcataacattagctcttgggataacagctccatccattctcgtttggtggttccagggcagaatgtctttctctctcaaagccacatctctctggggaacattccagtgcagtctaagtgctcccggctcctattcctcaataatataagtaagaatgaagagatcgccttcagttggcagccctctcctttagacttcggagaagtgagcgtgagcccgatgatcggcgtggtggccccggaggagacagtgccattcgttgtcactctgcgggctagcgtccacgctagcttctattctgctgatctggtgtgcaagctgtactcccaacaactcatgcgccaataccacaaggagttacaggagtggaaagatgaaaaagtccgtcaggaagtggagtttacgattacggatatgaaggttaaaaagcgaacttgttgcaccgcctgcgagccagccaggaaatataaaactctgccacccataaaaaaccaacagagtgtgtcgcgccctgcaagttggaaacttcagacccctaaagaagaggtctcctggccctgcccccaaccaccttctccaggcatgttgtgcctggggctcacagctcgcgcacacgccaccgactacttcctggcaaatttcttcagcgagtttccatgccatttcctgcatagagagctgcccaagcgcaaggctcctagggaggagtccgaaactagcgaagagaagagccccaacaaatgggggccagtgtcaaagcaaaaaaagcagctgctggttgacatactaacaactatcatcaggggactcttagaggacaaaaactttcacgaggccgtggaccagtctctggtggagcaagtgccttacttccgtcaattctggaatgagcaaagtacgaagttcatggaccagaagaattcattgtacctaatgcccattctgcctgtgccatccagctcgtgggaggatggaaaaggtaagcagcccaaggaagatagacccgaacactacccaggcttaggcaagaaggaggaaggggaggaggaaaagggggaggaggaagaggaggagctggaagaagaggaagaagaagaagaggagacagaagaagaggagctgggaaaagaagagatcgaagaaaaggaggaggagcgtgatgaaaaggaggagaaggtctcctgggcagggatcggcccaacacctcaaccggaaagtcaagaatccatgcagtggcagtggcaacagcaactcaacgtgatggttaaggaagaacaggaacaggacgagaaggaggccatacgccgactgcccgcgttcgccaacctgcaggaagcactcttagaaaacatgatccagaatatcctggtggaagcatcgcgaggtgaagtggtgctcacctcacgtcctcgcgttatcgctctaccacccttttgcgtaccaagaagtctgactcctgatactcttctgcctacccagcaagctgaggtattgcacccggtcgtgccgctgcccaccgatctcccatag

SEQ ID NO: 258454 - DNA, 5778 bp, Artificial Sequence
  derived and/or modified sequence
atgttcaccctgaccggctgccggctggtggagaagacccagaaggtggaaaatccatctgtctctttcgcgtccagtttccccctaattccattactgctgcggggcaagtcagtgcagaaaaagcaggcggagtctaaatctcagatcaaactgcacacacagtctgctccattcggcctctgtcctaaggacatgatgttaacccaagcaccctcatccgtggttagaagtaggaatagccggaaccatacagtgaattctggcgggtcctgtctgagcgctagtaccgtagccatccctgcaatcaacgattcgtctgcagctatgtcagcctgctccaccatctctgcacaacctgcttcgtcaatggacacgcagatgcatagccctaagaagcaggaaagggtgaacaaacgcgtgatctggggtatcgaggttgcggaagagcttcactggaaaggctgggaactgggaaaggagacaactcggaatctggttcttaagaaccgcagtcttaaactgcagaagatgaaataccggcctcccaaaaccaaattttttttcacagtaatcccccagcccatctttttgagtcccgggatcaccctgacactgccaatagtgtttcggcctttagaggcgaaggagtatatggaccagctttggttcgaaaaggccgaaggaatgttctgcgtgggactacgggctacactaccatgtcaccgactgatttgtcggccgccatctctgcagctgcccatgtgtgctgtcggtgacacaacagaggcctttttctgtttggacaacgtaggggacctcccaactttctttacttgggagttttcttcccctttccagatgctgccggccaccggattgcttgagcctggacaggcatctcagataaaagtcactttccagccgttaactgccgtaatctacgaagtccaggctacatgttggtacggcgctggatcccgtcagagaagctccattcagctgcaagccgtcgcaaaatgtgcacagctattggtgagcattaagcacaagtgcccagaggatcaggacgcagaggggtttcagaagcttctgtacttcggatcagtggccgtgggatgcacctcagagagacagatccgtctgcataacccatccgccgttaatgcacctttccggatcgagatctctccggatgagctggctgaggaccaagcgttttcttgccctacagctcatggaatagtgctgcctggtgagaagaagtgtgtgtctgttttctttcatccaaagacacttgatacgcgcacagtggactactgttcgatcatgcctagtggatgtgcaagtaagaccctcctgaaagttgttgggttctgccgaggtccagccgtcagcctccaacactactgcgtcaattttagctgggtgaacctgggcgaaagatctgagcagcctctctggatagagaaccagagcgactgtacagcacatttccaattcgccatcgattgcctggagtcagtttttacgatccgacctgcattcggcacactggtggggaaagctaggatgacactgcactgtgctttccaaccgacccaccctatcatatgtttccggcgggtggcttgtttaattcatcaccaggatccactttttctagacctcatgggtacttgccatagcgactctaccaaaccggcgatcttaaaaccacaacaccttacatggtaccgcacacacctggcgcgcggcctgacactgtatcctcctgatattctggatgccatgctgaaagaaaaaaaactggctcaggatcaaaatggggccctgatgatccccatccaagatcttgaggacatgccggcaccacagtacccctatatcccgcctatgaccgagttctttttcgatgggacaagcgatattacaattttcccccctcccatcagcgtcgagccagtagaagtcgatttcggagcatgtcccggacccgaggcccctaaccccgtcccattgtgtctgatgaatcacaccaaggggaaaattatggtagtatggacaaggagaagcgattgtcctttctgggttaccccagaaagttgcgatgtgccgcctctaaagagcatggctatgaggctgcattttcaacccccacatccgaattgtctctataccgttgaacttgaggccttcgctatatataaggtgttgcaaagctatagcaatatcgaagaagactgcactatgtgcccatcctggtgcttgactgtcagggcccgcggacatagttactttgccgggttcgagcaccacatcccacaatacagcttagacgtgccgaagttgttcccggccgtcagttccggggaacctacatataggtcattactgttggtaaataaagattgtaagctattgaccttttcactagcgccccagcgcggatccgatgtgatattacggcctacgtctggcctcgtcgcccctggggcgcatcagatcatactaatatgtacttacccagagggctcctcgtggaagcagcatacattctacttgcagtgcaacgcatccccccaatatctgaaggaggtgagtatgtactcacgagaagagccactgcaactgaagctggacacacataagtcattatactttaagcccacatgggtgggttgttcatctacctccccttttaccttcaggaacccgagcaggctacccttacagttcgaatggagggtgagcgagcaacatcgcaagctcctcgccgtccagccctcacggggcctgatacagcccaatgaacggctgaccttaacttggacattctctcccctggaagaaactaaataccttttccaggtggggatgtgggtctgggaggccggcctcagcccaaatgctaatcccgcggccaccacccattacatgctcagattggtgggagtcggattgacatcgtccctgtctgccaaggaaaaagagctcgcctttggcaacgtcctcgtcaacagcaagcaatcccgttttctcgtattattaaatgatggcaattgcacactctactacaggctttacttagagcagggctccccagaagctgttgataaccatcctttggccttgcagctggatcgcactgagggaagcatgccacctcgaagtcaggacacaatatgtctaaccgcctgccctaaacagaggtcgcagtacagctggaccataacatacagcctgctaagccacagggataacaaagctggcgagaagcaggaactgtgctgcgtgagtcttgtagccgtttaccctctactcagcattttggatgtctctagcatggggtccgctgaagggattactcggaaacacttatggagattgttctccctcgatctgttgaactcgtaccttgaacgtgatccaaccccctgcgagctgacttacaaggtgccaactcgccacagcatgtcccagattccccctgttttgacaccactgcgcttagactttaattttggggccgctcccttcaaagcccccccaagtgtcgtctttctggctctcaagaactccggcgtcgtaagtctggactgggcatttctcctgccctctgatcagcgcattgatgtggaactttgggctgagcaagctgagctcaactccacagaacttcaccaaatgagagtccaagataattgcctgtttagtattagtccgaaggccgggtccctatcccctggtcaggagcagatggtcgaacttaagtactcccatctgttcatcggtacagaccacctgccagtgctgttcaaagtgtcccatggtagagagatcttactcaacttcattggggtaaccgtaaagccggagcagaagtacgtccacttcacatctacaacccatcagttcatacctatccccattggggacacactgccccccaggcaaatctatgaactctataacgggggctctgtaccagtaacatatgaagttcagacagatgtgctttcccaggtgcaggagaaaaattttgaccaccctattttttgttgtctcaaccccaagggtgaaatccaacctggaagcaccgcgcgagtcctgtggattttcagtcctattgaagctaagacatatacggtggatgtgcctatccacatcctgggctggaacagcgccctgattcatttccagggcgtgggatacaaccctcacatgatgggcgacacggcaccattccacaatatctccagttgggacaattcatccatccactcgagactcgtcgtgccggggcagaatgtcttcctttcacaatcacacatctccctcgggaatatacccgtgcagagcaagtgcagtcggttgctattcctgaataatatcagcaagaacgaggaaatcgcctttagttggcagcctagcccactcgactttggcgaggtgtccgttagcccgatgataggagtcgtggcacctgaggaaaccgtacctttcgttgtaacactgagggcaagtgtacatgcctccttttactccgcagatttggtgtgcaagttgtactcacagcagctgatgagacagtaccataaggagctgcaggagtggaaggacgagaaagtgcgacaagaagtagaatttacaatcacagatatgaaggtgaaaaagcgaacatgttgtacagcctgtgagcccgcccgcaagtacaagacgctccctcccatcaaaaaccagcagagtgtttctcgccctgcttcgtggaagctgcaaacacccaaggaggaagtgtcttggccgtgcccccaacctcctagccctggcatgctgtgtctcggcctgactgcccgagcacacgccactgattatttcctggctaacttcttttcagagttcccttgtcattttctccacagggaactgccaaagaggaaagcaccgagggaggagagtgagacaagtgaagaaaaaagccccaacaaatggggacccgtgagcaagcagaaaaagcagctgctggtggatatcctgaccaccatcattagaggtttgttggaggataagaattttcatgaggcagttgaccagtcccttgtggaacaggtgccttattttcgccagttctggaacgaacagagtaccaaatttatggaccagaaaaattccctgtacctgatgcccatcctgcctgtgccatcatcatcctgggaggatgggaaggggaaacaacctaaggaggataggccggagcactaccccggactgggtaagaaggaagagggggaggaagagaagggggaagaggaagaagaggagctggaggaagaagaggaggaggaagaggagaccgaggaggaagaacttggcaaggaagagattgaagagaaagaagaagaaagagacgaaaaagaagaaaaggtatcatgggcgggaattggacctactccacagccagagagtcaggagtcaatgcagtggcagtggcaacagcaactcaatgtgatggttaaagaagaacaagagcaagacgagaaagaggcgattcgtaggctccctgcgttcgcaaaccttcaggaggccctgctggagaatatgatccagaacattctggtggaggcttcccggggtgaagtcgtcctcacctcacgccccagagttatagccttgcccccattctgtgtgcctagaagcctgacgcccgacactctcttacctacacaacaggctgaagtcctgcacccggtggttcctctgcctaccgatctcccatag

SEQ ID NO: 258455 - DNA, 5778 bp, Artificial Sequence
  derived and/or modified sequence
atgttcaccctgaccggctgccggctggtggagaagacccagaaggttgaaaatccttcagtatcatttgcgagctccttccctctgatccctttgctgctcagaggcaagtctgtccagaagaagcaggctgagagcaagtcccagatcaagcttcacactcagtctgccccattcgggctctgccctaaagacatgatgctcacacaagccccctcctctgtggtgagaagtcggaatagtaggaaccatacggtcaattcagggggcagttgtctgtcagcatcgactgtcgcaattcccgcgataaacgacagctcagcggccatgtctgcatgtagcactatcagcgcacagcccgcctccagcatggatacccagatgcactcaccaaagaagcaggagagagtcaataaaagagtcatttggggcatagaagtggcagaggagcttcattggaaggggtgggaactcgggaaagagaccacaaggaacctggtcttgaagaacaggtcactgaaactgcaaaagatgaaataccgccctccaaaaacgaagttttttttcactgtcatccctcaacccatcttccttagccctggcattaccctgacgctcccaatagtattcagacctttagaggccaaagagtacatggatcagctgtggttcgaaaaggctgagggaatgttctgtgtgggtctcagagcgacccttccctgccatcggctcatctgtaggccgccgtccctgcaacttccaatgtgcgccgtcggggacaccaccgaggcctttttctgcctagacaatgtgggagatctcccgaccttcttcacttgggaattttcatcccccttccaaatgctccccgccactggcctgctggaacccggacaagcgtctcagattaaggtaaccttccaaccactgaccgctgtgatctacgaagtgcaagccacctgttggtatggggccggcagccggcaacgctccagcatccaactgcaggcggtggcaaagtgcgcccagctattagtgagcataaaacacaagtgccccgaagatcaagatgctgaggggtttcagaaactgttgtatttcggctccgtggcagttgggtgcacgtccgaaagacagatccgactgcacaaccctagcgcagtgaacgctccattcagaatcgaaatcagtcccgatgaactggccgaagatcaggcattctcatgccccactgcgcatggtatcgtgctgcccggtgagaaaaaatgcgtttctgtcttctttcacccgaaaacactggatacaaggaccgtggattactgttcaataatgccctccgggtgtgcttcaaagacgcttctgaaagtggtgggcttttgtagaggccccgctgtgtcgcttcagcattactgcgtgaatttttcttgggttaacctgggggagaggtccgagcaacctttgtggatagaaaatcaatcagactgtacagcccactttcaattcgcaattgactgcctagaatcggtgtttaccattagaccagcgtttggcaccctagtaggcaaagcgagaatgacgctgcactgtgcctttcaaccaacccatccgatcatctgctttcgaagagttgcctgtctaatccatcaccaagatcccctgttcctagacttgatggggacctgccattctgactctaccaaacccgctattctcaagcctcagcatctcacatggtaccgcacacacctggcacgcggcctgacactgtatccgcccgatattttggatgccatgctaaaagagaaaaagctggcccaggaccagaacggcgccctcatgattccaatccaggatctggaggacatgcccgctccgcagtatccgtacattccgccaatgacagaattttttttcgacggcaccagtgacattactatttttccaccccccatctctgtcgaacccgtcgaggtggattttggcgcttgccccgggcccgaagcaccaaacccagtgcccctctgccttatgaatcacaccaaaggcaagattatggtcgtgtggacccgccgctcggactgtccattctgggttacccccgaatcctgcgacgtgcctccactgaagtctatggcgatgcggctgcactttcagcccccacaccccaattgtttgtacacagtggaattggaggcattcgccatttataaagtcctgcagtcttacagtaacattgaagaagattgtaccatgtgcccgagttggtgtctgacggtcagggctcgcggccacagttactttgccggctttgaacatcacatccctcaatatagtttggacgtgcctaaactgttccccgccgtaagctcaggtgagccaacctacaggtcattgctccttgtgaacaaggactgtaaattgctgactttcagcttagcaccacagcggggcagcgatgtcattttgaggcctaccagtggactggtggcacctggtgcccatcagataatcctcatctgtacctaccccgaagggagctcctggaagcaacatacattctacctgcagtgcaacgcgtctccacagtatctcaaagaagtgagcatgtactctagggaagagccacttcagctgaagcttgacacacacaaatctttatactttaagccaacatgggtggggtgttcctcaacttctccttttacttttcggaatccaagtcgcctccccctgcagtttgaatggagggtgtctgagcagcatcgcaaactcctggccgtccagccttcgcgcgggttaatccaaccaaatgaacgtctgactttaacctggaccttctctcccctcgaggaaacgaagtacttgtttcaggtagggatgtgggtctgggaagctggcctgagtcccaatgccaacccggcagcgaccacccactacatgttacgtttggtgggcgttgggctgactagcagtctctctgcaaaggagaaagagttggcgttcgggaatgtgttggtcaacagcaaacagagcagatttttggtgttgctgaatgacggtaactgcacgctatactatagattatacctggagcaaggctcacctgaagccgtggacaatcaccccctggccctccagttagacagaactgaaggatcaatgccgccgaggtcacaggacaccatttgccttactgcctgccctaagcagagatcccagtacagttggaccatcacttattcactgctctcccacagggacaataaggccggggaaaagcaagagctgtgttgtgttagcctcgtcgccgtctacccactgcttagtatcctggacgtctcttccatgggctcggccgagggtattacaaggaaacatctgtggagactgttcagcctggatcttctgaatagctatctcgaacgagatcccaccccttgcgaactcacatacaaggttccaacccgccattctatgagccagattccaccagtccttaccccactcaggctggactttaatttcggcgctgctcctttcaaggctcccccttccgtcgtgttcctggcgctcaaaaattccggtgtggtgtccctggactgggcttttctccttccctccgaccaacggatcgatgttgagctgtgggcagaacaggctgagctcaatagtaccgagctgcaccagatgcgggtgcaggataattgtttgttcagcatcagcccaaaggctggctctctgagccctgggcaggagcagatggtggagctcaagtatagtcatctgtttattgggactgaccatcttccagtgcttttcaaagtatcccacgggcgcgaaatcctcctcaatttcatcggtgtaaccgtcaagcctgagcagaagtacgttcatttcacaagtacaactcatcaatttatacccattccgatcggagatactctccctcccaggcagatatatgagctttataacggcgggtctgtgccagtgacctacgaggtacaaaccgacgtgcttagtcaggtgcaggaaaagaacttcgatcatcccatcttctgctgtctcaatcctaagggggagattcagcctggtagtacagcgcgggtcctttggattttctcgcccatcgaagcaaagacatacaccgtggatgtccctatccacatactgggctggaactctgccttgattcatttccagggagtgggttacaatccgcacatgatgggcgatactgccccgttccataacatttctagctgggacaatagtagtatccactctagactggtggtgccaggacagaacgtctttctatcacagtctcatatctctctcggtaatattccggttcagtcaaaatgttcccggctgctctttctcaataacatctcaaaaaatgaggagatcgccttctcctggcagcccagcccacttgattttggggaggtctctgtgagccctatgatcggcgtagtggcaccggaggagacagtcccattcgtcgtgaccttacgggcgagcgtgcacgccagcttctattcagccgatctggtctgcaaactgtactcccagcagctgatgaggcaataccacaaagaactgcaggagtggaaggacgaaaaggtgcgccaagaggtggaattcacaatcaccgatatgaaagtaaagaagcggacatgctgtaccgcatgcgagcccgccaggaagtataaaaccctaccgccgatcaagaatcaacaatcggtctcgaggccagcctcctggaaactgcaaacgcccaaggaagaagtgagctggccttgccctcagcctccctcccctggtatgctgtgtctgggccttactgccagggcccatgcaactgattatttcctggctaactttttttctgaattcccttgtcacttcctacatagggaacttcccaaacgcaaagccccccgggaagagtccgagacttctgaggagaaaagtcctaacaagtgggggcctgtgtctaaacaaaagaaacagctgctcgtggacattcttacgacaattatcaggggcctactagaggacaaaaactttcacgaggctgttgaccagtcactggtggaacaggtgccgtatttcagacagttttggaacgaacagagcacaaaatttatggaccagaagaactctctgtatctgatgcctatcctcccagttccatcttcctcttgggaagacggaaagggaaagcagcctaaagaagacaggcctgagcattaccctggacttggcaagaaggaggagggggaagaggaaaagggagaggaggaagaagaggagttggaggaggaagaagaagaagaggaagaaaccgaagaggaggaactcgggaaagaagagattgaagaaaaggaagaggagagagatgaaaaagaagagaaagtctcatgggctggcatcggccccaccccccaacctgagtctcaagagagcatgcagtggcaatggcagcagcagctgaatgtcatggtgaaagaggaacaggaacaagatgagaaagaggccattcgcagactacctgcatttgccaatctccaagaagctctgttagagaacatgattcagaatatactagttgaggccagccgtggggaagtagtgctgacgagccgcccacgagttatagctctcccccccttctgcgttccccgcagtctgactcctgacactctactcccaacccagcaagccgaggtcctgcaccctgtagtccctctgccaacagacctcccctag

SEQ ID NO: 258456 - DNA, 5777 bp, Artificial Sequence
  derived and/or modified sequence
atgtttactttgacagggtgccgcttggtggagaagacccaaaaagtggagaatcctagtgtaagctttgcaagtagctttccattgatccctttactgctgaggggtaaaagtgttcagaaaaaacaggcagagtccaaaagccagattaagttgcacacgcagagtgccccattcggactctgccccaaggatatgatgctgacacaggcccctagttccgtcgtgaggagcagaaattcccgcaatcacacagttaattcaggaggttcgtgtcttagtgcgagtactgttgcaataccggcaattaacgacagtagcgccgcaatgagcgcttgttccaccataagcgctcaaccggctagttccatggacactcagatgcacagcccgaagaagcaggagcgggttaataagagggttatttgggggattgaggtcgccgaggagctccactggaaaggctgggaactggggaaggaaacgactcgtaatctggtgctgaagaaccgcagtcttaaactacagaaaatgaaataccggcctccaaagacgaaattcttcttcacagttattcctcagcctatcttcttgagtcctggaattactctgactctgcccatcgtgttcagaccccttgaggctaaagaatatatggaccagctatggtttgagaaggctgagggcatgttttgcgttgggctgagggcaactctcccttgtcaccgcttgatctgtcggccaccgtccctccagctgcccatgtgcgccgtaggcgacaccacggaagctttcttttgcctcgacaatgtaggggatctgcccacctttttcacctgggagttttcctcaccctttcagatgttgccagccactggcctgcttgagcctggccaggcgtcccagataaaagtcacctttcaaccccttaccgccgtcatctacgaggttcaggccacatgctggtacggcgcaggctctcgccagcggtccagtattcagctccaggccgtggcaaagtgcgctcagcttctggtttccattaaacacaagtgcccagaggatcaggacgcggagggtttccaaaaactgctgtatttcggcagtgtggcggttggatgcacctcagaacgccagataaggctgcataatccctcagctgtgaacgctccgtttcggatcgagatcagccccgatgagctggctgaggaccaagccttttcgtgccctactgctcacggaattgtcttgcccggtgagaaaaagtgtgtctcagtgtttttccatccaaaaactctggacactagaacagtcgactattgtagtattatgccatcggggtgtgcctcaaagaccttacttaaggtggtcggcttttgcagaggccctgcggtatccttgcagcactactgtgtgaatttctcgtgggtcaacctgggggaacgctccgagcagcccctgtggattgagaatcaatccgattgcaccgcccattttcagtttgccattgactgcctggagtctgtgttcacaattcgtccggcttttggtacattggtgggcaaggccagaatgaccttgcactgcgctttccaacccacccacccaatcatctgctttaggagagttgcgtgcctgatccaccaccaggaccctctgtttctggatctgatgggcacgtgccactctgatagcaccaaacctgccattttaaagccacaacatcttacctggtacaggacccatctggcacgagggctgactctgtaccccccagatatcttagatgctatgctgaaggaaaaaaagctggcccaggatcaaaatggggcactgatgatccctatccaggacctcgaagatatgccagccccacaatatccttatatccccccaatgaccgaatttttctttgatggcactagtgatattactatttttcctccacccatcagcgtcgaacctgtcgaggtggatttcggagcatgtcccggacctgaagcacctaatccagtgccattgtgcctgatgaaccatactaagggaaagataatggtagtgtggacaaggcgctccgactgcccattctgggtgacgccagagtcctgtgatgtccctcctttgaaaagcatggccatgagactccattttcagcctccccatcctaactgtttgtacaccgtggaactggaagcattcgcaatatataaggtgctccagagttactcaaatatcgaagaggactgtacaatgtgcccttcttggtgtttaactgtgagagctaggggacactcctattttgctgggttcgagcaccatattccccagtacagtcttgatgtccccaagttattcccagctgtgtcatcgggagagccaacatatcgctctcttttgctagtgaataaagattgcaagctcctgactttttccttggcccctcagcgcggaagcgacgtgattctgagaccaacttctggcctggtggcccctggcgctcatcagattatattaatttgcacatatcccgagggcagtagctggaagcagcacacattttatctgcagtgtaatgcatccccacagtaccttaaggaggtgagtatgtattcacgggaggaacccctgcaactgaagttagatactcataaatcgctatatttcaagcccacatgggttggatgctcatcaacgtcgccgtttacctttaggaacccctctcgcctcccccttcaatttgaatggcgagtcagtgaacagcaccgaaagctgctcgccgtgcagccatcacgaggacttattcagcccaacgagaggttgacactgacttggactttctcaccgttggaagagacgaagtatctcttccaagtgggcatgtgggtctgggaggccggactcagccctaatgcaaatccggctgctactacacattatatgctgcgactcgtgggcgtcggactgacctcctccctctccgcaaaggaaaaagagttggctttcggcaacgtgttagtaaattccaaacagagtcgattcctcgtcctgttgaacgatgggaactgcactctgtactatcgcttgtacctggagcaggggagccctgaggctgtggataaccaccctctcgctctccaattagaccgcaccgaagggtcaatgcctccacggagtcaagacactatctgcttgacagcgtgtcccaagcaacggtcccagtatagctggactatcacctactcactgctgtcccacagagacaataaggcaggggagaagcaggagctgtgctgtgtgagcctcgtagccgtttaccctctactctcaatactcgacgtgagtagcatgggctcagctgaggggattacccgtaagcacctgtggcgactttttagtctagacctgctgaactcttacctggaacgtgatcccaccccctgcgaattaacgtacaaggtacccacccgccatagcatgtcccagatccctcctgtactgacccccctgcgcctcgattttaacttcggggcagcaccttttaaagcccctccatctgtcgtgttcttggcattaaagaattcaggcgtggtctcattagattgggcttttttacttcctagtgaccagcgaatagatgtcgaactctgggcggaacaggccgagctgaattctaccgagctacaccagatgcgcgttcaggacaactgtctatttagcattagccccaaagctgggtcactgtccccagggcaggaacagatggtcgagttgaaatactctcacctgtttattggtactgaccacctgcccgtgctatttaaggtatctcatggacgtgagatcttactgaactttatcggggttaccgttaaaccggaacagaaatatgtgcactttactagcacaacccatcagttcattcccattcccatcggggacaccctccctccacggcagatatacgaactatacaatggaggaagtgtccccgtgacctacgaagtacagaccgatgtcctgagccaggtacaggaaaagaatttcgaccatccaattttttgctgtttgaaccccaaaggcgaaatacagcctgggtccacggctagagtcctttggatcttctccccgattgaggccaagacttataccgtcgatgtgcctatacatatactgggctggaactccgccctcatccactttcagggcgtggggtacaatccacatatgatgggggatacggctcccttccacaacatatcctcatgggacaatagctcgattcacagccgactcgtagtccccggacaaaatgtctttctgtctcaatcccatataagtcttgggaacatcccagtacaaagtaagtgttcacggctattgttccttaataatattagcaagaacgaggagatagcttttagctggcagccatcaccgctagatttcggcgaggtttctgtgtccccgatgatcggcgtagtggctcctgaggagaccgtacccttcgtggtaacactacgagcatccgtccatgcttccttctattcagcagatctggtgtgcaaactttactcccagcaattgatgagacagtatcacaaagaattgcaggaatggaaagatgaaaaggtgaggcaagaggttgaattcacaatcactgacatgaaggttaaaaaacgcacctgctgtactgcctgcgaacccgcacgcaagtacaagactctccctcccatcaaaaatcaacagtcagtttctcggcctgcatcctggaagctccagacacctaaggaagaggtttcctggccatgtcctcagccaccaagccccggaatgctctgtctgggactgacagccagagcacatgccacagattacttcttagcgaatttcttcagtgagttcccctgtcattttcttcacagagagcttcccaaaaggaaggcgcctcgagaggagagtgaaacatccgaggaaaaatccccaaataaatggggccctgtgtctaagcaaaaaaagcagctgctcgttgacatactcaccaccataattagaggactgctcgaggacaaaaattttcacgaggcggtggatcaatcactggtggaacaggtgccctattttagacagttctggaacgaacagtccacaaagttcatggaccagaagaacagtctatatctgatgcccatcttgccggtgcccagctcaagttgggaggacggcaaaggcaaacagcctaaggaggataggcctgagcactatcctgggctggggaaaaaagaggagggagaagaagaaaaaggggaagaagaggaagaggaactggaagaagaggaagaggaagaggaggagaccgaagaggaagagttgggaaaagaagagattgaggaaaaagaggaagagagagacgagaaggaagagaaagtctcatgggccggtatcggacctactccccaaccagagagccaagaaagcatgcagtggcaatggcaacaacagctcaatgtgatggtaaaggaagagcaggagcaggacgaaaaagaggctattaggcggctcccagcctttgcaaatctgcaggaagctttgttggaaaacatgattcagaatatcctagtggaggcatccaggggcgaggtagttcttaccagccggcctcgtgtgattgccctgccgccattctgcgtgccaagaagtctgaccccggatactcttctgcctactcagcaggcggaggttctgcaccctgtcgtgcctcttcctaccgatttgcctta

SEQ ID NO: 258457 - DNA, 5777 bp, Artificial Sequence
  derived and/or modified sequence
atgttcacactcacgggttgtcggcttgttgaaaaaacccaaaaggttgagaatccaagtgtctcatttgcaagctcctttccgctgatcccgcttcttctcaggggcaagagcgtacagaaaaaacaggccgaaagtaagtcccagattaagctccacactcaatccgcccctttcgggctttgccccaaagacatgatgctgacacaggcaccgtccagcgtcgtgcggagccggaatagcaggaatcatacagtgaattcagggggttcgtgcctaagcgccagtacagtggctattcccgctatcaatgactcctcagcagccatgtccgcctgcagcacgatctctgcccagcctgcctcgagcatggatactcagatgcatagtccaaaaaagcaggagcgtgttaataagcgcgtcatatggggtatcgaggtggcggaagaactccattggaaaggttgggaattgggaaaggagactactcgcaacctggtactgaagaacaggtcactgaaactccagaaaatgaaataccgccctccgaaaactaagtttttcttcaccgtcattccccagccgattttcctgtctccaggaatcactttgaccttgcccatcgtgttcagacccctagaagccaaggagtacatggaccaactatggttcgagaaagccgaaggaatgttttgtgtaggcttgcgagctactctaccctgtcaccgattgatctgcaggcctccatcactgcagctgcctatgtgcgccgtcggagacaccaccgaggcctttttctgtctggataatgttggagaccttcctacattctttacgtgggagttctctagtccttttcagatgctccctgctacaggcttactcgagcctgggcaggcatcccagataaaggtgacattccagcctctgacagcggtaatctacgaggtccaggccacttgttggtatggtgccggatcccggcagcgatcaagcattcagttgcaggccgtggctaagtgcgctcagctgctcgtttctatcaagcacaaatgccccgaggaccaggatgccgagggctttcagaaactgttgtactttggaagtgttgctgtgggctgtacatctgagaggcaaatcagactccacaaccccagcgccgtcaacgcaccgttccgtatcgagatctcccccgatgagctggctgaagatcaagctttttcctgccctactgcccacgggatcgtactacctggtgaaaagaagtgtgtctctgtgttttttcatccaaaaacactggatacaagaacagtggattactgttcaattatgccaagtgggtgcgcttccaagactcttctgaaggtggtcgggttctgcaggggcccagcagtcagtctgcaacactactgcgtcaatttctcctgggtaaacctgggggagcgctctgagcagccactgtggatcgagaaccagtcagattgcaccgctcacttccagtttgctatagactgcctggagagtgtatttacaatccgccctgcttttggcactttggtcgggaaagcgagaatgaccttacattgcgcgttccagcccacccatcccattatttgctttcgccgtgtggcgtgtctgattcaccatcaggatccattgtttctggatttgatggggacatgccactcggattctacaaaacctgccatattaaagccacagcaccttacgtggtatagaacccacctggcgcgtgggctgactttgtaccccccagacattctagatgccatgctgaaggagaaaaagctggcccaggatcagaacggtgctctaatgattcctatccaggacctcgaagatatgccagcccctcagtatccctacattccccctatgaccgaattcttttttgatggcacgtccgacataacaatcttccccccacccattagcgtggaacctgtggaggtggactttggcgcttgccctggaccagaggcacctaatccagttcctttgtgtctcatgaaccatacgaaaggaaagatcatggtagtgtggacacgcagatctgattgtcccttttgggtcactccagagagctgcgacgtcccacccctgaaatctatggccatgcgcctccacttccagcccccacaccctaactgcctgtacaccgttgagttggaggccttcgcaatttacaaggtcctgcagagctattccaacattgaggaggattgcactatgtgtccatcatggtgcctgacggtcagggctcgaggtcactcctattttgccggatttgaacatcacatcccgcagtactcgttggacgttcccaagcttttccctgctgtatcgagtggcgagcccacctatcggagtcttctactcgtgaataaggattgtaagctgttaactttttcccttgctccccagcggggaagcgatgtcatactcagaccaactagtgggctagtggcgccaggtgcacatcagataatacttatatgtacatatcccgaagggtcgtcgtggaagcagcacactttttatctgcagtgcaacgcgtcaccgcagtacctcaaggaggtgagcatgtatagccgagaggagcctcttcaacttaagctcgatacgcacaaaagcctgtatttcaagcctacatgggtgggttgcagtagcacaagcccctttaccttccgcaaccccagccggttacccttgcagttcgaatggcgggtctctgagcaacatcgaaaattgctcgcggtccaaccaagtaggggactgatccagccaaacgagagattgaccttaacctggacattctcccctttggaggagacaaagtacttgtttcaagttggaatgtgggtgtgggaagccggtctttctccaaacgctaaccctgccgcaaccacacattatatgctccgactggtcggcgttgggttaacctctagtctatctgcaaaggagaaggagttggccttcgggaatgtgttggtgaatagcaaacagagccggtttttagtgctcctgaatgacgggaattgcactctgtattatcgcctttatctggagcaggggagccccgaggccgtggataatcaccctctcgcactgcagttagatcgcacagaaggatccatgccaccgagatctcaggataccatttgtctcaccgcatgtcccaagcagagaagccaatactcttggactatcacatatagcctgctgtcgcaccgagacaacaaggccggagaaaaacaggagctttgctgtgtttctcttgtggcagtgtatcctctcctctccattttggacgtgagctccatgggcagcgcagaaggaattacccggaaacacctttggcgccttttttctctggatctgctcaattcttatttagagagagacccgaccccgtgcgagctgacctataaggtaccgacccggcacagcatgtctcagataccccctgtgttgaccccattgagactggactttaattttggggctgccccattcaaggcacctccctccgtcgtgtttctcgcgctgaagaattctggcgtggtgtcccttgactgggcctttcttctccctagcgatcagagaatcgacgttgaattgtgggccgagcaggccgaactgaatagcaccgaattgcatcagatgcgagtgcaggataactgcctgtttagcatatctcccaaagccggtagcctctcacctggacaggagcaaatggtagaactgaaatactcccatctttttatcggcacagatcacctgcccgtcctattcaaagtaagtcacggacgggaaattcttctgaacttcattggagtcactgttaagcctgagcagaaatacgttcattttacgtctacaactcatcagtttattcccatcccgatcggcgatacacttccccctcggcagatttacgagttatataacggcggatccgtccccgtgacatacgaggtccagacagacgtcctgagccaggttcaggaaaagaatttcgatcacccaatcttttgttgcctgaacccaaaaggcgagattcagccgggtagcaccgcgagggtgctgtggatattcagcccaatagaggccaaaacctacaccgtggatgttcctatccatattctgggctggaatagcgctctgattcacttccagggggtcggatacaatccccatatgatgggcgataccgcgccatttcataacattagttcctgggataattcatccatccactctcggctggtagtgcctggacagaacgtgttcctctcccagagtcatatttcattgggcaatatacccgtgcaaagtaagtgctctaggttgctgttccttaacaacatctccaagaacgaggaaattgcattctcctggcagccctcacccctggatttcggggaagtgtctgtgtccccaatgatcggcgtggtcgctcccgaagagaccgtccccttcgtggtcactctgagagcttctgttcacgcaagtttttactctgccgacctggtgtgtaaactatacagccagcagctaatgcggcagtaccacaaagaactgcaggagtggaaggatgagaaggtgcgtcaggaagtggaattcaccataaccgatatgaaagtgaagaagcgaacgtgctgtaccgcttgtgaaccagcccgaaaatacaaaactctgccgccaatcaagaatcagcagtcagtgagcagaccagcttcttggaaactccagacaccaaaggaagaggtgtcgtggccatgcccccagcctccgtctcctggcatgttgtgtctgggccttactgctagggctcatgcgaccgactacttcctggccaacttcttcagcgagtttccttgccattttcttcatcgagaactgcccaagaggaaggccccaagagaggaatcggagacatccgaggagaaatcaccgaacaaatggggccctgtgagcaaacagaagaaacagctcctcgtagacatccttaccactatcattcgcggtctccttgaggataaaaatttccacgaggccgtcgaccagtctttggtggaacaagtgccatatttccggcaattctggaacgagcaaagcaccaaattcatggaccagaagaacagcctctacctcatgcccattctgccagtccccagtagctcttgggaagatgggaaagggaaacagcccaaagaagatagacccgaacattatccaggccttggaaaaaaggaggagggcgaggaagaaaagggagaagaagaagaagaggagctggaggaagaggaagaagaagaggaggaaacagaggaggaggagctgggaaaggaagagatcgaagaaaaagaggaagaacgagatgagaaggaagagaaagtgagttgggctggaattgggcctacaccgcaacctgagtcacaggagtccatgcagtggcaatggcagcagcaactgaatgtaatggtaaaagaagaacaggagcaggatgaaaaagaggccattcgtcggctaccagcttttgccaatctccaggaagctctgctggagaatatgatccagaacatcctcgttgaggcctctcggggagaggtggtcctcacgtcacgcccaagggtgatcgccctaccaccattttgcgtcccacgtagtctaacccccgacaccctgcttccaacccagcaggcagaagtcctgcatccagtggtgccgctaccaactgatctgccata

SEQ ID NO: 258458 - DNA, 5777 bp, Artificial Sequence
  derived and/or modified sequence
atgttcactctgactggttgccgactcgtcgagaaaactcaaaaggtagagaacccgtccgttagctttgcatccagcttcccactaattcccctgttattgcgtggaaagtcagtacagaagaagcaggccgagagcaaatcacaaatcaagctccatacacagtcagcaccctttggactctgccccaaggacatgatgcttacccaggccccatcttcagtcgtgcgcagcagaaactccagaaaccacactgtcaactccggcggatcctgcttgtccgctagtacagtcgcaatccctgcaattaacgattcctccgctgcgatgagtgcttgctccacaattagcgctcagcccgctagcagtatggacacacagatgcacagtcccaagaaacaggaaagggtgaataaaagggtcatttgggggattgaggtggctgaagagctccactggaaaggttgggaactcggcaaggaaaccacgcggaacctcgtgcttaaaaatagatccctgaagctgcagaagatgaaataccgccctccaaagactaaatttttcttcaccgtgatccctcagcctatcttcttgtcacccggaatcacgctgactctcccaatcgtatttcggccactcgaagcaaaggaatacatggatcagttgtggtttgagaaagccgaaggtatgttttgcgtgggcttgcgggctactcttccctgtcatcggttaatctgtaggccgccttctctacagttaccgatgtgcgccgttggagacaccacagaggcatttttttgtctcgataacgtcggcgatctacccaccttttttacctgggaatttagtagcccttttcagatgctgccagccaccgggctgctagagcccggacaggcttctcaaatcaaagtaacttttcagcccctcactgccgtgatatatgaagtccaggccacctgttggtacggagctggcagcaggcagagaagctcgatccagctacaggccgtggctaagtgtgcgcaattactggtgagcattaagcacaagtgtcctgaggaccaggatgcggaggggtttcagaaactcctgtattttggttctgtcgctgtgggatgcacttcagagagacagattaggttacataatccatctgctgtgaacgctccattcaggattgagatctctcctgatgaactagctgaagaccaggctttcagttgtccaactgcccacggtattgtgttgcccggtgagaaaaagtgtgtgtctgttttctttcacccaaagactctcgatacgcggacagtagattattgctcaatcatgccctctggttgtgcctccaagaccttactaaaggtggtgggattttgccggggtcctgccgtgtccctgcaacattactgcgtaaacttctcttgggtgaaccttggtgaaagaagtgaacaaccactgtggatcgagaaccagagcgactgcacagcacacttccagttcgcaatagactgccttgaatcggtgtttacaatccgcccagcttttggtaccctcgtgggcaaagccaggatgaccttacattgtgccttccagcccacgcaccctatcatctgcttcaggcgggtggcttgtttaatccaccatcaggaccccttgtttttggatctgatgggtacttgccatagcgactctacgaagcccgcaatcctaaagccccagcatcttacctggtacaggacacatctcgcccgaggactgacactatatcctccagatatcttggacgccatgttaaaagagaaaaagctggcacaggaccaaaacggcgctttgatgatccccattcaagacctagaggacatgcccgcacctcagtacccatatattccgcctatgaccgagtttttcttcgatggaacgtcagatatcaccatattcccccctccaatctctgtcgagccagtggaagtcgactttggcgcttgccccggacccgaagcccctaatcccgtccctctatgccttatgaatcacacaaaaggaaaaatcatggtggtctggactaggagaagcgactgtcctttctgggtcactccagagtcatgcgatgtgcctccactgaagtccatggcgatgagacttcattttcaaccacctcatcccaactgcctttataccgtggagctcgaggcctttgcaatctataaggtgctgcagtcgtactctaatatcgaagaagactgcaccatgtgcccatcttggtgcctgacggtgcgagcacgcggtcatagttactttgcgggtttcgaacaccacatacctcaatactcactggacgtgccaaagctgttcccagctgtttcgtcaggcgaaccaacttaccgaagcttgttgcttgtaaataaagactgtaaattgctgaccttttcactggcaccacagagagggtcagatgttattctcagacctacaagtggcctggtggcccctggagctcatcagattattctcatctgtacctacccagaaggaagttcctggaagcagcacaccttctacctccagtgcaacgcctctccacagtacctgaaagaggtcagtatgtacagtcgcgaagaacccctgcagctgaagttagatacgcataagtccctttatttcaaacccacttgggtgggttgctctagtacatcaccattcacgtttagaaatccgagcagactgcctctccagttcgagtggagggtgtcggagcaacaccgaaagctcctggctgttcaaccgtcgcgcggactgatacagccaaacgagcggctcactcttacatggacgttctctccactcgaagaaaccaaatatctgttccaggtgggtatgtgggtgtgggaagcaggcctcagccccaatgcaaacccagccgctaccactcattatatgctgcggttggtgggggtggggctcacctcgtcgctcagcgctaaagagaaagaactggcctttggcaatgtgttggtgaatagcaagcagtcgcgctttttagtcctgctgaacgatggaaattgtaccctgtattatcggctgtatttggaacagggatcacccgaggcagtcgataaccatccactggccttgcagctcgaccgaactgaggggtcaatgccccctcgcagtcaagataccatatgcttgactgcctgtcccaagcagcgttcccagtacagttggaccattacctacagcctgctctcccacagagataataaggcaggagagaagcaggaactttgttgtgtgagccttgtggccgtgtatcccctgctcagcatcctggatgtgagtagcatgggctctgccgagggcataacacggaagcacctatggcggctgttctcgctggacctcctcaattcctatttggagagggatcccacgccctgcgaactgacatacaaggtgcctacccgccactctatgtcccagatccctcctgtcctgactccgctgaggctagatttcaactttggtgctgccccattcaaggctccccctagcgtcgtgtttcttgctctgaagaattccggcgtagtttcgctagattgggcttttttattgccaagcgatcagcgcattgacgtggaattatgggcagaacaggccgaactcaactccaccgagctgcatcagatgcgcgtccaggacaactgcctcttctctatcagcccaaaggccggatccctgtcaccgggacaggaacagatggtcgaattgaaatactcacaccttttcatcggaacggaccacctgccagttctgtttaaggtgtcacacggtcgagagatcctcctgaatttcataggtgtgaccgtcaaacctgagcaaaagtacgtgcatttcacctctacaactcatcaatttattcctatacccattggcgacaccctgcccccacgtcaaatttacgagctctataacggcggaagcgtgcccgtcacatacgaggtgcaaaccgatgttctgtctcaggttcaggaaaagaactttgaccacccaatcttctgttgtctcaaccccaaaggcgaaatccagccgggatcaacagccagagtactgtggattttcagccctatcgaagcaaagacttacaccgtcgacgtgccaatccacattttggggtggaattcagcactgattcacttccagggagtgggatacaatccccacatgatgggggatactgcaccttttcacaatatcagctcttgggacaactcctctattcactctagactggtcgtgcccggtcagaacgtctttttaagccagagccatatcagcctgggcaacatcccagtccagagtaagtgcagtaggctgctgtttcttaacaatatctccaaaaacgaggaaatcgcttttagctggcagccatcaccgctagactttggagaggtatcagtttcacctatgatcggagttgttgcgcctgaggagactgttccttttgttgtgactctgagagccagtgtgcacgcttccttctactccgccgatctcgtgtgtaagctatactcccagcagttgatgcgccaatatcataaggaactgcaagagtggaaggacgagaaggtgagacaggaggtggagttcacaattacagatatgaaggtgaagaagcggacttgctgcacagcgtgtgagccagccagaaagtacaaaacgttgccccctatcaagaaccagcagtccgtctcccggccagcctcctggaaactgcagaccccaaaagaggaggtatcatggccctgtccacagcccccttcccccggaatgctgtgcttaggattgacggcgagagcccatgcaacagattactttctggccaattttttttcagaattcccatgccacttcctgcatcgagagctcccaaaacggaaggctccacgggaagaatccgagaccagtgaggaaaaatctcccaacaagtggggtccagtgtccaagcagaagaagcagctcttagtagatatcctcaccactattatccggggtctgctagaggacaaaaacttccacgaggccgtggatcagtcactggttgagcaggtgccgtattttcggcaattctggaatgaacagtctactaaatttatggaccagaagaattccctataccttatgcccattctgcccgttccctccagcagttgggaggacggcaaaggaaagcagcccaaggaggacaggcccgaacactaccccggtctcgggaagaaagaggagggcgaggaggagaaaggcgaggaggaagaggaagagctggaggaagaggaggaagaggaagaggagaccgaggaggaggaactgggaaaagaggagattgaagaaaaggaagaagaaagggatgagaaagaagaaaaggtgagctgggcgggtattggacccacacctcagccggaatcacaagaaagtatgcaatggcagtggcaacaacagttaaatgtaatggttaaagaagaacaggaacaggacgagaaggaagccatccgtagactgcccgcttttgccaacctccaggaagcactcctagagaacatgatccagaacatccttgtcgaggcatctcgcggtgaagtggtgcttacatctcgtcccagggtgatcgcattaccccctttttgcgtgccaagaagccttacacccgacacattacttccgacacaacaggccgaggtcctgcatcctgtggtgcctttacccactgacctgccata

SEQ ID NO: 258459 - DNA, 5778 bp, Artificial Sequence
  derived and/or modified sequence
atgttcaccctgaccggctgcagactggtggagaagacccagaaggtggagaaccccagcgtgagcttcgccagcagcttccccctgatccccctgctgctgagaggcaagagcgtgcagaagaagcaggccgagagcaagagccagatcaagctgcacacccagagcgcccccttcggcctgtgccccaaggacatgatgctgacccaggcccccagcagcgtggtgagaagcagaaacagcagaaaccacaccgtgaacagcggcggcagctgcctgagcgccagcaccgtggccatccccgccatcaacgacagcagcgccgccatgagcgcctgcagcaccatcagcgcccagcccgccagcagcatggacacccagatgcacagccccaagaagcaggagagagtgaacaagagagtgatctggggcatcgaggtggccgaggagctgcactggaagggctgggagctgggcaaggagaccaccagaaacctggtgctgaagaacagaagcctgaagctgcagaagatgaagtacagaccccccaagaccaagttcttcttcaccgtgatcccccagcccatcttcctgagccccggcatcaccctgaccctgcccatcgtgttcagacccctggaggccaaggagtacatggaccagctgtggttcgagaaggccgagggcatgttctgcgtgggcctgagagccaccctgccctgccacagactgatctgcagaccccccagcctgcagctgcccatgtgcgccgtgggcgacaccaccgaggccttcttctgcctggacaacgtgggcgacctgcccaccttcttcacctgggagttcagcagccccttccagatgctgcccgccaccggcctgctggagcccggccaggccagccagatcaaggtgaccttccagcccctgaccgccgtgatctacgaggtgcaggccacctgctggtacggcgccggcagcagacagagaagcagcatccagctgcaggccgtggccaagtgcgcccagctgctggtgagcatcaagcacaagtgccccgaggaccaggacgccgagggcttccagaagctgctgtacttcggcagcgtggccgtgggctgcaccagcgagagacagatcagactgcacaaccccagcgccgtgaacgcccccttcagaatcgagatcagccccgacgagctggccgaggaccaggccttcagctgccccaccgcccacggcatcgtgctgcccggcgagaagaagtgcgtgagcgtgttcttccaccccaagaccctggacaccagaaccgtggactactgcagcatcatgcccagcggctgcgccagcaagaccctgctgaaggtggtgggcttctgcagaggccccgccgtgagcctgcagcactactgcgtgaacttcagctgggtgaacctgggcgagagaagcgagcagcccctgtggatcgagaaccagagcgactgcaccgcccacttccagttcgccatcgactgcctggagagcgtgttcaccatcagacccgccttcggcaccctggtgggcaaggccagaatgaccctgcactgcgccttccagcccacccaccccatcatctgcttcagaagagtggcctgcctgatccaccaccaggaccccctgttcctggacctgatgggcacctgccacagcgacagcaccaagcccgccatcctgaagccccagcacctgacctggtacagaacccacctggccagaggcctgaccctgtacccccccgacatcctggacgccatgctgaaggagaagaagctggcccaggaccagaacggcgccctgatgatccccatccaggacctggaggacatgcccgccccccagtacccctacatcccccccatgaccgagttcttcttcgacggcaccagcgacatcaccatcttccccccccccatcagcgtggagcccgtggaggtggacttcggcgcctgccccggccccgaggcccccaaccccgtgcccctgtgcctgatgaaccacaccaagggcaagatcatggtggtgtggaccagaagaagcgactgccccttctgggtgacccccgagagctgcgacgtgccccccctgaagagcatggccatgagactgcacttccagcccccccaccccaactgcctgtacaccgtggagctggaggccttcgccatctacaaggtgctgcagagctacagcaacatcgaggaggactgcaccatgtgccccagctggtgcctgaccgtgagagccagaggccacagctacttcgccggcttcgagcaccacatcccccagtacagcctggacgtgcccaagctgttccccgccgtgagcagcggcgagcccacctacagaagcctgctgctggtgaacaaggactgcaagctgctgaccttcagcctggccccccagagaggcagcgacgtgatcctgagacccaccagcggcctggtggcccccggcgcccaccagatcatcctgatctgcacctaccccgagggcagcagctggaagcagcacaccttctacctgcagtgcaacgccagcccccagtacctgaaggaggtgagcatgtacagcagagaggagcccctgcagctgaagctggacacccacaagagcctgtacttcaagcccacctgggtgggctgcagcagcaccagccccttcaccttcagaaaccccagcagactgcccctgcagttcgagtggagagtgagcgagcagcacagaaagctgctggccgtgcagcccagcagaggcctgatccagcccaacgagagactgaccctgacctggaccttcagccccctggaggagaccaagtacctgttccaggtgggcatgtgggtgtgggaggccggcctgagccccaacgccaaccccgccgccaccacccactacatgctgagactggtgggcgtgggcctgaccagcagcctgagcgccaaggagaaggagctggccttcggcaacgtgctggtgaacagcaagcagagcagattcctggtgctgctgaacgacggcaactgcaccctgtactacagactgtacctggagcagggcagccccgaggccgtggacaaccaccccctggccctgcagctggacagaaccgagggcagcatgccccccagaagccaggacaccatctgcctgaccgcctgccccaagcagagaagccagtacagctggaccatcacctacagcctgctgagccacagagacaacaaggccggcgagaagcaggagctgtgctgcgtgagcctggtggccgtgtaccccctgctgagcatcctggacgtgagcagcatgggcagcgccgagggcatcaccagaaagcacctgtggagactgttcagcctggacctgctgaacagctacctggagagagaccccaccccctgcgagctgacctacaaggtgcccaccagacacagcatgagccagatcccccccgtgctgacccccctgagactggacttcaacttcggcgccgcccccttcaaggccccccccagcgtggtgttcctggccctgaagaacagcggcgtggtgagcctggactgggccttcctgctgcccagcgaccagagaatcgacgtggagctgtgggccgagcaggccgagctgaacagcaccgagctgcaccagatgagagtgcaggacaactgcctgttcagcatcagccccaaggccggcagcctgagccccggccaggagcagatggtggagctgaagtacagccacctgttcatcggcaccgaccacctgcccgtgctgttcaaggtgagccacggcagagagatcctgctgaacttcatcggcgtgaccgtgaagcccgagcagaagtacgtgcacttcaccagcaccacccaccagttcatccccatccccatcggcgacaccctgccccccagacagatctacgagctgtacaacggcggcagcgtgcccgtgacctacgaggtgcagaccgacgtgctgagccaggtgcaggagaagaacttcgaccaccccatcttctgctgcctgaaccccaagggcgagatccagcccggcagcaccgccagagtgctgtggatcttcagccccatcgaggccaagacctacaccgtggacgtgcccatccacatcctgggctggaacagcgccctgatccacttccagggcgtgggctacaacccccacatgatgggcgacaccgcccccttccacaacatcagcagctgggacaacagcagcatccacagcagactggtggtgcccggccagaacgtgttcctgagccagagccacatcagcctgggcaacatccccgtgcagagcaagtgcagcagactgctgttcctgaacaacatcagcaagaacgaggagatcgccttcagctggcagcccagccccctggacttcggcgaggtgagcgtgagccccatgatcggcgtggtggcccccgaggagaccgtgcccttcgtggtgaccctgagagccagcgtgcacgccagcttctacagcgccgacctggtgtgcaagctgtacagccagcagctgatgagacagtaccacaaggagctgcaggagtggaaggacgagaaggtgagacaggaggtggagttcaccatcaccgacatgaaggtgaagaagagaacctgctgcaccgcctgcgagcccgccagaaagtacaagaccctgccccccatcaagaaccagcagagcgtgagcagacccgccagctggaagctgcagacccccaaggaggaggtgagctggccctgcccccagccccccagccccggcatgctgtgcctgggcctgaccgccagagcccacgccaccgactacttcctggccaacttcttcagcgagttcccctgccacttcctgcacagagagctgcccaagagaaaggcccccagagaggagagcgagaccagcgaggagaagagccccaacaagtggggccccgtgagcaagcagaagaagcagctgctggtggacatcctgaccaccatcatcagaggcctgctggaggacaagaacttccacgaggccgtggaccagagcctggtggagcaggtgccctacttcagacagttctggaacgagcagagcaccaagttcatggaccagaagaacagcctgtacctgatgcccatcctgcccgtgcccagcagcagctgggaggacggcaagggcaagcagcccaaggaggacagacccgagcactaccccggcctgggcaagaaggaggagggcgaggaggagaagggcgaggaggaggaggaggagctggaggaggaggaggaggaggaggaggagaccgaggaggaggagctgggcaaggaggagatcgaggagaaggaggaggagagagacgagaaggaggagaaggtgagctgggccggcatcggccccaccccccagcccgagagccaggagagcatgcagtggcagtggcagcagcagctgaacgtgatggtgaaggaggagcaggagcaggacgagaaggaggccatcagaagactgcccgccttcgccaacctgcaggaggccctgctggagaacatgatccagaacatcctggtggaggccagcagaggcgaggtggtgctgaccagcagacccagagtgatcgccctgccccccttctgcgtgcccagaagcctgacccccgacaccctgctgcccacccagcaggccgaggtgctgcaccccgtggtgcccctgcccaccgacctgccctag

SEQ ID NO: 258460 - DNA, 3705 bp, Artificial Sequence
  derived and/or modified sequence
atggccagctggctttacgaatgcttgtgcgaggccgaattagcccagtactactctcactttaccgccctcggcctccaaaaaatcgatgagctcgcaaaaatcactatgaaagattacagcaagctgggcgttcatgacatgaatgatcgaaagcggctgtttcagctgatcaaaattattaagataatgcaggaggaggataaagccgtctctataccagagaggcatctccaaacaagctccctcagaatcaagtctcaggagctgagaagcggcccgagacggcagctgaactttgattctccagctgacaacaaggaccgaaatgccagcaatgacggctttgaaatgtgctctttgtctgacttttccgcaaacgaacagaaaagcacctatttgaaggtgctggagcatatgctgccagatgactcacagtatcataccaagaccgggatcctcaacgcaaccgccggagactcatacgttcaaacggaaatttcaacttccctgttcagccccaattacctgagcgctatactcggagactgcgacatacccattattcaacgtatttctcacgtttctggttataactatggaatcccacatagctgtataaggcaaaatacctctgaaaaacagaacccgtggacggaaatggagaaaatacgagtctgtgtgaggaaacgacctctaggaatgcgggaggttagacggggggagatcaatatcattactgtggaggacaaagaaacattattagtgcacgagaagaaggaagctgtggacctcacccagtacatcctccaggtgatcctgaagggtagtaaggaaaggtctacaggggccaccggggtcaacgctgacagctcccggagtcatgccgtgattcagatccagattaaagattccgctaaacggacttttggcaggatctcctttattgacctggccggctccgagagggcagccgacgctagagacagcgatcgacagaccaaaatggagggtgccgagataaatcagagtctcttagccctgaaagagtgcattcgggctcttgaccaggagcacactcatacgcctttccggcagtcgaagctgacccaagttctgaaggacagctttatcggaaatgccaagacctgtatgatagcaaatataagcccatcacacgtcgcaacagaacatacattgaacactctgcggtacgccgacagggttaaggaactaaagaaagggataaagtgttgtacctctgtaaccagtagaaatcggaccagcgggaactcttcccctaagcgtattcaaagttctccgggcgccttgagtgaggacaaatgttcacctaagaaagtgaagttaggattccagcagagcctgacagtggccgcacctggctctacaagggggaaagttcatccactgacctcccaccctcctaacattccctttacctcagcccccaaggtgtcaggcaagagaggtgggtctcgcggatcaccctcgcaggagtgggtaatccacgcctctcccgtgaagggtacggtgcggtccggccacgttgcgaaaaaaaagccagaggaaagtgctcccctttgcagcgaaaaaaaccggatggggaataagactgttctgggttgggagagcagagcctccgggcccggcgaagggttagtcagaggtaagttatctaccaagtgtaagaaagtgcagaccgtgcagcctgtgcagaagcagctggtgtcaagagtggaactgagcttcgggaatgcccaccacagagccgagtacagtcaggattcacagcgaggcactcccgcccgtcccgcttccgaagcttggaccaatatcccgccacatcagaaggagagagaggagcatctgcgcttttatcatcagcagttccagcagccccctttgctgcagcagaaactaaagtatcagccgctcaaaagatcacttagacagtataggccgcccgagggtcagttaaccaacgaaacaccacccttgttccactcatatagtgagaaccacgatggtgctcaggtagaggaacttgatgattccgatttctctgaggatagtttctctcacatttcgagtcagagggcaaccaagcagcgaaacactctggagaactccgaggacagcttttttctacaccaaacctgggggcagggtcccgaaaagcaggtcgccgagagacaacagagcctgttctccagtccccgaactggggacaagaaggatctaacgaagtcttgggtggacagtagggatcctattaatcaccggcgggcggcgctggatcattcttgttcccccagtaaaggaccggtggactggtcacgagagaattccacaagttccggcccatctcccagggactcgctggctgagaaaccatactgttcccaggtagacttcatataccggcaggaaaggggaggaggctcctcgtttgacctgaggaaggatgcctctcaatctgaggtgtccggggagaacgagggtaatctgccgtcgccggaggaggacgggtttactatttcactgtctcatgttgccgtgcccggatcacccgaccaaagggatactgtaactacaccacttcgagaagtctcggcagacggccctatccaggtgaccagtaccgtgaagaacggacatgccgttcctggcgaggacccaagagggcagctggggacacatgccgaatacgccagcgggctcatgagccctctgactatgtctttgctggagaaccccgataatgaaggatctccaccaagcgagcagctcgtgcaggacggcgcgacacactccctggtagccgaatccactggcggacctgtggtgagccacaccgtgccaagcggagatcaagaagcagccctccccgttagcagcgcaacccggcacctgtggctgagctcgtcccccccggacaacaagccagggggtgacctgcccgcattgagtccttctcctatacgacagcaccccgcagataagctccctagtcgcgaagccgatctcggagaggcttgccaatcgcgggagacagttttgttcagtcatgaacacatgggttccgagcagtatgatgcagacgccgaggagacgggactggatggcagttggggttttcctggcaaaccatttaccacaatacacatgggcgtgccacattcaggccctacgctgacaccacggaccgggtcttccgatgtggctgaccaactgtgggcacaggagcgcaaacacccgaccagactggggtggcaagaatttggacttagcaccgatcctattaaattaccatgcaattcagaaaatgtgacctggcttaagcctcgacctatctcccggtgtctggcccggccaagcagccctctcgtgccgagctgctctcctaaaacggctggaacactaaggcaacccaccctggaacaggcacagcaggtggtgattcgggcccaccaagaacagcttgacgaaatggccgagctaggcttcaaagaagagacgctcatgagtcaactggcctctaacgatttcgaagatttcgtgacgcaactagacgaaatcatggtgctcaaaagcaagtgcattcagtctctccggtcccagcttcagttatacctcacatgccatgggccgaccgctgcaccagaaggtacagtgccgtcatag

SEQ ID NO: 258461 - DNA, 4107 bp, Artificial Sequence
  derived and/or modified sequence
atggcctcctggttgtatgagtgtctttgcgaagccgagcttgcccagtactattctcatttcactgctctgggtcttcaaaaaattgatgagctcgctaagattacgatgaaggactattccaagttgggcgtccacgatatgaatgataggaaaagactgttccagctgataaagattatcaaaattatgcaggaagaggataaggccgtgtccatccctgaaagacacctgcagacttctagcctgcggatcaaatcccaggaactgcggagcggccctaggcgccagcttaactttgacagtccagccgacaataaagaccggaatgcctctaatgacggctttgaaatgtgttccctgagtgactttagtgccaacgagcaaaaatcaacatacctaaaggtactcgaacacatgctacccgatgactcgcaataccacacgaaaaccggtattctgaacgccaccgccggggacagctatgttcagacagagatcagcacctccctattcagcccaaactatctgtccgcaattcttggggactgtgacattcccattatccagagaattagccatgtgtccggttacaactacggaatcccccattcatgcattcggcagaacacgtcagaaaaacagaacccttggacagaaatggagaagataagggtctgcgtcaggaaacggccattggggatgagagaggtgcgtcgtggggagatcaacataatcacagtggaggataaagagacactgctggtccacgaaaagaaggaggcagtagacttgacccagtatatcctacagcatgttttctacttcgacgaagtgttcggagaggcttgcacaaaccaggacgtatacatgaaaaccactcacccgcttatccagcacatatttaacggaggaaacgccacttgcttcgcatacggccagacaggcgcggggaaaacatatacaatgatcggtacacatgaaaaccccgggctttatgccttggctgcaaaggacatattccgccagctcgaggtgagtcagcctcggaagcacctattcgtgtggatttctttttacgagatatattgcggccagctgtatgacttgctaaaccgcagaaaaaggctctttgcacgcgaagacagtaaacacatggtgcagatagtggggctccaggaacttcaggttgattctgtggagctgctgctcgaggtcattctgaaagggtccaaggagagaagtaccggcgcgaccggcgtcaacgccgactcttctcgttcacacgctgtgatccagattcagatcaaagattctgctaaaagaaccttcggtagaatcagcttcattgacctggccggctctgaaagagccgccgacgcgagagactcagaccggcagacaaagatggaaggggccgagatcaatcaatcactcctggccctgaaagagtgtattagagccctcgaccaggagcatacccatactccctttaggcaaagtaagttgacacaggttcttaaagactccttcattggcaatgcaaagacatgtatgattgccaatatttctccctcacatgtggctacagagcacaccttaaatactctgcgctacgctgaccgggtcaaagagttgaaaaagggaatcaagtgctgcacatctgtcaccagcagaaatagaacttcgggcaatagcagccccaaacgtatccaaagcagcccaggcgcactgagcgaggacaaatgttcccctaagaaagtaaagctggggttccagcaaagccttaccgtggctgcccctggctcaacccggggcaaagttcacccactgaccagccatccacccaacattccatttacgagtgccccgaaggtctccggcaaaagggggggtagccgaggaagcccctcccaagagtgggttattcacgcgagccctgtgaaaggcactgtgcgttccgggcacgtcgcaaaaaagaagcctgaggaaagtgcccccctctgctctgaaaaaaatagaatgggaaataagactgttctagggtgggagagccgggctagcggccctggggaagggctggtgcgcggcaaactgtctaccaagtgtaagaaggtccagaccgtgcagccggtccagaagcaactcgtctcccgagtcgaactgtctttcggaaacgctcatcaccgggcagaatatagtcaggatagccagcggggtacacctgcgcgtcctgcttccgaggcctggactaatatccctccccaccagaaagagcgggaagaacatctaaggttttaccatcagcaattccagcagccaccactgctccagcagaagttaaaataccagccactgaaacggtcccttcgccagtatcgtccacctgagggccagctgactaacgagactccaccgctgtttcattcctattccgagaatcacgacggcgctcaggtggaagaactggatgactccgacttttcagaggattcttttagccacataagcagccagcgcgctacaaaacaacgaaacacactggaaaactcggaggattccttttttttacaccagacctggggccaagggcccgagaaacaagtggccgagcgccagcagtctctcttcagttccccacggaccggggataagaaagatctgaccaaatcttgggtcgactcaagggacccaatcaaccataggcgcgccgcacttgaccattcctgcagcccctcaaagggaccagtggattggagccgagagaattctacatcttccggacctagccctagagattctctcgctgagaagccatattgcagccaagtggattttatataccggcaggaaagggggggagggtcatcatttgatctgaggaaagacgcgtcacagagcgaagtgtcaggtgaaaatgaaggcaatctgccgtctccagaggaggatggatttactatttccctgagccacgttgcagtgccgggctcgcctgatcagagggatacagtgaccacaccactgagggaagtgagtgccgacggacccatccaagtgacctcaaccgttaagaatgggcatgccgtacccggtgaagatccgagaggacagctggggacccacgcagagtatgctagcggcctgatgtcacctctgaccatgagcctgctggagaatcccgataatgagggctcccctcctagtgagcagctggtgcaggatggagcaactcacagcttggtcgccgagtcaacaggaggcccagttgtgtcgcatacagtgccctctggtgaccaagaggccgcacttcctgtaagctccgcgactcggcacctatggctttcatcctcccctcccgataacaagcccgggggtgatctgcctgcattatccccgtccccaattagacaacaccctgccgataaactgcccagccgagaagctgaccttggagaggcctgtcaaagccgtgagactgtgctgtttagtcacgagcacatggggtctgaacagtatgacgcggacgcagaggagaccggcttggatggcagttgggggtttccgggcaagcccttcactacaattcacatgggggttcctcattccgggcctaccctgactcctaggaccggtagctcagacgtcgctgaccagctgtgggctcaagaacggaaacaccccacccggctaggctggcaggagttcgggctgtctaccgatcccattaaactgccctgcaactctgaaaacgtgacatggctaaagcctagacccatttccagatgtctggcacggccatcatcacctctcgtgccatcgtgctcgccgaagacggccggtacactccgccagccaacattggaacaggctcagcaggtggttattcgggcccaccaggaacaattagacgagatggctgagctgggattcaaagaggagacgctcatgagccagctcgcaagcaacgacttcgaagactttgtcacccagctggacgagatcatggtgctgaagtctaagtgcattcaatctctcagatcccagttacaactgtatctgacttgtcacggcccaacggcagcccccgaggggactgttccctcctag

SEQ ID NO: 258462 - DNA, 4107 bp, Artificial Sequence
  derived and/or modified sequence
atggcctcctggctgtatgagtgtttatgtgaagccgagctggcacaatattactctcactttacggccctggggctacagaagatcgatgaactagcaaaaatcactatgaaagactattccaaacttggggtgcacgatatgaatgaccggaagcggcttttccagttgattaaaattatcaaaatcatgcaggaggaggataaagccgtctccatacctgaacgccatctgcagaccagtagcttgcgcattaaatctcaggaacttcgttccgggccccgcagacagctgaactttgattcaccagccgataataaggatagaaacgcctcaaatgatggcttcgagatgtgctccctgtctgactttagcgctaacgagcaaaagtccacatacctgaaagtgctggagcatatgctgcctgacgacagtcagtatcacactaagacgggcatcctgaatgctacagctggtgatagctacgtccaaacagaaatcagtaccagcctgttctcgccgaactacctgtccgccatcctaggcgattgcgatattcccataatacagcgtatctctcacgttagtgggtataattacgggatcccccatagctgtatcagacagaacacctctgaaaagcagaatccttggaccgaaatggagaaaatccgtgtctgtgtgcgaaaaaggccactagggatgagggaagtacgtaggggggagatcaatattatcaccgtggaggataaggaaaccctgctcgtgcacgagaagaaggaggccgtagatctcacccaatatattctccaacatgtgttctactttgacgaggtatttggagaagcctgcactaaccaggatgtgtacatgaagactactcatcctttgatccaacatatttttaacgggggaaacgccacatgtttcgcttacggacaaaccggcgctggaaagacctacactatgataggaactcatgagaatcctgggctatacgcacttgctgcaaaagacattttccgacagctggaagtgtcacagccccggaaacatctgttcgtctggatctcgttctatgaaatctactgtggccagctatacgatctcttgaatcgtcggaagcgcctcttcgcacgcgaagactccaagcatatggtgcagatcgttggtcttcaggagctccaggtcgactccgtggaactgcttcttgaggtgatcctgaaagggtctaaggagaggtccacgggggccactggtgtgaacgcggattcctcccgcagccacgccgtgattcagatacagattaaagatagcgcaaagcgcacgttcggacgcatttctttcatcgacctggcaggatcggagagggccgcagacgcccgagactcggatagacagacaaaaatggagggtgccgagattaaccagtccctgctggctttaaaagagtgcattagagctttagatcaggaacatacacacactccgttccggcaatccaaactgacccaggtgctcaaggactcattcattggcaacgccaagacctgcatgatagccaacataagccccagccacgtggcgactgagcatactctcaacacattaaggtacgctgaccgggttaaggagctcaaaaaggggatcaagtgctgcacatccgtgacctctagaaatcggacatcaggcaacagctcccccaagcgtattcagtcttccccaggagctctatcagaagataaatgttccccaaaaaaagttaagttggggttccaacagtccttgaccgttgcggctcctggttccacgagagggaaagtacatccactcacttcccaccccccaaatataccatttacatccgcccccaaagtttctggcaagaggggaggaagccgaggctcccctagtcaagaatgggtcatccatgcctcccccgtgaaagggaccgtccgatccggccatgtcgcaaagaagaagccagaggagagtgcaccactctgctcagaaaagaaccgaatgggcaataagacggtactcggatgggagtctagggccagcgggcccggggagggtcttgtgcgcggcaagctttccaccaagtgcaaaaaagtccaaactgtgcagccagtccagaagcagctggtctcgagagtggagctgtccttcgggaatgctcaccacagggcagagtattcgcaggactcacaacgaggaaccccagcgcgccccgctagtgaggcatggaccaacatcccaccgcaccaaaaggagcgcgaggaacaccttcgtttttaccaccagcagtttcagcagcctcctctcttacaacagaaattaaagtatcagcccctcaagcgcagcctgaggcagtatcgccctcctgaagggcagctgacaaacgagacacctccactctttcactcctatagcgaaaatcatgatggtgcccaagtcgaggaattagacgactcagacttcagtgaagatagctttagccacattagtagtcagagagccacaaagcagcggaatactcttgaaaactccgaggattcattttttctgcaccaaacctggggccagggacccgagaagcaggtggctgaaagacagcaaagcctcttcagtagccctaggaccggagataagaaagacctgaccaaatcttgggtcgacagcagagacccgattaaccaccgccgggcagccctcgaccattcatgcagtccatccaaaggacctgtggactggtcccgggagaattctactagcagcggccctagcccacgagacagtctggccgaaaagccctattgctcacaggtggatttcatttaccgccaggagcgcgggggagggtcatcttttgacctcaggaaggacgcctctcagagcgaggtcagcggggaaaacgaaggcaatttgcccagcccagaagaggatgggtttaccatttctctatcacatgtcgctgtgccgggctcccctgatcagcgggataccgtcacaactcccctgagagaggtgagcgcagatggcccaatacaggtcaccagcactgtgaaaaatgggcatgccgtgcctggtgaggatcctagaggtcaactcggtactcatgccgagtacgccagcggtctgatgtcacccctgacaatgtccctccttgaaaatcccgataatgaagggagcccgccttccgaacagctggttcaggatggtgccacccattctctcgtagcggagagcaccgggggcccggtcgtgtcccacacggtgccaagcggggaccaagaggctgcccttccagtgtcctccgccacccgccacttatggttgtcctcctctccacctgacaataagccaggtggcgatctgccagcccttagcccaagtccaattcggcagcaccccgctgataaactgccctcaagagaagccgacttgggcgaggcgtgtcagtcgagagaaacggtgctgttcagccatgagcacatgggatctgagcagtacgatgctgacgctgaagaaacaggcctggatggatcatgggggttccctggcaagcctttcaccactatccacatgggagtcccacatagcggaccaacgctaactccacggacgggcagcagcgatgttgctgatcaactatgggctcaggaacgaaagcacccaacccggctgggttggcaggagtttggattgtccaccgatcctattaagttgccatgtaatagcgagaacgttacttggcttaagccaaggcctatttcacggtgcctggctagaccatcctccccgttggtgccctcttgcagtcccaagaccgctggtactctgagacaacccacactagagcaggctcagcaggtagttatacgcgctcaccaggagcagctggacgagatggcagagctcggattcaaggaggagacgctgatgtcacaactagcaagcaacgacttcgaggactttgtgacacagttggatgagatcatggtgcttaagagcaagtgtatccagtctcttcgatcacagttgcaactctacctgacctgtcacggccccacggccgcccctgagggaactgtaccatcatag

SEQ ID NO: 258463 - DNA, 3477 bp, Artificial Sequence
  derived and/or modified sequence
atggctagctggctgtatgagtgtctgtgtgaggccgagctggctcagtactatagccactttacagcattgggtctccagaaaatcgatgaactggcaaagataacgatgaaggactatagtaaattaggagttcatgacatgaacgacagaaaacgcctcttccaactcattaaaatcattaaaattatgcaagaggaagataaagcagtgtccataccagaacggcatctgcagacctctagtctgagaattaaaagccaagagctgagaagtggtccccgtcgccaacttaactttgacagtcccgcagataacaaagaccgtaatgcaagtaacgatgggtttgagatgtgtagtctgtccgatttctccgcaaatgaacagaagtccacttacctcaaagtactggagcatatgctgcctgacgattcccagtatcatacaaaaaccggcatcttaaatgccaccgccggagatagctacgtccagactgaaataagtacttctctgttctcccctaattacctgtctgccattctgggagactgcgacatacccattatacagcgaatttctcatgtaagtggctacaattacggtatcccacacagctgtatccgtcagaatacaagtgaaaaacagaacccatggacagaaatggagaaaatccgcgtgtgcgttcggaagcggcctctgggtatgcgtgaagtgagaagaggcgagataaacattatcaccgtagaagataaagagaccctgcttgtccacgaaaaaaaagaggcagtcgacctaacgcaatacatcttgcagcacgtgttctactttgacgaggtgtttggcgaagcttgcactaatcaggacgtctacatgaaaactacacacccactgatccaacatatttttaatggaggcaatgccacctgctttgcctatggacagacaggtgcaggtaagacctataccatgataggaacccatgagaatccaggcctttatgctctggctgcaaaggatatattcaggcaactggaggtcagtcaaccccggaaacacctctttgtttggattagcttctatgaaatttactgtggacagctctacgatttgctgaaccgtagaaaacgcctgttcgccagagaggatagcaaacacatggtacagattgtcggtctgcaggagctgcaagtggattccgtggagcttctgctggaggtgattctgaaaggttccaaagagcgctccacaggggcgaccggcgtgaacgcagattctagtcgctcacacgccgttatacagatccagatcaaggatagtgcaaaacggacattcgggaggatttcgttcatcgaccttgctggctcggagcgagctgctgacgcaagggattccgatcggcaaacgaagatggagggggctgagataaaccagtccctgctggcactgaaggaatgtattcgggccctggaccaggaacacactcataccccattccggcaatccaaactaacccaggtacttaaggactcattcattggcaatgccaagacttgcatgatcgcaaacatctccccctctcacgtggccacggagcacaccttgaatacactccgatatgccgatcgggtcaaggagctcaaaaagggcataaaatgctgcacgagcgtcacttctcggaatcgcacttccggtaacagctcgcccaaaaggattcaaagctcgcccggggctttatctgaagacaagtgtagtcccaaaaaggttaaactggggtttcaacagtctcttaccgtggccgccccggggagtacacggggaaaggttcatccgctgacgtctcatccgcctaacatacctttcacttccgctcctaaagtctccggaaagaggggcggtagtcgcgggagccctagtcaggaatgggtgattcacgcaagcccagtgaaaggcaccgtgcgcagcggtcatgtagctaagaaaaagcccgaggaatcagcgcctctgtgttccgagaagaatcgtatgggaaacaaaactgtactgggctgggagtcccgcgctagcggcccaggcgaaggcctagtcagggggaaactgtctacaaagtgcaagaaggttcagaccgtccagcctgtccagaagcaactcgtcagtcgtgtggaactgtccttcggcaatgcgcatcatagggctgaatacagtcaagatagccagagaggcacccccgcacggccggcttcggaagcatggaccaacatccccccacaccagaaagagagggaggaacatctgcgcttctatcaccagcagtttcagcagccacctcttctgcagcagaagttgaagtaccaaccactgaaacggtccctgcggcagtatcgccctcctgagggtcagctgacgaatgagactccacccctgttccatagctattctgagaaccacgatggcgcacaagtcgaagagttggatgatagtgacttttcagaggactctttctctcatatctcctcccaaagagctactaagcagaggaatacgttagagaattcagaggacagcttttttcttcatcagacttggggacaaggcccggagaagcaggtcgctgagaggcagcaaagtttgttcagttctccgaggaccggggataagaaagatctcaccaagtcatgggtcgattcacgggatccaattaatcatcgtcgagccgcactggatcactcctgttccccgtcaaaaggcccagttgattggtcccgcgagaacagtacatcatctggtccatccccacgggactctctcgccgaaaaaccgtactgctcccaggtggattttatttatcgccaggaacgtggaggtgggagtagcttcgatctgaggaaagacgcctctcaatcggaagtgtcgggcgagaacgagggcaatctgccctcccccgaggaagatgggtttacaattagtctgtcgcatgttgccgtgcccggatccccagaccaaagggataccgtcacaactccactccgggaggtctctgcggacggccctatccaggtcactagtactgtcaaaaatgggcacgccgtcccgggggaagatccgaggggccagctgggaacccacgcagaatatgcctccggactgatgagtccgctaaccatgagcctattggaaaaccctgacaacgagggttcaccacctagcgaacagctcgttcaggatggcgcgactcactcgctggtggccgagagtaccggaggacctgtggtctcacatacggtgccttctggagatcaagaagccgccctgcctgttagcagtgcgaccagacatctctggttgagctcctcgccacctgataacaaaccaggcggtgacctgccagccttaggcccaggcgagaagacatcatacaaggcatggctcgccggggtgtggttcgtgcaccgccctcatcaggtggctctgcagcaatag

SEQ ID NO: 258464 - DNA, 5824 bp, Artificial Sequence
  derived and/or modified sequence
gacgggactgttaggttgcgggctttggggctcactcccgacggcattgtcttctcctcttctcagacagggcagaccgaggagtttggaccgagagtttatagaaacctattcaccaaaatggcatcctggttatatgaatgtctttgtgaagctgaacttgcacagtattattctcatttcactgcccttggccttcagaaaatagatgaattagccaagattacaatgaaggactactccaaattaggagtccatgacatgaacgaccgcaaacgtctcttccaacttatcaaaattattaagattatgcaagaagaagataaagcagtcagtatcccagagcgtcatcttcagacaagcagcctgcgcatcaaatctcaggaattaagatctggccctcgcagacagctgaattttgattctcctgctgacaataaagacagaaatgccagcaatgatgggtttgaaatgtgcagtttatcagatttctctgcaaatgaacagaagtccacttacctaaaagtgctagaacacatgctaccagatgattcccagtaccatacaaaaacaggaattctgaatgccacagctggtgattcctatgtgcaaacagaaatcagcacttcactcttttcaccaaattacctttctgcaatactgggggattgtgatattcccattattcaaagaatctctcatgtttcagggtataactatggaatccctcattcttgtatcagacagaacacttcagagaaacagaatccttggactgagatggagaaaatcagagtttgtgttcgaaaacgccccctgggcatgagggaggtacgtcgtggagaaattaatattattactgtagaagacaaagaaactctacttgtgcatgagaagaaagaagcagttgacctcactcaatatattctgcaggtgatcttaaagggcagcaaggagcgcagcactggggccactggagttaatgcagactcctcccgctcccatgccgtcatccaaattcagatcaaagattcagccaagaggacatttggcaggatctcttttattgacttggctggcagtgaaagagcagcagatgcaagggactcagatagacagacaaagatggaaggtgcagaaataaatcagagtctactggctctgaaggaatgtatccgagcactggatcaggaacacacccatactcccttcaggcaaagcaaactaactcaggtcctgaaggactctttcatcggcaatgccaaaacctgcatgatcgccaacatctcaccaagccacgtggccactgaacacactctcaacaccttgcgctatgctgaccgggtcaaagaactaaagaaaggcattaagtgttgcacttcagttaccagtcgaaatcggacatctggaaactcctctccaaaacgaattcagagctcccctggggctttgtcagaggacaaatgttctcccaaaaaagtcaagctgggatttcagcagtcactcacagtggcagcccctggttccacgagagggaaggtccatcctctgaccagccacccacccaacattccttttacttctgcacctaaggtctctggtaaaaggggtggctccagagggagtccttcacaagagtgggtcattcatgctagccctgtgaaaggaactgtgcgctctggacatgtggccaaaaaaaagccagaagagtcagcaccattgtgctctgagaaaaatcgaatgggcaacaaaactgtccttgggtgggaaagcagggcctcaggcccaggagaaggcctagtgcgtggtaagctgtccaccaagtgcaagaaagtgcagacagtgcagccagtacagaagcagcttgtgtctcgagttgagctctcctttggcaacgcccaccacagggctgagtacagtcaagacagccagaggggcacgcctgctaggcctgcctctgaagcttggacaaacatcccgccacatcagaaggagagggaggaacatctgcgtttctatcaccagcagttccaacagccacctctcctccaacagaagttaaaataccaaccactgaaaaggtctttacgccagtacaggcccccagagggtcagctcacgaatgagactccgcctctgttccactcttactctgaaaaccatgatggagcccaagtagaggaacttgatgacagtgatttcagtgaagattctttttcacacatctctagtcagagggccacaaagcaaaggaacaccctggagaatagcgaagactcattcttcctgcaccagacgtggggacagggtcctgagaagcaggtggcagaaagacagcagagtctgttttctagccccaggacaggtgacaagaaagatctaactaaaagctgggtggactccagggaccccataaaccacagaagagcagcactcgatcacagctgcagcccaagtaaggggcccgtggactggagcagagagaactctacttcctcagggccttctcccagagacagcctggcagagaagccatactgttcacaggtagatttcatatatagacaggaaagaggtggaggctcttcctttgatctcagaaaggatgcctcccaaagtgaggtttctggggagaatgagggcaacttgccatccccagaggaagatggtttcactatctcattgtcccacgttgcagttcctggatccccagaccaaagagacacagtcaccacacctctgagagaagtcagtgcagacggcccaatccaggtgaccagcactgtgaaaaacggtcatgctgtcccaggagaggatcctagggggcagttaggcacgcatgctgaatatgcttctggactcatgtctcccctcaccatgtccctcctggagaacccagacaacgaagggtctcctccctcggagcagctggtccaggatggggctacgcacagtctagtggcagagagcacagggggcccagttgtgagccacacagtgccatctggtgatcaagaggcagccttgccagtgtcttcagcaactaggcacctgtggctgtcctcatctccccctgataataagcctggtggtgatcttccagctctgtccccatcacccatccgtcagcacccagctgacaagctgcccagcagggaggcagacctaggagaggcctgccagagcagagagactgtacttttctcccacgaacacatgggtagtgagcagtatgatgctgatgcagaggagacggggctggatggctcctggggtttcccaggaaagcccttcaccaccatacatatgggggtaccccattctggacctacactcaccccacgaacaggaagtagtgatgtggctgaccagctctgggcccaggagagaaaacatcctacaaggcttggttggcaggagtttggtttgtccacagaccccatcaagttgccctgcaacagtgaaaatgtcacatggctcaaacccaggccgatctcaaggtgcttagcaaggccaagttctcccttggttcccagctgctctcccaagactgcagggacactccgtcagcccaccctggagcaagcgcagcaggtggtcatccgagcacaccaggaacagctggatgaaatggctgagctcggcttcaaggaggagacgctgatgagccagctggcttctaatgattttgaagattttgtgacccagctggatgaaatcatggttctgaaatccaagtgtatccagagtctgaggagccagctgcagctctatctcacctgccacgggcccaccgcagcccctgagggaacagtgccgtcttagagccagaccctgtgccgagatggtgggggccctgcaggagtctgtgctgggctctcaggctggaggagcctctgccaggtcctccctgcacacaccagaacccacacgctggtcctgcctatgctagcgtcaccccagccccacgtggcttcagataggtcccagcttctccctcagggacaggcccctgtccctcagttccatgcacaggagtgcctccaagggtgggccaggccgaagaacctaatgcctttcccttgtgcctagagaatatgattaactaaccccttgcctgtgggaatatatttgggtctaataaccctgaagtttctaagtttggggatcagaggatggggtggtcagtggtagcctagaggtcagaggtcacaagacagagaagacaacatgctgagaccagaggcttcaccagctgaattctgtgcctaacttagaagactaaacactggcccaaacttaaccattggtgctagggggacaggggtggggtgagctctgccccatcagcccttggagattgatttggggatttagaggcgtttttgaaaatgtaaatagcataaaccttgacttgatgtgtcactgacagcagcagatgtgagacaggccttatatttacagctcccttcccttcctgcaatccagtgttgaggcagaagagggtgcctgtgtcacacatcaatttttctcctgacttttgctcgggtgaaaggcctctgtacaatgcccgatactctcatgcttccatggcagctcctggctcctatctgggacacctcactacccagccccctcatggaatagtccatctcctagcctggccttcatccagttcaccctgcccagccaccctgcctctcaggggtctgtgttgggaaccttggcagttgaacagagtgctctgttcaacagtctgaggcctctgaaacagaattcacacacaaaccttcagccaagttctgcctgctgtgtatctttttagcaggaagcagctcaggacagggaagacaaagtagcctccaggtgccaattactttaaagccactctgggtcaaatggagattcatgagtcacggccttggcccgaacgcccattactatgtgagcctttatttccttcagataaaggataactttttacggttttaaaaggagggcttaattaaaaggccaagaagagggttaaatggctctcttgagacactagcagcctggtccagtcaccctttgtcagcctgacagtgcctcatctgaccgccagggggcatccttattggtgcttcccggctgcagggcactgcggcccctccctcacatgatcactaaaaaccttcaaagacccagtctagccaaaagctcaagtgggacaatggcacagtattaaggtcaaggacaaaaacttacttactttaggaatgaaccctattctatcatcatatacaacagcaccactgagagctggtgaaacagtttaaatcccatcctctgcttgtggcaaatgatgcataaatgcctgctgctcacagtaaaagggcttcttcctcttttactgggtgatccccctgaaggcccagcctatcccaactccacagtcaggaaggcctacgtccttggtccacagacggagctgggccaggtttaaaagactcagtctaggcttgcctttgcaaaccaaaaacgaggacaggtctgaagtgggaagaaagctccgaaatagaaaacggttaggtcctattctatccccagcaaatctaagcaagaaatctctttatacaccacatggcccccccactcccataaaacagccttggtaataaagaagttatcacaccaagacataccttttagatttttattagtagttctctctgaagaatcaaaatagttagttagcaaattattttagattcaagactgtatatcctttgtatttagatctttaatgatgtacaacataatacaaaacaaaccagagagactg

SEQ ID NO: 258465 - DNA, 3705 bp, Artificial Sequence
  derived and/or modified sequence
atggcctcctggctgtatgaatgtctgtgtgaggccgagctggcccagtactacagccacttcaccgccctgggcctgcagaagattgatgagctggccaagatcaccatgaaggactacagcaagctgggcgtgcatgacatgaatgacaggaagaggctcttccagctgatcaagatcatcaagatcatgcaggaggaggacaaggctgtgtccatccctgagcggcacctgcagaccagcagcctgcgcatcaagagccaggagctgcggagcggcccccggcggcagctgaactttgacagccctgctgacaacaaggacagaaatgccagcaatgatggctttgagatgtgcagcctgagtgacttcagcgccaatgagcagaagagcacctacctgaaggtgctggagcacatgctgcctgatgacagccagtaccacaccaagacaggcatcctgaatgccacagctggggacagctatgtgcagacagagatcagcaccagcctcttcagccccaactacctgagcgccatcctgggggactgtgacatccccatcatccagaggatcagccacgtgtctggctacaactacggcatcccccacagctgcatccggcagaacaccagcgagaagcagaacccctggacagagatggagaagatccgggtgtgtgtgaggaagaggcccctgggcatgagggaggtgagaagaggagagatcaacatcatcaccgtggaggacaaggagaccctgctggtgcatgagaagaaggaggccgtggacctgacccagtacatcctgcaggtgatcctgaagggcagcaaggagaggagcactggagccactggagtgaatgctgacagcagccgcagccacgccgtcatccagatccagatcaaggacagcgccaagaggaccttcggccgcatctccttcatcgacctggccggcagcgagagagctgctgatgcccgggacagcgaccggcagaccaagatggagggcgctgagatcaaccagagcctgctggccctgaaggagtgcatccgggccctggaccaggagcacacccacacccccttccggcagagcaagctgacccaggtgctgaaggacagcttcatcggaaatgccaagacctgcatgattgccaacatcagccccagccacgtggccacagagcacaccctgaacaccctgcgctatgctgacagagtgaaggagctgaagaagggcatcaagtgctgcacctctgtgaccagcaggaacagaacatctggcaacagcagccccaagaggatccagagcagccctggggccctgtctgaggacaagtgcagccccaagaaggtgaagctgggcttccagcagagcctgactgtggccgcccctggcagcacccggggcaaggtgcaccccctgaccagccacccccccaacatccccttcaccagcgcccccaaggtgtctgggaagagaggaggcagccggggcagccccagccaggagtgggtgatccacgccagccctgtgaagggcaccgtgcgcagcggccacgtggccaagaagaagccagaggagagcgcccccctgtgcagcgagaagaacaggatgggcaacaagacagtgctgggctgggagagccgggccagcggccctggagagggcctggtgcggggcaagctgagcaccaagtgcaagaaggtgcagacagtgcagcctgtgcagaagcagctggtgtcccgggtggagctgagctttggaaatgcccaccacagagctgagtacagccaggacagccagaggggcaccccagcccggcctgccagcgaggcctggaccaacatccccccccaccagaaggagcgggaggagcacctgcgcttctaccaccagcagttccagcagccccccctgctgcagcagaagctgaagtaccagcccctgaagaggagcctgcggcagtacagacctcctgagggccagctgaccaatgagaccccacccctcttccacagctacagtgaaaatcatgatggagcccaggtggaggagctggatgacagcgacttcagcgaggacagcttcagccacatcagcagccagagggccaccaagcagaggaacaccctggagaacagcgaggacagcttcttcctgcaccagacctggggccagggccctgagaagcaggtggccgagcggcagcagagcctcttcagcagccccaggactggagacaagaaggacctgaccaagtcctgggtggacagccgggaccccatcaaccaccggcgggccgccctggaccacagctgcagccccagcaagggccctgtggactggagccgggagaacagcaccagcagcggccccagcccccgggacagcctggccgagaagccctactgcagccaggtggacttcatctaccggcaggagcggggcggcggcagcagctttgacctgaggaaggatgccagccagagcgaggtgtctggagaaaatgaaggcaacctgcccagccctgaggaggatggcttcaccatcagcctgagccacgtggccgtgcccggcagcccagaccagagggacacagtgaccacccccctgcgggaggtgtctgcagatggccccatccaggtgaccagcacagtgaagaatggacatgctgtgcctggagaggacccccggggccagctgggcacccacgccgagtatgccagcggcctgatgagccccctgaccatgagcctgctggagaacccagacaatgaaggcagcccccccagcgagcagctggtgcaggatggagccacccacagcctggtggccgagagcactggaggccctgtggtgagccacacagtgcccagcggggaccaggaggccgccctgcctgtgtcctctgccaccaggcacctgtggctgagcagcagccccccagacaacaagccaggaggagacctgcctgccctgagccccagccccatccggcagcaccctgctgacaagctgcccagccgggaggccgacctgggggaggcctgccagagccgggagaccgtgctcttcagccatgagcacatgggcagcgagcagtatgatgctgatgctgaggagaccggcctggatggctcctggggcttccctgggaagcccttcaccaccatccacatgggcgtgccccacagcggccccaccctgacccccaggacaggcagcagtgatgtggccgaccagctgtgggcccaggagaggaagcaccccacccggctgggctggcaggagtttggcctgagcacagaccccatcaagctgccctgcaacagtgaaaatgtgacctggctgaagccccggcccatcagccgctgcctggcccggcccagcagccccctggtgcccagctgcagccccaagacagctggcaccctgcggcagcccaccctggagcaggcccagcaggtggtgatccgggcccaccaggagcagctggatgagatggccgagctgggcttcaaggaggagaccctgatgagccagctggccagcaatgactttgaagattttgtgacccagctggatgagatcatggtgctgaagagcaagtgcatccagagcctgcggagccagctgcagctgtacctgacctgccacggccccacagctgcccctgagggcaccgtgcccagctag

SEQ ID NO: 258466 - DNA, 4107 bp, Artificial Sequence
  derived and/or modified sequence
atggcctcctggctgtatgaatgtctgtgtgaggccgagctggcccagtactacagccacttcaccgccctgggcctgcagaagattgatgagctggccaagatcaccatgaaggactacagcaagctgggcgtgcatgacatgaatgacaggaagaggctcttccagctgatcaagatcatcaagatcatgcaggaggaggacaaggctgtgtccatccctgagcggcacctgcagaccagcagcctgcgcatcaagagccaggagctgcggagcggcccccggcggcagctgaactttgacagccctgctgacaacaaggacagaaatgccagcaatgatggctttgagatgtgcagcctgagtgacttcagcgccaatgagcagaagagcacctacctgaaggtgctggagcacatgctgcctgatgacagccagtaccacaccaagacaggcatcctgaatgccacagctggggacagctatgtgcagacagagatcagcaccagcctcttcagccccaactacctgagcgccatcctgggggactgtgacatccccatcatccagaggatcagccacgtgtctggctacaactacggcatcccccacagctgcatccggcagaacaccagcgagaagcagaacccctggacagagatggagaagatccgggtgtgtgtgaggaagaggcccctgggcatgagggaggtgagaagaggagagatcaacatcatcaccgtggaggacaaggagaccctgctggtgcatgagaagaaggaggccgtggacctgacccagtacatcctgcagcacgtgttctactttgatgaggtgtttggagaggcctgcaccaaccaggatgtgtacatgaagaccacccaccccctcatccagcacatcttcaatggaggaaatgccacctgctttgcctacggccagacaggagctgggaagacctacaccatgattggcacccatgagaaccctggcctgtatgccctggccgccaaggacatcttccggcagctggaggtgtcccagcccaggaagcacctgtttgtgtggatctccttctatgagatctactgcggccagctgtatgacctgctgaacagaaggaagaggctgtttgcccgggaggacagcaagcacatggtgcagatcgtgggcctgcaggagctgcaggtggacagcgtggagctgctgctggaggtgatcctgaagggcagcaaggagaggagcactggagccactggagtgaatgctgacagcagccgcagccacgccgtcatccagatccagatcaaggacagcgccaagaggaccttcggccgcatctccttcatcgacctggccggcagcgagagagctgctgatgcccgggacagcgaccggcagaccaagatggagggcgctgagatcaaccagagcctgctggccctgaaggagtgcatccgggccctggaccaggagcacacccacacccccttccggcagagcaagctgacccaggtgctgaaggacagcttcatcggaaatgccaagacctgcatgattgccaacatcagccccagccacgtggccacagagcacaccctgaacaccctgcgctatgctgacagagtgaaggagctgaagaagggcatcaagtgctgcacctctgtgaccagcaggaacagaacatctggcaacagcagccccaagaggatccagagcagccctggggccctgtctgaggacaagtgcagccccaagaaggtgaagctgggcttccagcagagcctgactgtggccgcccctggcagcacccggggcaaggtgcaccccctgaccagccacccccccaacatccccttcaccagcgcccccaaggtgtctgggaagagaggaggcagccggggcagccccagccaggagtgggtgatccacgccagccctgtgaagggcaccgtgcgcagcggccacgtggccaagaagaagccagaggagagcgcccccctgtgcagcgagaagaacaggatgggcaacaagacagtgctgggctgggagagccgggccagcggccctggagagggcctggtgcggggcaagctgagcaccaagtgcaagaaggtgcagacagtgcagcctgtgcagaagcagctggtgtcccgggtggagctgagctttggaaatgcccaccacagagctgagtacagccaggacagccagaggggcaccccagcccggcctgccagcgaggcctggaccaacatccccccccaccagaaggagcgggaggagcacctgcgcttctaccaccagcagttccagcagccccccctgctgcagcagaagctgaagtaccagcccctgaagaggagcctgcggcagtacagacctcctgagggccagctgaccaatgagaccccacccctcttccacagctacagtgaaaatcatgatggagcccaggtggaggagctggatgacagcgacttcagcgaggacagcttcagccacatcagcagccagagggccaccaagcagaggaacaccctggagaacagcgaggacagcttcttcctgcaccagacctggggccagggccctgagaagcaggtggccgagcggcagcagagcctcttcagcagccccaggactggagacaagaaggacctgaccaagtcctgggtggacagccgggaccccatcaaccaccggcgggccgccctggaccacagctgcagccccagcaagggccctgtggactggagccgggagaacagcaccagcagcggccccagcccccgggacagcctggccgagaagccctactgcagccaggtggacttcatctaccggcaggagcggggcggcggcagcagctttgacctgaggaaggatgccagccagagcgaggtgtctggagaaaatgaaggcaacctgcccagccctgaggaggatggcttcaccatcagcctgagccacgtggccgtgcccggcagcccagaccagagggacacagtgaccacccccctgcgggaggtgtctgcagatggccccatccaggtgaccagcacagtgaagaatggacatgctgtgcctggagaggacccccggggccagctgggcacccacgccgagtatgccagcggcctgatgagccccctgaccatgagcctgctggagaacccagacaatgaaggcagcccccccagcgagcagctggtgcaggatggagccacccacagcctggtggccgagagcactggaggccctgtggtgagccacacagtgcccagcggggaccaggaggccgccctgcctgtgtcctctgccaccaggcacctgtggctgagcagcagccccccagacaacaagccaggaggagacctgcctgccctgagccccagccccatccggcagcaccctgctgacaagctgcccagccgggaggccgacctgggggaggcctgccagagccgggagaccgtgctcttcagccatgagcacatgggcagcgagcagtatgatgctgatgctgaggagaccggcctggatggctcctggggcttccctgggaagcccttcaccaccatccacatgggcgtgccccacagcggccccaccctgacccccaggacaggcagcagtgatgtggccgaccagctgtgggcccaggagaggaagcaccccacccggctgggctggcaggagtttggcctgagcacagaccccatcaagctgccctgcaacagtgaaaatgtgacctggctgaagccccggcccatcagccgctgcctggcccggcccagcagccccctggtgcccagctgcagccccaagacagctggcaccctgcggcagcccaccctggagcaggcccagcaggtggtgatccgggcccaccaggagcagctggatgagatggccgagctgggcttcaaggaggagaccctgatgagccagctggccagcaatgactttgaagattttgtgacccagctggatgagatcatggtgctgaagagcaagtgcatccagagcctgcggagccagctgcagctgtacctgacctgccacggccccacagctgcccctgagggcaccgtgcccagctag

SEQ ID NO: 258467 - DNA, 3477 bp, Artificial Sequence
  derived and/or modified sequence
atggcctcctggctgtatgaatgtctgtgtgaggccgagctggcccagtactacagccacttcaccgccctgggcctgcagaagattgatgagctggccaagatcaccatgaaggactacagcaagctgggcgtgcatgacatgaatgacaggaagaggctcttccagctgatcaagatcatcaagatcatgcaggaggaggacaaggctgtgtccatccctgagcggcacctgcagaccagcagcctgcgcatcaagagccaggagctgcggagcggcccccggcggcagctgaactttgacagccctgctgacaacaaggacagaaatgccagcaatgatggctttgagatgtgcagcctgagtgacttcagcgccaatgagcagaagagcacctacctgaaggtgctggagcacatgctgcctgatgacagccagtaccacaccaagacaggcatcctgaatgccacagctggggacagctatgtgcagacagagatcagcaccagcctcttcagccccaactacctgagcgccatcctgggggactgtgacatccccatcatccagaggatcagccacgtgtctggctacaactacggcatcccccacagctgcatccggcagaacaccagcgagaagcagaacccctggacagagatggagaagatccgggtgtgtgtgaggaagaggcccctgggcatgagggaggtgagaagaggagagatcaacatcatcaccgtggaggacaaggagaccctgctggtgcatgagaagaaggaggccgtggacctgacccagtacatcctgcagcacgtgttctactttgatgaggtgtttggagaggcctgcaccaaccaggatgtgtacatgaagaccacccaccccctcatccagcacatcttcaatggaggaaatgccacctgctttgcctacggccagacaggagctgggaagacctacaccatgattggcacccatgagaaccctggcctgtatgccctggccgccaaggacatcttccggcagctggaggtgtcccagcccaggaagcacctgtttgtgtggatctccttctatgagatctactgcggccagctgtatgacctgctgaacagaaggaagaggctgtttgcccgggaggacagcaagcacatggtgcagatcgtgggcctgcaggagctgcaggtggacagcgtggagctgctgctggaggtgatcctgaagggcagcaaggagaggagcactggagccactggagtgaatgctgacagcagccgcagccacgccgtcatccagatccagatcaaggacagcgccaagaggaccttcggccgcatctccttcatcgacctggccggcagcgagagagctgctgatgcccgggacagcgaccggcagaccaagatggagggcgctgagatcaaccagagcctgctggccctgaaggagtgcatccgggccctggaccaggagcacacccacacccccttccggcagagcaagctgacccaggtgctgaaggacagcttcatcggaaatgccaagacctgcatgattgccaacatcagccccagccacgtggccacagagcacaccctgaacaccctgcgctatgctgacagagtgaaggagctgaagaagggcatcaagtgctgcacctctgtgaccagcaggaacagaacatctggcaacagcagccccaagaggatccagagcagccctggggccctgtctgaggacaagtgcagccccaagaaggtgaagctgggcttccagcagagcctgactgtggccgcccctggcagcacccggggcaaggtgcaccccctgaccagccacccccccaacatccccttcaccagcgcccccaaggtgtctgggaagagaggaggcagccggggcagccccagccaggagtgggtgatccacgccagccctgtgaagggcaccgtgcgcagcggccacgtggccaagaagaagccagaggagagcgcccccctgtgcagcgagaagaacaggatgggcaacaagacagtgctgggctgggagagccgggccagcggccctggagagggcctggtgcggggcaagctgagcaccaagtgcaagaaggtgcagacagtgcagcctgtgcagaagcagctggtgtcccgggtggagctgagctttggaaatgcccaccacagagctgagtacagccaggacagccagaggggcaccccagcccggcctgccagcgaggcctggaccaacatccccccccaccagaaggagcgggaggagcacctgcgcttctaccaccagcagttccagcagccccccctgctgcagcagaagctgaagtaccagcccctgaagaggagcctgcggcagtacagacctcctgagggccagctgaccaatgagaccccacccctcttccacagctacagtgaaaatcatgatggagcccaggtggaggagctggatgacagcgacttcagcgaggacagcttcagccacatcagcagccagagggccaccaagcagaggaacaccctggagaacagcgaggacagcttcttcctgcaccagacctggggccagggccctgagaagcaggtggccgagcggcagcagagcctcttcagcagccccaggactggagacaagaaggacctgaccaagtcctgggtggacagccgggaccccatcaaccaccggcgggccgccctggaccacagctgcagccccagcaagggccctgtggactggagccgggagaacagcaccagcagcggccccagcccccgggacagcctggccgagaagccctactgcagccaggtggacttcatctaccggcaggagcggggcggcggcagcagctttgacctgaggaaggatgccagccagagcgaggtgtctggagaaaatgaaggcaacctgcccagccctgaggaggatggcttcaccatcagcctgagccacgtggccgtgcccggcagcccagaccagagggacacagtgaccacccccctgcgggaggtgtctgcagatggccccatccaggtgaccagcacagtgaagaatggacatgctgtgcctggagaggacccccggggccagctgggcacccacgccgagtatgccagcggcctgatgagccccctgaccatgagcctgctggagaacccagacaatgaaggcagcccccccagcgagcagctggtgcaggatggagccacccacagcctggtggccgagagcactggaggccctgtggtgagccacacagtgcccagcggggaccaggaggccgccctgcctgtgtcctctgccaccaggcacctgtggctgagcagcagccccccagacaacaagccaggaggagacctgcctgccctgggccctggagagaagaccagctacaaggcctggctggccggcgtgtggtttgtgcaccggccccaccaggtggccctgcagcagtag

SEQ ID NO: 258468 - DNA, 3705 bp, Artificial Sequence
  derived and/or modified sequence
atggccagctggctgtacgagtgcctgtgcgaggccgagctggcccaatattacagccactttaccgcactgggcctgcagaagatcgatgagctggccaagattacgatgaaggactatagtaagctgggcgtgcatgatatgaatgatcggaagcggctgtttcagctcattaaaatcatcaaaattatgcaggaagaggacaaggccgtgtctatccctgagagacacctccagacatcctccctgaggatcaagagtcaggagctgcgaagcggccctagacgacagctcaactttgattctcctgctgacaacaaagaccgaaacgcaagtaacgacggcttcgagatgtgttctttaagcgacttctccgcgaacgaacagaagtccacatatctgaaggttctggagcacatgctccctgacgattcgcaataccacactaaaaccggcatcctgaacgctacagccggggattcatacgttcaaacagagatctccactagcttgttttcacccaactatctctctgcaatccttggggactgtgacatcccaatcattcagagaatatcacacgtgtccgggtacaactatgggatcccccactcctgtatccgccagaatacgtctgagaaacagaatccctggaccgagatggagaaaatccgagtctgtgtacggaagaggcccctgggcatgcgcgaagtgagacgaggggaaatcaacatcattacggtcgaggataaagagacgctgttagttcatgagaaaaaggaagcagttgatttaacccagtacatcctacaagtgatcctcaaggggtccaaagagcggtcaacaggcgcaacaggcgtcaatgctgattcctctaggtctcatgccgtgatacagatacagatcaaagattcagccaagaggacttttggtcggattagcttcatcgatttggcaggttcggaaagggccgccgacgcaagagacagtgaccggcagacaaagatggagggcgccgagatcaatcaaagcctcctggccctcaaggagtgtatacgcgctctggatcaggagcatacgcacacaccctttcgccagtcaaagttgacacaggttttgaaagacagcttcatcggaaacgccaagacctgtatgatcgccaacatcagcccgagtcacgtagccacagagcatacactgaacaccctgagatacgctgacagagtcaaagaacttaagaaaggaattaagtgctgcacaagtgtgacatccagaaatcggacaagcgggaattcttcaccgaagcgcatccagtccagcccgggtgcactgtctgaagataagtgctctcctaagaaagtgaagctcgggtttcagcagtcactgaccgtggcagccccggggagtactagagggaaggtacatccacttacttctcaccctcctaacatcccattcacctctgcccctaaagtaagtggtaagcgaggggggtccagaggcagtccgtcacaggagtgggttatacacgcttctccagttaaaggaactgtgaggtctggacatgttgccaagaaaaaacccgaagagagtgctcccctgtgcagtgagaagaatcgcatgggcaataagacggtgctgggctgggaaagccgtgcctcaggcccgggtgaagggctcgtgaggggcaaactctcaacaaagtgtaagaaagtgcagactgtgcaacccgtgcaaaagcagctagtgtctcgtgtcgaactgtcattcggtaacgcccaccatcgggccgagtatagccaggactcccagagaggcacccctgcacgcccagcatccgaggcgtggacaaacattccaccccatcaaaaagagagggaggagcatcttcggttctaccaccagcagttccagcagccaccattattacagcagaaattgaagtaccagcccttaaagcgctctttgaggcagtatagaccaccagaagggcaactcaccaacgaaacacctccactgtttcacagctactcggagaaccacgacggagcccaggtggaggagctggacgactctgatttttctgaagactccttttctcatatcagctcccagcgggctactaaacaacgcaacacactagagaattcggaggatagcttctttttgcatcaaacgtgggggcaggggccagaaaaacaagtggctgaaaggcaacaaagcctgttcagttctcccaggacaggcgacaagaaagatctcactaaatcctgggtggactcacgggacccaattaaccataggcgggccgcgctcgaccactcctgctctccctccaaaggacctgtggattggtcaagagaaaacagcacatcgagcggtccgtccccgagggactccctagccgaaaagccttattgtagtcaagtagactttatctatcgccaggaacggggtggagggtcttcatttgacctgcgcaaggatgcctcccagtccgaggtctcaggggaaaacgagggcaatttaccatctcccgaagaagacggctttactatttctctgtcgcacgtggccgtccctggatcgcccgaccagcgcgacactgtgaccacgcccctcagagaggtgagcgccgacggaccaatacaggtaacatccaccgtcaagaatggtcacgccgtcccaggcgaggaccctaggggacagttgggaacccacgctgagtacgcttccggcttgatgtctccacttacaatgtccctgttagagaatcccgacaatgagggtagcccaccctccgagcagttagttcaggacggagcaacccattccctggtcgctgagtctacaggagggcctgttgtatctcataccgtcccatctggcgaccaagaggctgcactgcctgtttcttccgctaccagacacctgtggctgagctcatcccctcccgacaacaaacctggcggcgacctgccagctctgtctccgtctcccattcggcagcatccagccgataagctgccttccagggaggcagacttgggggaggcttgtcaatcaagggagaccgtcctcttcagtcacgaacacatggggagtgaacagtatgacgccgacgccgaggagactggtctcgacggctcatggggcttcccagggaagcccttcactactatccatatgggggtacctcacagtggaccaactctgactcctaggaccgggtcctccgacgtagccgatcaattgtgggcccaggaaaggaaacatcccacgagactgggctggcaggaattcgggctcagtaccgaccccataaaattaccctgcaatagcgaaaatgtcacctggcttaaaccacgccccatttcccggtgcctggcaagaccctcgtctcccctggtcccctcgtgctcacctaagactgcggggaccctgagacaaccaacacttgaacaggcccagcaggtcgtgatccgggcccatcaggaacagcttgatgaaatggctgagctcggctttaaagaagagactctgatgagccagctagcatctaacgactttgaggacttcgtgactcagttagatgaaatcatggtgctgaagtcgaaatgcatccagtcgctccgatcccagctccagctttaccttacctgtcacggccctactgccgcacccgaagggactgttccttcatag

SEQ ID NO: 258469 - DNA, 4107 bp, Artificial Sequence
  derived and/or modified sequence
atggccagctggctgtacgagtgcctgtgcgaggccgagctggcccagtactattctcattttacagcgttgggtctgcagaaaattgacgagttggcaaagatcaccatgaaagactactctaagcttggcgtgcatgatatgaacgacaggaaacgactgtttcagttgattaagattattaagatcatgcaagaggaagacaaggccgtatctatccctgaacgtcacttacagacttctagtctccggatcaagtcccaagaattgcgatccggtcctagacggcagctgaatttcgattcacctgccgataataaggaccggaatgcctctaacgacggtttcgaaatgtgctctctgtctgacttcagcgctaatgagcagaaatctacttacctaaaagttctggaacatatgctgcccgacgactcacaatatcacaccaagacagggatattgaatgcaaccgcgggggactcgtatgtgcagactgagattagcacctctctcttttcaccaaactacctcagtgctatactgggagactgtgacattcctataattcagagaatttctcatgtcagcggatacaattacgggattcctcacagctgtatacgacagaacactagtgagaagcagaatccatggactgaaatggaaaaaattagggtctgcgtacggaagcgaccccttggaatgagggaagtccgacggggggagattaacattatcacagtggaagataaagaaacactcttggttcacgaaaagaaggaggccgtggacctgactcagtacatcttgcagcatgttttctatttcgatgaagtgttcggcgaggcctgcactaaccaggacgtttatatgaaaactacacatcctctcattcagcatatctttaacggcggcaatgccacctgcttcgcttacggccaaaccggcgccggcaagacctatacaatgataggaacccatgagaaccctggactgtatgccctcgccgccaaggacatcttccgccagctggaagtaagccagccacgtaaacacctgtttgtatggattagcttctacgaaatttactgtggacaattgtatgatttactaaacagacgcaagcggctcttcgcgcgtgaggacagcaaacacatggtgcaaatagtcggcctgcaggaactccaggtggactcggtggagcttctgctcgaagtaattttgaaaggatccaaggaaagatctacaggggcgaccggtgttaatgccgattcaagcaggagccacgcagtcattcaaatacagataaaagactcagcgaagaggacattcggacggatatcttttatcgacctcgccggcagcgaacgtgccgcagacgctcgggatagcgaccgtcagacaaagatggagggagcggagatcaatcaatcgctgctagcgctgaaagaatgcatcagggccctcgaccaagagcacacgcatacaccctttcggcagagtaaactcactcaggtgttgaaggattcattcattggcaatgcaaagacttgcatgattgcaaacatctctccctcccatgttgcaacagagcacactctcaatactttaaggtacgctgacagagttaaggaacttaagaaaggcataaagtgctgcacctctgtgacatcacgtaaccggacctctgggaattcttccccgaagagaatccaatcttcccctggtgcgctgtccgaggataagtgttcgcccaagaaagtgaaactgggctttcagcagtccctgaccgtggctgccccaggctctacccggggcaaggtccacccattgacatcacatccccccaatatcccctttacatccgcccccaaagtatctgggaaacgtggaggctctaggggcagcccctcccaggaatgggtgattcacgcaagtcctgttaagggtactgtgaggtctgggcatgtggccaagaaaaagccggaggaaagtgcaccactctgttcagaaaagaacagaatgggcaataaaactgtcttaggttgggaaagtcgcgcatctggaccaggagagggcctcgtccgggggaaactatctaccaagtgtaaaaaagttcaaacagtccagcctgtacagaagcagctggtctctagagttgaactttcttttggaaatgcacaccacagggcagagtattcgcaggactcacagcggggcacacccgcccgccctgccagcgaggcttggactaacatcccccctcaccagaaggagcgagaggagcatttgcggttctaccatcaacagtttcagcaacctcccctgctgcaacaaaagcttaagtaccagcctctgaagagaagccttcggcagtaccggccccccgagggtcagcttacaaacgagactccccccttatttcactcttacagcgaaaatcacgatggcgctcaggtggaagagctggacgacagcgacttttctgaggatagctttagccacatttctagccagagggccacaaagcaaaggaatactctggaaaactcagaggacagtttcttcctgcatcagacttgggggcaaggtccggagaaacaggtagccgagcgtcagcaatcgcttttctcctcaccgcgcactggcgataagaaggacttgactaaatcctgggttgactctcgtgatcctatcaatcacaggcgagctgccttggatcattcctgttcgccctctaaggggcccgtggattggtcgcgagaaaactcgaccagtagcggaccatccccacgcgattcactcgcagagaaaccctattgcagccaggtggatttcatatacagacaggaacgtggaggcggatcatccttcgacctgagaaaagacgcgtctcagtcagaagtgtccggagaaaatgaaggcaacttgccatcacccgaggaagatgggttcaccataagtttaagccacgtggccgtgcctggctctcctgaccaaagagacaccgtgacaacacccctgcgggaggtctccgctgacggcccaatacaggtgacgtccacagtaaaaaatggccatgctgtgcctggagaggatcctcgcggacagctcggcactcatgcggaatacgccagcggactcatgagccctctcacgatgtctctgctggagaacccagataatgaaggtagtcccccatcagagcagctggtgcaggatggcgccacccacagcctcgtggctgagtctaccgggggtccagttgtgagccacaccgtaccatctggggaccaggaggcagctctacccgtgagctccgccactcgccacttatggctgtcttcctccccacccgataacaagcctggcggggatttgcctgctctcagtccctctcctattcggcagcatccggccgataagctgcccagtcgggaagccgacttaggggaagcatgtcagtcacgtgaaaccgtgctgttctcgcatgagcatatgggctccgagcaatacgacgccgacgcagaggagaccggccttgacggctcttggggatttcctggtaagccttttacgacgatccacatgggcgtgccacattctgggcccacgcttacaccacgaactgggagctctgacgtggcagatcagctgtgggcgcaggagagaaagcatcccacacggcttggatggcaggaatttggcctgtccactgaccctattaagcttccctgtaactcagagaacgtgacgtggctcaaacctcgacccatctccagatgcctggctaggccttcctccccactcgtgccgagttgttcccccaagacggccggcacacttagacagcccaccttggaacaggcccaacaggtcgtgatcagagcccaccaggaacagcttgacgaaatggctgagctggggtttaaagaagagacattgatgtcccaattggcttcaaatgatttcgaggattttgttactcagctagatgaaatcatggtgctcaaaagcaaatgcatccagtctcttcgatcgcagttacagctgtatctgacctgtcatggtcctactgccgctcctgaagggactgtgccttcatag

SEQ ID NO: 258470 - DNA, 4107 bp, Artificial Sequence
  derived and/or modified sequence
atggccagctggctgtacgagtgcctgtgcgaggccgagctggcccagtattactcccacttcacagctctaggtcttcagaagattgatgaacttgcaaagatcaccatgaaagactacagtaagctgggcgtccacgatatgaacgacaggaaaaggctcttccagctcattaagataattaaaatcatgcaggaagaggacaaggcagtgagcattccggaacggcatctacagaccagctccctgcggatcaaaagccaggaactccgtagtgggccaagacgccagctgaattttgactctcctgcggacaacaaggatcgcaacgcctccaatgatggattcgagatgtgctcattgagcgatttttccgctaatgagcagaagagcacatatcttaaagtattagaacacatgctgccagacgattcacagtatcacaccaaaaccgggattctaaacgccaccgccggagacagttacgtccagaccgagatatctacatccctgtttagtcccaactacctctctgcaatcttgggagactgtgacatccctatcattcaacggatatctcatgtgtcagggtacaattatggcatacctcatagttgcatacgccagaacaccagtgagaaacagaacccctggactgagatggagaagattagggtctgcgttcggaaacgtccactcggaatgcgcgaggtgcggaggggggaaatcaacatcatcaccgtcgaggacaaggagactctcctggtccatgaaaagaaagaggccgtcgacctaacccagtacattcttcagcacgtgttttacttcgatgaagtgttcggagaggcatgcaccaatcaagacgtctacatgaaaactacacaccccctcattcaacacattttcaacggcgggaacgccacctgcttcgcatacggccagacaggagctggcaaaacttacaccatgattgggactcacgaaaatcccggcctctatgctctggccgctaaggacatcttcaggcagttagaggtgagtcagccgagaaagcacttattcgtatggatatcattctatgagatttattgcggacagctctacgatcttctaaaccggcggaaaaggttgttcgcccgggaggattccaaacacatggtacaaattgtcggactgcaggagttgcaggttgacagcgttgagctgctcttggaggtaattcttaagggaagcaaagagaggagtaccggggccacaggggtcaatgccgattcttcacgatctcacgcagtgattcagattcaaatcaaagattctgccaaacgaacgtttggcagaattagtttcatagatctggctggatctgagagggctgcagacgctcgtgattccgataggcagacaaagatggaaggcgctgaaattaaccagtctcttctcgccctgaaggagtgcatccgagccctcgaccaggagcatacacacacacctttccggcagtccaagctaacccaagtgttgaaagactctttcattggaaacgctaagacttgtatgatcgcaaacatcagtccatctcacgttgccaccgagcatactctcaataccctgaggtatgccgaccgggttaaagaactgaagaaaggtataaaatgctgcacaagtgtgacaagtagaaaccgaacttctggcaattctagccctaaacgcatccagtcgagtccaggcgctctgagcgaggataagtgttcccccaagaaggttaaactaggtttccagcaatccctgaccgtggcggccccaggcagtactcggggcaaggtgcatccactcacgtctcatccccctaatatccccttcacatctgcaccaaaggtgagtgggaagcgcggaggcagccggggatcaccatctcaggagtgggttatccacgcctctcccgttaagggcaccgtaagatccggacatgttgccaaaaaaaaaccagaggaaagtgccccactatgctcggagaaaaacagaatggggaacaagaccgtgttggggtgggaatctcgggctagcgggcccggagagggcctggttcgagggaaactgagcaccaagtgtaaaaaggtgcagaccgtccaacctgtccagaaacagctggtgtcccgcgtcgaactgtctttcggtaacgcccaccacagggccgagtactctcaagacagtcagcggggcactccggcccgccccgcatcagaggcttggaccaacatacccccccaccagaaagagcgcgaagaacacctgcggttttatcaccaacaattccagcaacccccactgcttcaacagaaacttaagtaccagcctcttaaacgatccttgcggcagtatcgaccccctgaaggtcagctgaccaatgagacacctcctctctttcattcatactcagagaaccatgacggagcccaggtggaagaactggatgactctgatttctcagaggatagtttcagtcacatttcatcgcaacgagcaactaaacagcgaaatactctcgaaaactctgaggatagcttctttctgcatcagacttggggtcagggacctgaaaagcaggtggcagagcgacaacagtctctgttctcgagccctaggactggcgacaagaaggatctcactaagagctgggttgacagccgcgacccaattaaccaccgcagggccgctttggaccatagttgcagtccctcaaaagggcctgtagactggagccgcgaaaactccactagttctggcccatcaccaagggacagtcttgccgaaaagccttactgctctcaggtcgatttcatctacaggcaggaacgcggaggaggatcctcattcgacctaaggaaagacgcctcacagagcgaagtgagcggggagaatgagggcaatctgccttcccccgaagaagacggcttcaccattagtctttcccatgttgcagtgccaggttcgccagatcagcgtgacacagttactacacctctgcgcgaagtgtctgcagacgggcctatccaagttacttctacagtgaagaacggccacgctgttcccggggaagatccacgtggccagctcggcacacacgcagaatacgcttcgggcttgatgtcaccccttaccatgagtttactggagaacccagataatgaaggcagccctccatccgaacagctcgtacaggatggagccacacactcactggttgctgagagcacaggtggcccagtggtgtctcacaccgtccccagtggagatcaggaagccgctcttcccgtgagttctgctacacgccacttatggctgagttcctcgcccccagacaacaagcctgggggggatctgcctgccctgagcccgtcgcccataagacagcacccagccgataagttgcccagtcgagaagccgacctcggggaggcttgccagtccagagagacagtgctcttctcacacgagcacatggggagtgaacaatatgacgccgacgccgaggaaactggcctggatgggtcctggggttttcctggaaaaccctttactaccatccacatgggcgtgccccactctggtcccacccttaccccgcgaacaggaagtagcgacgtggcggaccagctgtgggctcaggaacggaaacacccgaccagactaggttggcaggagtttgggctgagcacagatccaatcaagttgccctgtaactcagaaaacgtgacgtggctcaaaccccgtccaatcagtcggtgcctcgctcggccatcgagcccactcgtaccttcttgctcacccaaaaccgcaggtaccctccgacagccaacactggaacaagcccagcaagtagtgatccgggctcaccaagagcaactggacgaaatggctgagctgggatttaaggaagaaactcttatgtctcaactggcgtcaaacgattttgaagactttgttacacaactggacgaaataatggttctcaagtccaaatgcatccagagtctcagaagccaactgcaactgtacctcacatgccatggacccacagcggctccagaggggaccgtacccagttag

SEQ ID NO: 258471 - DNA, 3477 bp, Artificial Sequence
  derived and/or modified sequence
atggccagctggctgtacgagtgcctgtgcgaggccgagctggcccagtattacagtcacttcaccgctctggggctgcagaagattgacgagctcgcaaagatcaccatgaaagactattcaaagttgggcgtgcatgatatgaacgaccgcaaacgtctgttccagctgattaagatcatcaaaatcatgcaggaagaggataaagctgtctccattcccgagagacacctgcagacgtcatcactccgcattaagagtcaagagcttcggagcggacccagacgccagctcaactttgactctcctgccgataataaggatcggaatgctagcaatgacggttttgaaatgtgttccctgtccgacttctccgcaaatgagcagaaaagcacctatcttaaagttctggaacacatgttgcctgacgactctcagtatcataccaagaccggaattcttaatgcgactgcgggcgactcttacgtgcagactgagatctccacatccctgtttagccctaactatctctccgccatcctgggcgactgcgacatcccaataatacagcgaatctctcacgtgtccggctacaactacgggatcccacactcatgtatccggcaaaacacatcagagaaacagaacccatggactgaaatggaaaaaatccgcgtttgcgtccgaaagagacctttggggatgagggaggtccgcagaggcgaaattaacataattacggtagaggataaggaaaccctgctcgtgcacgagaagaaggaagctgtggatctgacacaatatattttgcagcatgtgttttacttcgatgaggtgtttggcgaggcatgtactaaccaggatgtgtacatgaaaaccacacacccactaattcagcatatctttaacggaggaaatgccacatgcttcgcttatggccagacaggagcggggaagacttacactatgatcgggacacacgaaaatcctggactttatgccttggccgccaaggatatcttcagacagctggaggtctcccagcccagaaagcatctgttcgtttggatctcattctatgaaatatattgcggacagctttacgatctcctaaaccgaagaaagcgcttatttgcccgtgaggactcaaagcacatggtccagatcgtggggctccaggaactgcaagtggactcggtggaactactgcttgaagtgatcctgaaaggcagtaaagagcgtagtacgggggcaaccggagtgaacgctgattcaagccggtcccacgcagtgatacagatccagattaaggacagtgcaaaacggacctttggtaggatcagcttcatcgaccttgctgggtctgagcgagcagccgatgctcgggactcagataggcaaaccaaaatggaaggtgctgaaatcaaccagagcctcctagccttgaaagaatgcatacgtgccctggaccaggagcacacccacacgccctttcgacagtccaaattaacacaggttctcaaagattcatttatcggaaatgctaaaacatgcatgatcgcaaatatctctcccagtcacgtggccaccgagcatacactgaatactctccgatacgccgaccgcgtgaaagagctcaaaaagggaataaagtgttgcacatccgtaacctcacgcaacaggacatcaggtaattcttcacctaagcgcatccagagttccccgggggcactgtcagaggacaagtgtagtcccaagaaggtcaaactcggttttcagcagagcttaactgtagccgctcctgggagtacaagggggaaggtgcatccattgacaagccatccacctaacattccttttacctctgcccctaaagtgtccggtaagcgaggtggaagtcgagggtccccatcacaagagtgggtcattcatgcttcacctgtgaaaggcactgtccgtagcgggcatgtggccaagaagaaacctgaggaatccgcgccgctgtgttccgagaagaaccgtatggggaataagactgtgttggggtgggagagccgggcttcagggcccggagaagggcttgtccgcggcaagcttagcaccaagtgtaaaaaagtccaaacggtccaacccgtccaaaaacaactggtgagccgagttgagcttagctttggtaacgcccatcatcgggctgagtatagccaggacagtcagcgcggcacccccgctcgacccgcttctgaagcatggaccaatatcccccctcaccagaaagagcgggaagagcacctacggttttaccaccaacagttccagcaaccaccgctgttacagcaaaagctgaagtaccaacctctcaaacgctcccttcgtcagtatcgcccacctgagggacagctgaccaacgaaactccgcctctcttccactcctactctgagaatcatgacggcgcacaggtggaggaactggacgactccgatttttctgaggacagtttctcacatatcagcagccaaagagcgaccaagcagcggaacacccttgagaattccgaggactcattctttctccaccagacctggggccaggggccagaaaagcaggtcgccgagagacaacagtcactcttcagcagcccaagaaccggcgataagaaggatttaaccaaaagctgggtcgattctagagacccaataaatcatcggagggctgcacttgaccactcttgcagcccatctaaaggccccgtggactggagcagagaaaactcaacaagcagtggacctagcccacgggattcactagctgagaagccctattgctcgcaggttgactttatctatagacaggagagaggcggcgggagttcgtttgacctcagaaaggatgcatctcagtcagaggtctcaggtgagaacgaaggaaacttgccttctcctgaagaggacgggttcaccatctcattgtcccacgtggctgttcccggcagtcctgaccagcgcgacactgttacaacccctctcagggaggtctcagctgacggccctattcaggttactagcacggtgaagaatggacacgcagtgcctggagaggaccctcgtggacagcttggcacacacgccgaatatgcttcaggcctcatgagtcctctgactatgtcactgttggaaaaccctgataacgagggctctccacccagtgagcaactggtgcaggatggagccacccacagtctggtggccgaatctacggggggacctgtggtgtcccatacagtgcctagcggagaccaagaagctgccctgcccgtctcctccgcgacgcgtcacctgtggctgtcttcaagcccaccagacaacaaacccggtggagaccttcccgcacttggaccaggtgaaaagacctcttacaaagcctggctcgcaggagtctggtttgttcacaggccccaccaggtggctctccagcagtag

SEQ ID NO: 258472 - DNA, 3705 bp, Artificial Sequence
  derived and/or modified sequence
atggcatcatggctgtacgagtgtctctgtgaggccgagctcgctcaatactattcccacttcacagccctcgggctgcagaaaattgacgaactggctaagatcacaatgaaagactactctaaactcggggtgcatgacatgaacgatagaaagcgactgtttcaactgattaaaatcattaaaattatgcaggaggaagacaaagccgtgagtatccctgagcgccacttgcagacatcgagcttgcggattaaaagtcaggaactgcgctccggtccaaggaggcaactcaatttcgacagccctgccgacaataaggatcgaaacgcatcaaacgacgggttcgagatgtgcagtctcagcgatttcagcgccaacgaacagaagtcgacgtatctaaaagtgcttgaacatatgttgcctgacgactcgcagtaccacaccaagactgggatcctcaatgctaccgctggcgattcctacgtccagactgagatcagcacaagccttttcagtcctaattacctctctgccatcctgggcgactgcgacattcctattatccagcggatctcccacgtgagcggatacaattatggtattccccatagctgcatccgccagaacactagcgaaaaacaaaacccatggactgagatggagaaaattagggtgtgcgtccgcaagcgccctttgggcatgcgcgaggttcgtcgaggggaaataaacatcataacagtggaggataaggaaactctgttggttcatgagaagaaagaggccgtggatctgactcaatacatcctgcaggtcattctcaaagggagcaaagagcggagcactggtgcaactggcgtgaacgccgatagctcccgaagccatgcagtgattcaaattcagattaaagactcagcaaagcgtacgtttggcaggatctctttcattgacctcgccggatccgaaagagcggctgacgcgcgagactcagaccgtcaaaccaaaatggaaggcgctgagatcaaccagtctctgctcgccctaaaggaatgtattcgagcactggaccaagagcatactcataccccctttcgtcagtccaagttgacacaggtactgaaagactcgttcataggcaacgccaaaacctgcatgattgctaatatttcaccctcccacgtagccacagagcatactctcaacactcttcgctatgccgaccgggtgaaggagctcaaaaaaggcatcaagtgctgcacatctgtgactagccgcaacaggacttctggtaacagtagcccaaagcgcattcaatcatcaccgggtgcactgagcgaggataaatgcagccccaagaaagtgaaactggggttccagcagagcttgaccgtggctgcccctggcagcacaagagggaaggttcacccgttaactagtcacccacctaacattccgttcacatccgccccaaaggtgagcggcaagcgcggtggatctaggggctcaccctctcaggaatgggttatacacgcatcccccgtcaaaggcactgtccggagtggacacgtggctaaaaagaaacccgaggagtctgctcctctgtgctcagagaaaaaccggatgggaaacaaaaccgttctggggtgggaaagcagagcatctggccctggggagggacttgttcggggaaagctatctacaaaatgtaaaaaggtgcagactgttcagcctgtgcaaaagcaactggtgtccagggtggagctttctttcgggaacgcgcaccaccgcgctgagtatagtcaagacagccagagaggcacaccagcccgacctgcatccgaggcatggacaaacataccaccacaccaaaaagaacgggaagaacatcttagattctaccatcagcagtttcagcagccccctctgctgcaacagaaactgaagtaccaacctttaaaacggtctttacgacaatacaggccacccgaaggccaactcaccaatgaaaccccccctctgtttcactcttattctgaaaatcacgacggggctcaagtagaagagctggacgattctgatttctcagaggacagctttagtcatatttcctctcagagggctaccaaacaacgtaatacactggaaaactcagaggattctttctttctgcaccaaacatgggggcagggccctgagaagcaggttgccgagcggcagcagtctctgttttctagcccccgaactggggataagaaggatctcaccaaatcgtgggttgattcaagagacccgatcaatcatagacgcgctgcactggatcacagttgtagtcccagcaagggtcctgtcgactggagtagagaaaactccacttcttccggaccttcacctcgggactcgctggctgagaagccttactgctcacaggtggacttcatttacagacaggaaaggggaggtggaagcagcttcgacctgagaaaagatgcctctcagagcgaagtaagtggcgaaaatgagggcaatctgccatccccagaggaggacggctttaccattagcctttcacatgtggccgtgccaggaagcccagaccagagggacaccgtgactacacccttgagggaggtgtccgccgacgggccaatccaggtgacctcaaccgtgaagaacggccatgccgtcccaggagaggaccctcggggacagctgggcacccacgcggagtatgcatccggccttatgtctcctctgacaatgtcattgttggagaatcctgacaacgaaggatcgccccctagcgaacagcttgtgcaggacggtgcgacacatagcctcgtggccgaatctacaggcggtccagtcgtgagccacactgttcctagcggtgaccaagaggcggctctaccagtgagctctgcgacgaggcacttatggctgtcctcaagcccacccgataataaaccaggtggggacctccctgcattatctccctctcctattcggcagcatcctgcggacaagctgcctagtagagaggccgacctcggagaggcgtgtcagtctcgagagaccgttttgttctctcacgagcacatgggatccgaacagtatgatgccgacgcagaggaaacaggattggacggatcatggggttttcccggaaagccttttacaaccattcatatgggcgtgccacactcgggtccaacactcaccccccgaacgggaagttccgacgtggcagatcagctgtgggcccaggagagaaaacatcctaccagactaggttggcaggaattcggcttgagcacagatccgattaaacttccctgtaactcagaaaacgtgacctggctcaagccacgcccaatctcgagatgtctggcccgaccttcgtcacctctcgtgccaagttgctctcctaagaccgccggaactctccggcagcccacattggaacaggctcagcaagtggtgattagggctcatcaggagcagctggacgagatggcggagctgggcttcaaggaggaaactctgatgagccagctggcatccaacgatttcgaagactttgttacccagctggatgagattatggttttgaagtccaagtgtatccagagccttcggagccagctccagctctacctcacctgccatggaccgacggctgctcctgagggcaccgtgccttcctag

SEQ ID NO: 258473 - DNA, 4107 bp, Artificial Sequence
  derived and/or modified sequence
atggccagctggctttacgagtgcttgtgtgaggctgaactcgcccaatactactctcacttcaccgcactggggctccagaaaattgacgaactcgccaaaataaccatgaaagattattctaaactgggggttcatgatatgaatgatcgaaaacgtctatttcaattaattaagatcattaaaattatgcaagaggaagataaagccgtgtcgatccctgagaggcatctgcaaacctcctccctgaggattaaatcgcaggagctccggagtggtccgagaaggcaactcaactttgactcccccgcagacaataaggatcggaatgcaagcaatgatgggttcgaaatgtgttcattgtctgatttctccgctaatgagcaaaaaagcacttacttgaaggtgctggagcatatgctgccggatgactcacagtatcacacaaagactggaattttaaacgccaccgcaggcgacagttacgttcagacagagatcagcaccagtctgtttagccccaactatctgagtgctatcctcggcgattgcgacattcccattatccagaggattagccacgtcagtgggtacaattacggcattccacattcttgtatacgccagaacacaagtgaaaagcagaatccttggacagaaatggaaaaaatccgcgtgtgtgtccgcaaaaggcctctcgggatgcgagaagtacgcaggggcgagatcaacatcatcaccgtggaggacaaggaaaccctcctagttcatgagaagaaggaggctgtggacctcacacagtacattcttcagcatgtgttttactttgatgaagtgttcggcgaggcttgtaccaaccaagatgtatacatgaagacgactcaccctctgatccagcacatcttcaacggaggaaacgcaacatgtttcgcttatggccaaaccggtgctgggaaaacctataccatgatcggcacccatgaaaatcccggactctatgcactcgccgctaaggatatcttcagacagttggaggtgtctcagccccgtaagcatttgtttgtgtggatttctttctacgagatctactgtggccagctgtatgatctgctaaatcgacggaaacgtctattcgctcgggaggattccaagcacatggtacagatcgtcggactgcaagagctgcaggtagactccgtggagttgttacttgaagtgatcctgaaaggttccaaagagcggtcaacaggggcaacgggtgtgaatgcggacagttcccgatcccacgcggtgattcagattcagatcaaggattctgccaagcgcacttttggcagaatttcatttattgacctggcaggatcagaacgggcagcggacgccagggatagcgatagacagaccaaaatggagggcgcagaaattaatcagagcttacttgctcttaaagagtgtataagggctctcgatcaggagcacacccacactccattcagacaaagtaagctaacacaggttctgaaggactccttcattgggaacgctaaaacctgtatgattgccaatattagccccagtcatgtggcgactgaacacacgcttaacactcttcgctacgccgatcgagttaaagaactcaagaaaggaatcaagtgttgcacctccgtcacttctcgcaaccgaacttctggaaattcctcccccaagcggattcagagctcccccggagccttgtccgaggataagtgttcaccaaaaaaggttaaactgggatttcaacagtcactgaccgttgcagcgccaggttcaacgcggggaaaggtgcaccctctgacctctcatccccctaacataccctttacgtccgctccaaaagtatcggggaagagaggcggaagccgcggatctccgtcacaggaatgggtgatacatgcctcccctgtgaagggaacggtgaggagcggtcacgtggctaagaagaaacccgaggagagtgccccactgtgctccgaaaaaaaccgaatggggaacaaaactgtgctcggatgggagagccgggcatccggacccggagagggattggttcggggaaagctctccactaagtgcaaaaaagtacagaccgtgcagcccgtccagaagcagttggtgtcacgcgtggaattgtcattcggcaatgcccatcacagagccgagtattcacaagactcccaacgaggtactccggcaagacccgcttccgaggcatggaccaatattcctccccatcagaaggaaagagaagaacacttgagattttaccaccaacagtttcagcaaccacccttgcttcagcaaaagctgaagtaccagccgctaaagaggtcgttacgtcaataccgtccaccagaagggcaattgactaatgaaaccccacctctgtttcactcttacagcgagaatcacgatggagcacaggtcgaagagctcgacgactctgattttagcgaggatagtttttcccacatttctagtcagcgtgccacaaaacagcgtaatacactcgagaattctgaggacagcttttttctccatcagacctggggtcaggggcctgagaagcaggttgctgagaggcagcagagtctgttttcttctccacgaacgggagataaaaaggaccttactaaatcttgggttgattctagagacccaatcaatcaccgcagggctgcactggaccactcctgcagtccctctaaaggacctgtcgattggtctcgggagaattccacgtcatccgggccatcacccagggactcgctggccgaaaaaccttattgttcccaggtggacttcatttatcgccaggagagagggggaggtagttccttcgacctgcggaaggacgcctctcagagcgaggtaagcggcgagaatgagggcaacctgccgtcccccgaagaggacggcttcacaatctctttgtcacatgtggcagtgccgggatccccagaccagcgcgacaccgttactacccccttgcgcgaagtttcagccgacggacctatccaggtaacgagcaccgtcaaaaatgggcatgccgtgccaggggaggaccctaggggacaattgggaacgcatgctgaatatgcctctggtctaatgtcacccctcaccatgtcgctgctggagaatcctgacaacgaaggatctccaccaagcgagcagttggtccaggacggcgctacccactccctggtagctgaatccacgggtggccctgtggtatctcacacagtgccgtccggagaccaggaggcagcccttccagtgtcttctgcaacaaggcatctatggctttcttctagcccgcctgataataaacccggaggagacctcccagccttaagcccctctcctatcaggcaacatccagcagacaagctcccctcaagagaagcagacctgggcgaagcttgtcagtctagagagacggtgctgttctcacatgagcatatgggcagcgaacagtacgatgccgatgcagaggaaaccggcctggacgggagctggggtttccccggtaagccattcaccaccatccacatgggcgtgccacactccgggcctaccctcacaccaagaactggatcttctgatgtcgctgatcagctgtgggcacaggagcgcaaacaccccactcggctgggatggcaggaattcgggctgagtaccgacccaatcaaactaccctgtaacagtgagaatgtcacctggttgaagcctcgcccaattagccggtgtttagcacgaccctcttctcctctcgtgccttcttgcagccccaaaacagctggtacactccggcagccaaccctcgagcaagctcagcaggtggttataagggcccatcaagagcagctggatgaaatggctgagcttggattcaaggaggagaccttgatgtcacagctcgcttccaatgactttgaggatttcgttactcaattggatgagattatggttttaaaatccaagtgcattcagagtctccgcagccaattgcagctttatctgacatgccatggacccactgctgcgcctgagggtactgtaccaagctag

SEQ ID NO: 258474 - DNA, 4107 bp, Artificial Sequence
  derived and/or modified sequence
atggcctcttggttgtacgagtgcttgtgcgaagccgagctggcccagtactatagccatttcacagctctggggctccagaagattgatgagctagctaagattactatgaaagattacagcaagttaggagttcatgacatgaatgaccggaagagactttttcagctcattaagattatcaagatcatgcaggaggaggataaggccgtcagcattcccgagcgtcaccttcagacctcctccctgcggataaagagtcaggagctcaggtcggggccacggcgacagctgaattttgatagccccgcagataacaaagatagaaacgcctccaatgatggattcgagatgtgttctttgtccgatttttctgctaatgagcagaagtccacttacctcaaagtgctagaacatatgctgcctgacgattcccagtaccataccaagacgggcatacttaatgccacggccggtgacagttacgttcaaacagagatttctactagcctctttagccctaactatctttctgccatattgggggattgcgacattccgataatccagcggatatctcatgttagcggttataattacggcatccctcactcttgcattcgccagaacacatcagagaagcagaacccgtggactgagatggagaagatccgggtctgcgtgcgcaagcggccattgggtatgcgcgaggttaggaggggcgaaatcaacatcattaccgtggaagataaagagactctacttgttcatgaaaagaaggaagcggtggatctcactcagtacattctgcagcacgtgttctacttcgatgaagtgtttggcgaagcttgcacgaatcaggatgtgtatatgaagaccacgcatcctttgattcagcacatattcaatggtgggaacgctacatgcttcgcctacggccagaccggcgctggcaagacgtataccatgatcggcacccacgagaatcccggactgtacgcactcgctgccaaggatatcttccgtcagcttgaggtgtctcagcctagaaagcatctctttgtatggatctccttctacgagatttattgcggtcagctgtacgatctcctcaacagacgcaagcggctcttcgcccgagaggactccaaacacatggtccagatagtgggcctccaggagctgcaagtagatagtgtagagttgttactcgaagtcatactgaaaggctccaaagagagaagtactggcgcaacaggggtcaacgccgactctagcaggtctcacgctgtgatccagatccagatcaaagacagtgccaagcggacatttggtcgaatctctttcatcgacctggccggatcagaaagagcagcagatgccagggattcagaccgccagacaaagatggagggcgcagaaattaatcaaagtctactcgcattgaaggaatgtattcgcgcattggaccaggagcatactcacacccctttcaggcaaagtaagcttactcaggttctcaaagattcttttattggcaatgcaaaaacgtgtatgatcgctaacatttctccctcacacgtagctacagaacatacactgaataccctcagatatgctgaccgggtcaaggaacttaagaaaggaatcaagtgctgtacgagcgtgacctccaggaaccggacgtccggaaacagcagtcccaaaagaattcaatcatctccaggtgctttgtctgaggacaagtgcagccctaaaaaggtgaagttgggatttcagcaatctttgacggttgcagcacctggcagcacccgaggcaaggtacatcctttgaccagccaccccccaaacattccgtttacctccgcgccaaaggtctcagggaagcgcggtgggagccggggaagtccaagccaagagtgggtaatccatgcaagtcccgtgaagggcacggtccgctccggacatgtggctaaaaaaaagccagaggagtccgcacccctttgctcagaaaagaatcgcatgggcaacaaaactgttcttggctgggagtcacgcgcatccggaccaggggaggggctcgtacggggaaagttgagcaccaagtgtaagaaggtccagacagtacaacctgtacagaagcagctagtgtctcgcgttgagctctcctttggaaacgctcatcatcgggctgaatactctcaggactctcagaggggaacgcctgcacgtccagcgtctgaagcatggacaaatatccctcctcaccagaaagagagggaagaacacctgcgcttttaccaccagcagttccaacagcccccactgctccaacagaaactgaaataccagcccctaaagcgcagtctgagacagtacaggcccccagagggccagctcactaatgagacgcctccactttttcatagctactccgaaaaccacgacggagctcaggtcgaggagcttgacgacagtgatttcagtgaggactcgttctctcatatatcaagccagagggcaactaagcaacgcaatacactagagaatagtgaagacagcttctttctccaccaaacttggggacaggggccagagaagcaggtcgccgaaagacaacagagcttgttctctagcccaaggaccggagataagaaggacttaacgaaaagctgggtcgattcaagagatccgattaaccaccgcagagcggctcttgaccattcctgtagcccgagcaagggtcctgtggattggagtcgcgaaaatagcaccagctcgggcccatctccaagggactcactggccgaaaagccctattgttcccaggtcgactttatttatcggcaggagcgcggaggtggctcctcattcgatctcagaaaagacgcttcacaatccgaggtgtcaggcgaaaatgagggaaaccttccttcacctgaagaagatggcttcacaatttctctgtctcacgtggcggtgcccggaagcccggaccagcgcgacactgttactacccctctgagggaagtgagtgcagacggaccgatccaagtaacttcaaccgtcaaaaatggccatgccgtacccggtgaggacccacggggacagctcgggactcacgcagaatacgcttcaggtctgatgtcacccctcactatgagcttgctggaaaatcccgataacgaaggcagccctcccagtgaacagctggtacaggatggcgcaacgcatagcctagtggctgagagtactgggggtccggtcgtgtcacacactgtgcctagcggtgaccaggaagcggcactaccagtgtctagtgcgacccgccacctgtggctgagtagctcaccacctgacaacaaacccggtggagatctaccggctcttagccccagtcccatcaggcagcatcccgcagacaagctgcccagccgggaggccgacttgggcgaggcttgtcagtccagggagacggtactgtttagccacgaacacatgggaagcgagcagtacgatgcagatgctgaggagaccggcctcgacggctcttggggattcccaggtaagcccttcactaccatccacatgggtgttcctcactccgggccaactctgacccctcggacgggatcctctgacgttgcggatcagctgtgggcccaggagcgcaaacatcccacccgcctgggatggcaagagttcggactgagcacggatcccatcaaactgccatgtaactcagagaatgtcacttggctaaagcccagacctatcagccgctgcctggccagaccttccagccctctagttccttcttgcagtcctaaaactgccggaaccttaagacagcctacactggaacaggcacaacaggttgtcatccgagcccaccaggagcagctggatgaaatggccgaactcggttttaaggaagaaactcttatgtcacagctcgcatcaaatgattttgaggatttcgtgacccagctggatgagatcatggtccttaaatccaagtgcatccaatctttgcgttctcagttacagctttacctgacttgtcatgggccaacagccgctcccgaggggacagtgccctcttag

SEQ ID NO: 258475 - DNA, 3477 bp, Artificial Sequence
  derived and/or modified sequence
atggcatcatggctgtacgagtgtctctgcgaggccgagttagctcaatattattcacatttcactgccctgggactgcaaaaaatcgacgaactggcaaaaattactatgaaagattactccaaacttggagtgcacgacatgaacgatcgcaaaaggctattccagttaatcaagatcattaagattatgcaggaagaggacaaagcagtttccatccctgagcggcatttacagacatctagcctgagaattaaaagtcaggagctgcgtagtggccctcgaagacagttgaatttcgacagtccagctgacaacaaagaccgtaatgcttcgaacgacggcttcgaaatgtgtagtctcagcgatttttcagcaaacgaacagaagtccacatacctgaaggtccttgagcatatgctgccggacgattctcagtaccatacgaagactggcatccttaacgccaccgccggagactcctatgtccagactgagataagtacatccctgttcagccccaattatttgtcggccattcttggcgattgtgacatcccgattatccagagaatctcacatgtctccggctataattacgggataccgcactcttgtatacgccagaacaccagcgagaagcagaatccatggactgagatggaaaagatacgagtatgcgtgaggaaaaggcccctcgggatgcgggaggttaggagaggtgagattaacatcattaccgttgaggataaggagactctattggtgcacgaaaagaaggaggccgttgacctgactcaatacatcctacagcacgttttttacttcgacgaggtgtttggtgaggcatgtaccaaccaagatgtctatatgaagaccactcacccactaattcagcatatctttaatggcggaaacgcaacatgtttcgcctacggacagacaggggcaggcaagacatacacgatgattggcactcatgagaacccgggtctatatgccctggccgcaaaggatatatttcgtcagctcgaggtgagccagcccagaaaacacttgtttgtctggatcagcttctatgaaatttactgcggtcagctctacgacttgttaaaccgtcgcaaacgacttttcgcgagagaagacagcaagcacatggtccaaatcgtcggcctccaagaacttcaggttgatagtgttgaactattactggaagtaattttaaagggcagcaaagagcgatccactggggcaacaggagtgaatgcggacagcagccgctcccatgccgtcattcaaatccagatcaaggattccgcgaagcggaccttcgggcgaatcagctttatcgatttggcaggtagcgaacgagccgctgatgcccgagactccgatcgacagactaagatggaaggtgctgagatcaatcagtccctgttagcgctgaaggagtgcatacgcgctctggaccaagagcacacccatactccttttagacagagtaaacttacccaggtacttaaagacagctttataggaaatgccaagacatgcatgatagcaaatatttctcctagtcatgtggccactgaacacacccttaatactctgaggtacgccgatcgagttaaagaactgaaaaaggggattaaatgctgcacatctgtgacctcgcggaaccggacaagtgggaacagcagtcctaagagaatacagtcatcgccgggtgctctgagtgaagataagtgttcgccaaagaaagttaagctcggctttcagcaaagcctgaccgtggccgcaccaggcagcaccaggggaaaggtccatccgttaacgagtcaccctcctaacatcccatttacttcagctcccaaagtgtccggcaaaaggggcggttctcgaggttcccccagccaggagtgggttattcacgcaagcccagtgaaaggaacagtgcgctctggacatgtggctaaaaagaagcccgaggaatcagccccactatgcagcgagaagaacagaatgggcaacaaaacggtgctgggttgggagtccagggcctcaggtccaggcgagggcctggtgcgcggaaagttgagtacgaaatgcaaaaaagtccagacggtccagcctgtccagaaacagttggtgtcgagggttgaactctccttcgggaacgcccatcaccgggctgagtacagccaggactcgcagcggggtacacctgcgagacctgcaagtgaagcctggacgaacatcccccctcaccagaaggagcgggaggaacatcttaggttctatcaccaacagttccagcaaccccctctgcttcagcagaaattaaagtatcagcccctaaagaggagcctcagacagtatcggccacccgaggggcagctgactaatgagaccccgccactgttccactcctattcagagaaccatgatggagcgcaagttgaagaattggacgattctgatttcagcgaagatagcttttcacacattagcagccaaagggcaactaagcagcggaatacactggagaactctgaggattctttcttcctgcaccagacttggggccaaggcccagaaaaacaggtggccgaacgacagcagtccctgttctcaagtcctcggacaggcgacaagaaagatcttaccaagtcctgggttgattctcgtgacccaatcaaccataggcgggctgctctggaccattcctgttctccaagcaagggcccagtcgattggagcagagagaactcaacctctagcggaccaagcccgcgtgactctctcgccgagaaaccctactgtagccaagtggattttatctacaggcaggagcggggaggaggcagtagctttgatctgcgcaaggatgcaagccagagtgaagtatccggggagaacgaaggtaatcttcccagtcctgaagaagacggattcactattagcctatctcacgtggcggtgcccggttcgccggatcagcgtgacactgtcactacacccctgcgcgaggtctcagcggatggacccatccaggtcacctccaccgtgaagaacggccacgccgtccccggagaggacccgagaggccagcttggtactcacgctgagtatgctagtggactgatgagccctttaactatgagcttgctagagaacccggataacgaagggagcccaccctccgaacaactggtccaggacggcgctacgcattctttggtcgcagagagcaccggtggacctgtcgtgtcacacactgtgccaagcggcgatcaagaggcggctctccctgtgtcttctgccaccaggcatctgtggctgtctagcagtcctccggataacaagccaggtggcgatctgccagctctgggcccaggcgaaaaaacttcttataaggcttggctggcaggcgtgtggttcgtacatcgtcctcatcaggtggcgctccagcagtag

SEQ ID NO: 258476 - DNA, 3705 bp, Artificial Sequence
  derived and/or modified sequence
atggccagctggctgtacgagtgcctgtgcgaggccgagctggcccagtactacagccacttcaccgccctgggcctgcagaagatcgacgagctggccaagatcaccatgaaggactacagcaagctgggcgtgcacgacatgaacgacagaaagagactgttccagctgatcaagatcatcaagatcatgcaggaggaggacaaggccgtgagcatccccgagagacacctgcagaccagcagcctgagaatcaagagccaggagctgagaagcggccccagaagacagctgaacttcgacagccccgccgacaacaaggacagaaacgccagcaacgacggcttcgagatgtgcagcctgagcgacttcagcgccaacgagcagaagagcacctacctgaaggtgctggagcacatgctgcccgacgacagccagtaccacaccaagaccggcatcctgaacgccaccgccggcgacagctacgtgcagaccgagatcagcaccagcctgttcagccccaactacctgagcgccatcctgggcgactgcgacatccccatcatccagagaatcagccacgtgagcggctacaactacggcatcccccacagctgcatcagacagaacaccagcgagaagcagaacccctggaccgagatggagaagatcagagtgtgcgtgagaaagagacccctgggcatgagagaggtgagaagaggcgagatcaacatcatcaccgtggaggacaaggagaccctgctggtgcacgagaagaaggaggccgtggacctgacccagtacatcctgcaggtgatcctgaagggcagcaaggagagaagcaccggcgccaccggcgtgaacgccgacagcagcagaagccacgccgtgatccagatccagatcaaggacagcgccaagagaaccttcggcagaatcagcttcatcgacctggccggcagcgagagagccgccgacgccagagacagcgacagacagaccaagatggagggcgccgagatcaaccagagcctgctggccctgaaggagtgcatcagagccctggaccaggagcacacccacacccccttcagacagagcaagctgacccaggtgctgaaggacagcttcatcggcaacgccaagacctgcatgatcgccaacatcagccccagccacgtggccaccgagcacaccctgaacaccctgagatacgccgacagagtgaaggagctgaagaagggcatcaagtgctgcaccagcgtgaccagcagaaacagaaccagcggcaacagcagccccaagagaatccagagcagccccggcgccctgagcgaggacaagtgcagccccaagaaggtgaagctgggcttccagcagagcctgaccgtggccgcccccggcagcaccagaggcaaggtgcaccccctgaccagccacccccccaacatccccttcaccagcgcccccaaggtgagcggcaagagaggcggcagcagaggcagccccagccaggagtgggtgatccacgccagccccgtgaagggcaccgtgagaagcggccacgtggccaagaagaagcccgaggagagcgcccccctgtgcagcgagaagaacagaatgggcaacaagaccgtgctgggctgggagagcagagccagcggccccggcgagggcctggtgagaggcaagctgagcaccaagtgcaagaaggtgcagaccgtgcagcccgtgcagaagcagctggtgagcagagtggagctgagcttcggcaacgcccaccacagagccgagtacagccaggacagccagagaggcacccccgccagacccgccagcgaggcctggaccaacatccccccccaccagaaggagagagaggagcacctgagattctaccaccagcagttccagcagccccccctgctgcagcagaagctgaagtaccagcccctgaagagaagcctgagacagtacagaccccccgagggccagctgaccaacgagaccccccccctgttccacagctacagcgagaaccacgacggcgcccaggtggaggagctggacgacagcgacttcagcgaggacagcttcagccacatcagcagccagagagccaccaagcagagaaacaccctggagaacagcgaggacagcttcttcctgcaccagacctggggccagggccccgagaagcaggtggccgagagacagcagagcctgttcagcagccccagaaccggcgacaagaaggacctgaccaagagctgggtggacagcagagaccccatcaaccacagaagagccgccctggaccacagctgcagccccagcaagggccccgtggactggagcagagagaacagcaccagcagcggccccagccccagagacagcctggccgagaagccctactgcagccaggtggacttcatctacagacaggagagaggcggcggcagcagcttcgacctgagaaaggacgccagccagagcgaggtgagcggcgagaacgagggcaacctgcccagccccgaggaggacggcttcaccatcagcctgagccacgtggccgtgcccggcagccccgaccagagagacaccgtgaccacccccctgagagaggtgagcgccgacggccccatccaggtgaccagcaccgtgaagaacggccacgccgtgcccggcgaggaccccagaggccagctgggcacccacgccgagtacgccagcggcctgatgagccccctgaccatgagcctgctggagaaccccgacaacgagggcagcccccccagcgagcagctggtgcaggacggcgccacccacagcctggtggccgagagcaccggcggccccgtggtgagccacaccgtgcccagcggcgaccaggaggccgccctgcccgtgagcagcgccaccagacacctgtggctgagcagcagcccccccgacaacaagcccggcggcgacctgcccgccctgagccccagccccatcagacagcaccccgccgacaagctgcccagcagagaggccgacctgggcgaggcctgccagagcagagagaccgtgctgttcagccacgagcacatgggcagcgagcagtacgacgccgacgccgaggagaccggcctggacggcagctggggcttccccggcaagcccttcaccaccatccacatgggcgtgccccacagcggccccaccctgacccccagaaccggcagcagcgacgtggccgaccagctgtgggcccaggagagaaagcaccccaccagactgggctggcaggagttcggcctgagcaccgaccccatcaagctgccctgcaacagcgagaacgtgacctggctgaagcccagacccatcagcagatgcctggccagacccagcagccccctggtgcccagctgcagccccaagaccgccggcaccctgagacagcccaccctggagcaggcccagcaggtggtgatcagagcccaccaggagcagctggacgagatggccgagctgggcttcaaggaggagaccctgatgagccagctggccagcaacgacttcgaggacttcgtgacccagctggacgagatcatggtgctgaagagcaagtgcatccagagcctgagaagccagctgcagctgtacctgacctgccacggccccaccgccgcccccgagggcaccgtgcccagctag

SEQ ID NO: 258477 - DNA, 4107 bp, Artificial Sequence
  derived and/or modified sequence
atggccagctggctgtacgagtgcctgtgcgaggccgagctggcccagtactacagccacttcaccgccctgggcctgcagaagatcgacgagctggccaagatcaccatgaaggactacagcaagctgggcgtgcacgacatgaacgacagaaagagactgttccagctgatcaagatcatcaagatcatgcaggaggaggacaaggccgtgagcatccccgagagacacctgcagaccagcagcctgagaatcaagagccaggagctgagaagcggccccagaagacagctgaacttcgacagccccgccgacaacaaggacagaaacgccagcaacgacggcttcgagatgtgcagcctgagcgacttcagcgccaacgagcagaagagcacctacctgaaggtgctggagcacatgctgcccgacgacagccagtaccacaccaagaccggcatcctgaacgccaccgccggcgacagctacgtgcagaccgagatcagcaccagcctgttcagccccaactacctgagcgccatcctgggcgactgcgacatccccatcatccagagaatcagccacgtgagcggctacaactacggcatcccccacagctgcatcagacagaacaccagcgagaagcagaacccctggaccgagatggagaagatcagagtgtgcgtgagaaagagacccctgggcatgagagaggtgagaagaggcgagatcaacatcatcaccgtggaggacaaggagaccctgctggtgcacgagaagaaggaggccgtggacctgacccagtacatcctgcagcacgtgttctacttcgacgaggtgttcggcgaggcctgcaccaaccaggacgtgtacatgaagaccacccaccccctgatccagcacatcttcaacggcggcaacgccacctgcttcgcctacggccagaccggcgccggcaagacctacaccatgatcggcacccacgagaaccccggcctgtacgccctggccgccaaggacatcttcagacagctggaggtgagccagcccagaaagcacctgttcgtgtggatcagcttctacgagatctactgcggccagctgtacgacctgctgaacagaagaaagagactgttcgccagagaggacagcaagcacatggtgcagatcgtgggcctgcaggagctgcaggtggacagcgtggagctgctgctggaggtgatcctgaagggcagcaaggagagaagcaccggcgccaccggcgtgaacgccgacagcagcagaagccacgccgtgatccagatccagatcaaggacagcgccaagagaaccttcggcagaatcagcttcatcgacctggccggcagcgagagagccgccgacgccagagacagcgacagacagaccaagatggagggcgccgagatcaaccagagcctgctggccctgaaggagtgcatcagagccctggaccaggagcacacccacacccccttcagacagagcaagctgacccaggtgctgaaggacagcttcatcggcaacgccaagacctgcatgatcgccaacatcagccccagccacgtggccaccgagcacaccctgaacaccctgagatacgccgacagagtgaaggagctgaagaagggcatcaagtgctgcaccagcgtgaccagcagaaacagaaccagcggcaacagcagccccaagagaatccagagcagccccggcgccctgagcgaggacaagtgcagccccaagaaggtgaagctgggcttccagcagagcctgaccgtggccgcccccggcagcaccagaggcaaggtgcaccccctgaccagccacccccccaacatccccttcaccagcgcccccaaggtgagcggcaagagaggcggcagcagaggcagccccagccaggagtgggtgatccacgccagccccgtgaagggcaccgtgagaagcggccacgtggccaagaagaagcccgaggagagcgcccccctgtgcagcgagaagaacagaatgggcaacaagaccgtgctgggctgggagagcagagccagcggccccggcgagggcctggtgagaggcaagctgagcaccaagtgcaagaaggtgcagaccgtgcagcccgtgcagaagcagctggtgagcagagtggagctgagcttcggcaacgcccaccacagagccgagtacagccaggacagccagagaggcacccccgccagacccgccagcgaggcctggaccaacatccccccccaccagaaggagagagaggagcacctgagattctaccaccagcagttccagcagccccccctgctgcagcagaagctgaagtaccagcccctgaagagaagcctgagacagtacagaccccccgagggccagctgaccaacgagaccccccccctgttccacagctacagcgagaaccacgacggcgcccaggtggaggagctggacgacagcgacttcagcgaggacagcttcagccacatcagcagccagagagccaccaagcagagaaacaccctggagaacagcgaggacagcttcttcctgcaccagacctggggccagggccccgagaagcaggtggccgagagacagcagagcctgttcagcagccccagaaccggcgacaagaaggacctgaccaagagctgggtggacagcagagaccccatcaaccacagaagagccgccctggaccacagctgcagccccagcaagggccccgtggactggagcagagagaacagcaccagcagcggccccagccccagagacagcctggccgagaagccctactgcagccaggtggacttcatctacagacaggagagaggcggcggcagcagcttcgacctgagaaaggacgccagccagagcgaggtgagcggcgagaacgagggcaacctgcccagccccgaggaggacggcttcaccatcagcctgagccacgtggccgtgcccggcagccccgaccagagagacaccgtgaccacccccctgagagaggtgagcgccgacggccccatccaggtgaccagcaccgtgaagaacggccacgccgtgcccggcgaggaccccagaggccagctgggcacccacgccgagtacgccagcggcctgatgagccccctgaccatgagcctgctggagaaccccgacaacgagggcagcccccccagcgagcagctggtgcaggacggcgccacccacagcctggtggccgagagcaccggcggccccgtggtgagccacaccgtgcccagcggcgaccaggaggccgccctgcccgtgagcagcgccaccagacacctgtggctgagcagcagcccccccgacaacaagcccggcggcgacctgcccgccctgagccccagccccatcagacagcaccccgccgacaagctgcccagcagagaggccgacctgggcgaggcctgccagagcagagagaccgtgctgttcagccacgagcacatgggcagcgagcagtacgacgccgacgccgaggagaccggcctggacggcagctggggcttccccggcaagcccttcaccaccatccacatgggcgtgccccacagcggccccaccctgacccccagaaccggcagcagcgacgtggccgaccagctgtgggcccaggagagaaagcaccccaccagactgggctggcaggagttcggcctgagcaccgaccccatcaagctgccctgcaacagcgagaacgtgacctggctgaagcccagacccatcagcagatgcctggccagacccagcagccccctggtgcccagctgcagccccaagaccgccggcaccctgagacagcccaccctggagcaggcccagcaggtggtgatcagagcccaccaggagcagctggacgagatggccgagctgggcttcaaggaggagaccctgatgagccagctggccagcaacgacttcgaggacttcgtgacccagctggacgagatcatggtgctgaagagcaagtgcatccagagcctgagaagccagctgcagctgtacctgacctgccacggccccaccgccgcccccgagggcaccgtgcccagctag

SEQ ID NO: 258478 - DNA, 3477 bp, Artificial Sequence
  derived and/or modified sequence
atggccagctggctgtacgagtgcctgtgcgaggccgagctggcccagtactacagccacttcaccgccctgggcctgcagaagatcgacgagctggccaagatcaccatgaaggactacagcaagctgggcgtgcacgacatgaacgacagaaagagactgttccagctgatcaagatcatcaagatcatgcaggaggaggacaaggccgtgagcatccccgagagacacctgcagaccagcagcctgagaatcaagagccaggagctgagaagcggccccagaagacagctgaacttcgacagccccgccgacaacaaggacagaaacgccagcaacgacggcttcgagatgtgcagcctgagcgacttcagcgccaacgagcagaagagcacctacctgaaggtgctggagcacatgctgcccgacgacagccagtaccacaccaagaccggcatcctgaacgccaccgccggcgacagctacgtgcagaccgagatcagcaccagcctgttcagccccaactacctgagcgccatcctgggcgactgcgacatccccatcatccagagaatcagccacgtgagcggctacaactacggcatcccccacagctgcatcagacagaacaccagcgagaagcagaacccctggaccgagatggagaagatcagagtgtgcgtgagaaagagacccctgggcatgagagaggtgagaagaggcgagatcaacatcatcaccgtggaggacaaggagaccctgctggtgcacgagaagaaggaggccgtggacctgacccagtacatcctgcagcacgtgttctacttcgacgaggtgttcggcgaggcctgcaccaaccaggacgtgtacatgaagaccacccaccccctgatccagcacatcttcaacggcggcaacgccacctgcttcgcctacggccagaccggcgccggcaagacctacaccatgatcggcacccacgagaaccccggcctgtacgccctggccgccaaggacatcttcagacagctggaggtgagccagcccagaaagcacctgttcgtgtggatcagcttctacgagatctactgcggccagctgtacgacctgctgaacagaagaaagagactgttcgccagagaggacagcaagcacatggtgcagatcgtgggcctgcaggagctgcaggtggacagcgtggagctgctgctggaggtgatcctgaagggcagcaaggagagaagcaccggcgccaccggcgtgaacgccgacagcagcagaagccacgccgtgatccagatccagatcaaggacagcgccaagagaaccttcggcagaatcagcttcatcgacctggccggcagcgagagagccgccgacgccagagacagcgacagacagaccaagatggagggcgccgagatcaaccagagcctgctggccctgaaggagtgcatcagagccctggaccaggagcacacccacacccccttcagacagagcaagctgacccaggtgctgaaggacagcttcatcggcaacgccaagacctgcatgatcgccaacatcagccccagccacgtggccaccgagcacaccctgaacaccctgagatacgccgacagagtgaaggagctgaagaagggcatcaagtgctgcaccagcgtgaccagcagaaacagaaccagcggcaacagcagccccaagagaatccagagcagccccggcgccctgagcgaggacaagtgcagccccaagaaggtgaagctgggcttccagcagagcctgaccgtggccgcccccggcagcaccagaggcaaggtgcaccccctgaccagccacccccccaacatccccttcaccagcgcccccaaggtgagcggcaagagaggcggcagcagaggcagccccagccaggagtgggtgatccacgccagccccgtgaagggcaccgtgagaagcggccacgtggccaagaagaagcccgaggagagcgcccccctgtgcagcgagaagaacagaatgggcaacaagaccgtgctgggctgggagagcagagccagcggccccggcgagggcctggtgagaggcaagctgagcaccaagtgcaagaaggtgcagaccgtgcagcccgtgcagaagcagctggtgagcagagtggagctgagcttcggcaacgcccaccacagagccgagtacagccaggacagccagagaggcacccccgccagacccgccagcgaggcctggaccaacatccccccccaccagaaggagagagaggagcacctgagattctaccaccagcagttccagcagccccccctgctgcagcagaagctgaagtaccagcccctgaagagaagcctgagacagtacagaccccccgagggccagctgaccaacgagaccccccccctgttccacagctacagcgagaaccacgacggcgcccaggtggaggagctggacgacagcgacttcagcgaggacagcttcagccacatcagcagccagagagccaccaagcagagaaacaccctggagaacagcgaggacagcttcttcctgcaccagacctggggccagggccccgagaagcaggtggccgagagacagcagagcctgttcagcagccccagaaccggcgacaagaaggacctgaccaagagctgggtggacagcagagaccccatcaaccacagaagagccgccctggaccacagctgcagccccagcaagggccccgtggactggagcagagagaacagcaccagcagcggccccagccccagagacagcctggccgagaagccctactgcagccaggtggacttcatctacagacaggagagaggcggcggcagcagcttcgacctgagaaaggacgccagccagagcgaggtgagcggcgagaacgagggcaacctgcccagccccgaggaggacggcttcaccatcagcctgagccacgtggccgtgcccggcagccccgaccagagagacaccgtgaccacccccctgagagaggtgagcgccgacggccccatccaggtgaccagcaccgtgaagaacggccacgccgtgcccggcgaggaccccagaggccagctgggcacccacgccgagtacgccagcggcctgatgagccccctgaccatgagcctgctggagaaccccgacaacgagggcagcccccccagcgagcagctggtgcaggacggcgccacccacagcctggtggccgagagcaccggcggccccgtggtgagccacaccgtgcccagcggcgaccaggaggccgccctgcccgtgagcagcgccaccagacacctgtggctgagcagcagcccccccgacaacaagcccggcggcgacctgcccgccctgggccccggcgagaagaccagctacaaggcctggctggccggcgtgtggttcgtgcacagaccccaccaggtggccctgcagcagtag

SEQ ID NO: 258479 - protein, 909 aa, Artificial Sequence
  derived and/or modified sequence
MKKRRKVTSNLEKIHLGYHKDSSEGNVAVECDQVTYTHSAGRPTPEALHCYQELPPSPDQRKLLSSLQYNKNLLKYLNDDRQKQPSFCDLLIIVEGKEFSAHKVVVAVGSSYFHACLSKNPSTDVVTLDHVTHSVFQHLLEFLYTSEFFVYKYEIPLVLEAAKFLDIIDAVKLLNNENVAPFHSELTEKSSPEETLNELTGRLSNNHQCKFCSRHFCYKKSLENHLAKTHRSLLLGKKHGLKMLERSFSARRSKRNRKCPVKFDDTSDDEQESGDGSDNLNQENFDKEKSDRNDSEDPGSEYNAEEDELEEEMSDEYSDIEEQSEKDHNDAEEEPEAGDSVGNVHEGLTPVVIQNSNKKILQCPKCDKTFDRIGKYESHTRVHTGEKPFECDICHQRYSTKSNLTVHRKKHSNETEFHKKEHKCPYCNKLHASKKTLAKHVKRFHPENAQEFISIKKTKSESWKCDICKKSFTRRPHLEEHMILHSQDKPFKCTYCEEHFKSRFARLKHQEKFHLGPFPCDICGRQFNDTGNLKRHIECTHGGKRKWTCFICGKSVRERTTLKEHLRIHSGEKPHLCSICGQSFRHGSSYRLHLRVHHDDKRYECDECGKTFIRHDHLTKHKKIHSGEKAHQCEECGKCFGRRDHLTVHYKSVHLGEKVWQKYKATFHQCDVCKKIFKGKSSLEMHFRTHSGEKPYKCQICNQSFRIKKTLTKHLVIHSDARPFNCQHCNATFKRKDKLKYHIDHVHEIKSPDDPLSTSEEKLVSLPVEYSSDDKIFQTETKQYMDQPKVYQSEAKTMLQNVSAEVCVPVTLVPVQMPDTPSDLVRHTTTLPPSSHEILSPQPQSTDYPRAADLAFLEKYTLTPQPANIVHPVRPEQMLDPREQSYLGTLLGLDSTTGVQNISTNEHHS

SEQ ID NO: 258480 - DNA, 2730 bp, Artificial Sequence
  derived and/or modified sequence
atgaagaagagaagaaaggtgaccagcaacctggagaagatccacctgggctaccacaaggacagcagcgagggcaacgtggccgtggagtgcgaccaggtgacctacacccacagcgccggcagacccacccccgaggccctgcactgctaccaggagctgccccccagccccgaccagagaaagctgctgagcagcctgcagtacaacaagaacctgctgaagtacctgaacgacgacagacagaagcagcccagcttctgcgacctgctgatcatcgtggagggcaaggagttcagcgcccacaaggtggtggtggccgtgggcagcagctacttccacgcctgcctgagcaagaaccccagcaccgacgtggtgaccctggaccacgtgacccacagcgtgttccagcacctgctggagttcctgtacaccagcgagttcttcgtgtacaagtacgagatccccctggtgctggaggccgccaagttcctggacatcatcgacgccgtgaagctgctgaacaacgagaacgtggcccccttccacagcgagctgaccgagaagagcagccccgaggagaccctgaacgagctgaccggcagactgagcaacaaccaccagtgcaagttctgcagcagacacttctgctacaagaagagcctggagaaccacctggccaagacccacagaagcctgctgctgggcaagaagcacggcctgaagatgctggagagaagcttcagcgccagaagaagcaagagaaacagaaagtgccccgtgaagttcgacgacaccagcgacgacgagcaggagagcggcgacggcagcgacaacctgaaccaggagaacttcgacaaggagaagagcgacagaaacgacagcgaggaccccggcagcgagtacaacgccgaggaggacgagctggaggaggagatgagcgacgagtacagcgacatcgaggagcagagcgagaaggaccacaacgacgccgaggaggagcccgaggccggcgacagcgtgggcaacgtgcacgagggcctgacccccgtggtgatccagaacagcaacaagaagatcctgcagtgccccaagtgcgacaagaccttcgacagaatcggcaagtacgagagccacaccagagtgcacaccggcgagaagcccttcgagtgcgacatctgccaccagagatacagcaccaagagcaacctgaccgtgcacagaaagaagcacagcaacgagaccgagttccacaagaaggagcacaagtgcccctactgcaacaagctgcacgccagcaagaagaccctggccaagcacgtgaagagattccaccccgagaacgcccaggagttcatcagcatcaagaagaccaagagcgagagctggaagtgcgacatctgcaagaagagcttcaccagaagaccccacctggaggagcacatgatcctgcacagccaggacaagcccttcaagtgcacctactgcgaggagcacttcaagagcagattcgccagactgaagcaccaggagaagttccacctgggccccttcccctgcgacatctgcggcagacagttcaacgacaccggcaacctgaagagacacatcgagtgcacccacggcggcaagagaaagtggacctgcttcatctgcggcaagagcgtgagagagagaaccaccctgaaggagcacctgagaatccacagcggcgagaagccccacctgtgcagcatctgcggccagagcttcagacacggcagcagctacagactgcacctgagagtgcaccacgacgacaagagatacgagtgcgacgagtgcggcaagaccttcatcagacacgaccacctgaccaagcacaagaagatccacagcggcgagaaggcccaccagtgcgaggagtgcggcaagtgcttcggcagaagagaccacctgaccgtgcactacaagagcgtgcacctgggcgagaaggtgtggcagaagtacaaggccaccttccaccagtgcgacgtgtgcaagaagatcttcaagggcaagagcagcctggagatgcacttcagaacccacagcggcgagaagccctacaagtgccagatctgcaaccagagcttcagaatcaagaagaccctgaccaagcacctggtgatccacagcgacgccagacccttcaactgccagcactgcaacgccaccttcaagagaaaggacaagctgaagtaccacatcgaccacgtgcacgagatcaagagccccgacgaccccctgagcaccagcgaggagaagctggtgagcctgcccgtggagtacagcagcgacgacaagatcttccagaccgagaccaagcagtacatggaccagcccaaggtgtaccagagcgaggccaagaccatgctgcagaacgtgagcgccgaggtgtgcgtgcccgtgaccctggtgcccgtgcagatgcccgacacccccagcgacctggtgagacacaccaccaccctgccccccagcagccacgagatcctgagcccccagccccagagcaccgactaccccagagccgccgacctggccttcctggagaagtacaccctgaccccccagcccgccaacatcgtgcaccccgtgagacccgagcagatgctggaccccagagagcagagctacctgggcaccctgctgggcctggacagcaccaccggcgtgcagaacatcagcaccaacgagcaccacagctag

SEQ ID NO: 258481 - DNA, 2730 bp, Artificial Sequence
  derived and/or modified sequence
atgaaaaagaggagaaaggttacctctaacttggagaaaattcatttgggctaccataaggactcctccgaaggcaatgtggcagtcgagtgcgatcaggttacttatacgcattccgccggaagacctacaccagaagctcttcattgttaccaggagctgcccccctcccctgaccagcgcaagctcctgagttcgctgcagtataacaaaaacctattgaagtatctcaatgatgatcgacaaaaacagccgagtttctgcgacctgctgatcattgtcgagggaaaggaatttagcgctcacaaggtggtggtggcagtcgggagcagttactttcatgcttgcctaagcaagaatccaagcactgatgtcgtgacactggaccacgttacacacagcgttttccagcaccttcttgagttcctgtacacatcagagttctttgtgtataaatacgagattcccctagtgctggaggccgcaaaattcctggacatcattgatgcagttaagttattaaataacgagaacgttgcgccatttcactcggaactcactgagaagagctccccagaagagaccctgaatgagttgacgggccgcttgagtaataaccatcagtgtaaattctgctctaggcatttttgctacaaaaaatcgctcgaaaatcatctggctaagactcacagatcccttctgctgggaaaaaagcacgggctcaagatgctggagcgctctttctctgccagaaggagcaaacgtaatcgaaaatgtccagtcaaattcgatgatacgtcggatgacgagcaggaatctggtgatggttctgataatctcaaccaagaaaactttgacaaagaaaagagcgaccgtaatgattcagaagatcctggaagtgaatataacgcggaggaagacgagctggaggaagagatgagcgacgagtacagtgatattgaggagcaatcagagaaggatcacaacgatgccgaggaagagccagaggccggcgattctgtgggtaatgtgcatgaaggccttaccccagttgttatacagaactccaataagaagatcctgcagtgtcctaagtgcgacaaaacttttgaccggataggaaaatatgaaagtcatacacgggtgcacacgggagagaagcccttcgaatgcgacatttgccaccagaggtacagcaccaaatctaatttgacggtgcaccgaaaaaagcacagtaacgaaacagaatttcacaagaaggaacataaatgcccatactgcaacaagttacacgcatccaagaagaccctcgctaaacatgtgaaaaggttccacccagagaacgcccaggaatttatctctattaagaagacgaagtctgagtcctggaaatgtgatatttgcaaaaagtcattcacccggcgacctcaccttgaagaacacatgattctgcactcacaggataagccctttaagtgtacctactgcgaggaacactttaaatctaggtttgcacgcctgaagcatcaggagaagttccacctgggaccatttccttgcgacatttgtggaaggcagttcaacgacactggcaatctgaaaaggcatattgagtgcactcacggaggcaagagaaagtggacttgctttatatgcggtaagtcagttcgcgagcgcacaaccttaaaggaacatctgcggattcactccggcgagaagccgcatttgtgtagtatttgtggacaaagctttcgtcatggcagctcctacaggttacacctgcgtgtgcaccatgacgataagcggtacgagtgcgacgagtgtggaaagacatttataaggcatgatcaccttacaaagcataagaagatccattctggagaaaaggcccatcaatgtgaggaatgcggaaagtgtttcgggcgccgagaccaccttacagtgcattacaaaagtgtacatttgggtgagaaggtctggcagaagtacaaggctactttccatcagtgtgacgtgtgtaagaaaatatttaaaggcaagtcctcactagagatgcacttcaggacacattctggagagaaaccatacaagtgccagatatgcaatcagtctttccgtatcaaaaaaacgctcacgaaacacctcgtgatccactccgacgcacggccttttaattgtcagcactgcaacgcgacattcaaaaggaaggacaaactgaagtatcacatcgatcacgtgcacgaaattaaaagcccagacgatccactgagtacttccgaagaaaaactcgtttcgcttcccgttgagtactcctcagacgacaagatttttcagacagaaacgaagcagtacatggaccagcccaaggtgtaccagtcagaagccaaaacaatgctgcagaatgtctctgccgaggtctgtgtgcctgtgacactcgttccggtccagatgccagacacgccatcagatctggtacgacacactaccacactccccccctccagtcacgaaatactgtccccccaaccacagtctactgattatcccagagccgccgatctagcctttctcgaaaaatacactctaaccccacagcccgcgaacatcgtccaccctgtgagacccgaacaaatgctagatcccagagagcagagctatctcggcacactcctgggcctcgactcaaccactggcgtacagaacatcagcactaatgagcatcacagctag

SEQ ID NO: 258482 - DNA, 2730 bp, Artificial Sequence
  derived and/or modified sequence
atgaagaagaggaggaaggtgaccagcaacctggagaagatccacctgggctaccacaaggacagcagcgagggcaatgtggccgtggagtgtgaccaggtgacctacacccacagcgctggccggcccaccccagaggccctgcactgctaccaggagctgccccccagcccagaccagaggaagctgctgagcagcctgcagtacaacaagaacctgctgaagtacctgaatgatgaccggcagaagcagcccagcttctgtgacctgctgatcatcgtggagggcaaggagttcagcgcccacaaggtggtggtggccgtgggcagcagctacttccacgcctgcctgagcaagaaccccagcacagatgtggtgaccctggaccacgtgacccacagcgtcttccagcacctgctggagttcctgtacaccagcgagttctttgtgtacaagtatgagatccccctggtgctggaggccgccaagttcctggacatcattgatgctgtgaagctgctgaacaatgaaaatgtggcccccttccacagcgagctgacagagaagagcagccctgaggagaccctgaatgagctgaccggccgcctgagcaacaaccaccagtgcaagttctgcagccgccacttctgctacaagaagagcctggagaaccacctggccaagacccacaggagcctgctgctgggcaagaagcacggcctgaagatgctggagaggagcttcagcgcccggcgcagcaagaggaacaggaagtgccctgtgaagtttgatgacaccagtgatgatgagcaggagagcggagatggcagtgacaacctgaaccaggagaactttgacaaggagaagagtgacagaaatgattctgaggaccccggcagcgagtacaatgctgaggaggatgagctggaggaggagatgtctgatgagtacagcgacatcgaggagcagagcgagaaggaccacaatgatgctgaggaggagcctgaggccggggacagcgtgggcaatgtgcatgagggcctgacccctgtggtgatccagaacagcaacaagaagatcctgcagtgccccaagtgtgacaagacctttgacagaattggcaagtatgagagccacaccagggtgcacactggagagaagccctttgaatgtgacatctgccaccagcgctacagcaccaagagcaacctgactgtgcacaggaagaagcacagcaatgaaacagagttccacaagaaggagcacaagtgcccctactgcaacaagctgcacgccagcaagaagaccctggccaagcacgtgaagcgcttccacccagaaaatgcccaggagttcatcagcatcaagaagaccaagtctgagagctggaagtgtgacatctgcaagaagagcttcacccggcggccccacctggaggagcacatgatcctgcacagccaggacaagcccttcaagtgcacctactgtgaggagcacttcaagagcagatttgcccggctgaagcaccaggagaagttccacctgggccccttcccctgtgacatctgtggccggcagttcaatgacaccggcaacctgaagaggcacatcgagtgcacccatggaggcaagaggaagtggacctgcttcatctgtgggaagtctgtgcgggagaggaccaccctgaaggagcacctgcgcatccacagcggggagaagccccacctgtgcagcatctgtggccagagcttccgccacggcagcagctaccgcctgcacctgcgggtgcaccatgatgacaagagatatgaatgtgatgaatgtgggaagaccttcatcagacatgaccacctgaccaagcacaagaagatccacagcggggagaaggcccaccagtgtgaagaatgtgggaagtgcttcggccggcgggaccacctgactgtgcactacaagtctgtgcacctgggggagaaggtgtggcagaagtacaaggccaccttccaccagtgtgatgtgtgcaagaagatcttcaagggcaagagcagcctggagatgcacttccgcacccacagcggggagaagccctacaagtgccagatctgcaaccagagcttccgcatcaagaagaccctgaccaagcacctggtgatccacagtgatgcccggcccttcaactgccagcactgcaatgccaccttcaagaggaaggacaagctgaagtaccacatcgaccacgtgcatgagatcaagagcccagatgaccccctgagcaccagcgaggagaagctggtgtccctgcctgtggagtacagcagtgatgacaagatcttccagacagagaccaagcagtacatggaccagcccaaggtgtaccagagcgaggccaagaccatgctgcagaatgtgtctgctgaggtgtgtgtgcctgtgaccctggtgcctgtgcagatgccagacacccccagcgacctggtgcgccacaccaccaccctgccccccagcagccatgagatcctgagcccccagccccagagcacagactaccccagggctgctgacctggccttcctggagaagtacaccctgaccccccagcctgccaacatcgtgcaccctgtgcggcctgagcagatgctggacccccgggagcagagctacctgggcaccctgctgggcctggacagcaccactggagtgcagaacatcagcaccaatgagcaccacagctag

SEQ ID NO: 258483 - DNA, 2730 bp, Artificial Sequence
  derived and/or modified sequence
atgaagaagcggcggaaggtgaccagcaacctggagaagatccacctaggataccataaagactcctctgaaggaaacgttgcagtcgagtgcgatcaggtgacgtatactcattctgccggtcggcctaccccggaggccctacattgttatcaagagctacctccctcccctgaccagcgcaagcttctgtcatccctgcagtataacaagaatctgttgaagtacctgaatgatgaccggcagaaacagccaagcttctgcgacttgctgattatcgtggagggcaaggagttcagtgcacacaaggtggtggtggccgtgggctcctcctactttcacgcatgcctcagcaaaaatccgagtaccgacgtggtcaccctcgatcatgttacgcattctgtcttccaacatcttttagagtttctgtacacgtctgaattcttcgtgtataagtacgagattcctctcgtgctggaggcggccaaattcctggacattatcgacgccgtcaaactcctaaacaacgaaaacgtagcccctttccattcagagctgactgaaaagagctccccagaagagactttaaacgagctaactggcaggttgtctaataatcaccagtgtaagttctgctcaagacacttttgctacaagaagtctctcgagaatcaccttgcaaagactcaccggagtttgctgctgggcaaaaagcatggcctgaagatgctggagaggtcattttccgccagaaggagcaagcgtaatcggaagtgccccgtcaagttcgacgatacgtccgacgatgaacaggagtctggggatggctcagacaatttaaaccaggaaaatttcgataaggagaagtctgacaggaatgacagcgaggatcctgggtccgagtacaacgctgaagaggatgaactcgaagaggagatgagcgacgagtactccgatatcgaggaacagtccgaaaaggaccacaatgacgctgaggaggaaccagaggccggggacagcgtagggaacgtacacgaaggtcttacccccgtagtgatccaaaacagcaataagaaaatactgcagtgcccgaaatgtgataagactttcgaccggattgggaagtatgagtctcacacccgggtacacacaggggaaaaacctttcgaatgcgacatctgtcaccaacggtactccaccaagagcaatctaacagtccaccgcaagaagcatagcaatgagaccgagtttcacaaaaaagaacacaagtgcccttattgtaacaagcttcacgctagcaagaagaccctggctaagcacgtcaagaggtttcatccagaaaatgcccaggagttcatctcaattaagaaaacaaagtctgaatcctggaagtgtgatatctgtaagaagtcattcaccaggaggccccacctggaagagcatatgatcttgcacagccaggacaaaccattcaaatgtacctattgcgaagaacatttcaaatctcggtttgctcgcttaaagcatcaagaaaagtttcacttgggcccttttccttgcgacatctgtggtagacagttcaacgacacagggaatctcaaacggcacatagaatgtactcatggaggaaagagaaagtggacctgtttcatctgtggtaaatctgtacgagagcgcactaccctgaaagagcatcttagaatccatagtggagaaaaacctcacctgtgcagcatctgcggccagagttttagacacggtagttcctacaggctccacctccgggtgcatcatgatgacaagaggtatgagtgcgatgagtgcggcaaaacctttatcagacatgatcacttgactaagcacaaaaagatacacagcggtgagaaagcgcaccagtgtgaagagtgtgggaagtgctttggccggagagaccaccttaccgtacattataaatcagtacacttgggtgagaaggtgtggcagaagtacaaagccacatttcatcagtgtgatgtgtgtaagaaaattttcaaggggaaaagctcccttgaaatgcatttccgtacccactcaggtgaaaagccatacaaatgccagatctgcaaccaaagctttcgaatcaaaaaaacccttaccaagcacctcgtgattcatagcgatgcacgacctttcaattgtcaacactgcaatgctactttcaaacgaaaggacaagctgaagtaccatattgaccacgtacatgagattaagtcgcccgatgacccattatccacatcagaggaaaagctggtttctctaccagtggagtattcaagcgacgacaaaatttttcagacagagactaagcagtacatggatcagccaaaggtgtaccagtccgaggccaagactatgcttcagaatgtatctgccgaggtttgtgtaccagtgacactcgttcccgtgcagatgcccgacacccccagtgaccttgtgcggcataccaccacgttacctcctagtagccatgaaatccttagtccacagccgcaatctaccgattatccgagggcagccgacttggctttcctggagaaatatacgctgacgccccagcctgccaatatcgtccatccggttagacctgagcagatgcttgacccacgcgagcagtcatacctcggaacgctcctgggactggactcaaccactggcgtacaaaatataagtaccaatgagcaccacagctag

SEQ ID NO: 258484 - DNA, 2730 bp, Artificial Sequence
  derived and/or modified sequence
atgaaaaagcgacgcaaggtcaccagcaacctcgagaagattcatctaggctaccacaaagacagtagcgaaggaaatgtggcagttgagtgtgatcaggtcacatatacgcattccgccggtcgaccaactccggaagccctgcattgttatcaggagctcccaccttcaccagaccagagaaagctgttgtcatcacttcagtataacaaaaaccttctgaaatacctgaacgacgatcggcagaagcagccatctttctgtgaccttttgataatcgtggagggaaaggagttctcagcccacaaagtggtggtagcagtcggttcttcatacttccacgcctgtttgtccaagaatccaagcacagatgtggtgaccctagaccacgtgactcacagcgtcttccagcatttactagagttcctttatacctctgaattcttcgtgtataagtacgagattccactcgttttggaagccgctaaattcctggacatcatagatgccgttaaattactcaataacgagaacgtggcaccattccacagcgagctgaccgagaagagctcccctgaggaaaccctgaacgaactcacaggacggctgtccaataaccatcaatgtaaattttgcagtcgccacttctgttataagaaaagccttgaaaatcacttggctaagacgcaccgaagcttgttactgggcaaaaagcacgggctgaagatgctcgaaaggtcttttagcgcgagacgcagcaagcggaatagaaaatgccccgtaaaattcgatgacacgtccgacgatgaacaggagagcggggacggtagcgacaatctcaatcaggagaatttcgacaaagagaagagtgataggaatgacagtgaggatccagggagcgagtataatgccgaggaagacgaactcgaggaggaaatgtccgatgagtatagcgacattgaggagcaaagcgagaaggaccacaatgacgctgaagaagaaccagaagcgggagacagcgtcgggaacgtacacgaggggttgacgcccgtggttatccagaattcaaataaaaaaatcctgcagtgtccgaaatgtgacaaaaccttcgatcggataggtaagtatgagtctcacactcgggtgcacacaggggagaaacccttcgaatgtgacatatgccaccaacgctattctacgaaatccaacctcaccgttcaccgtaagaaacacagcaatgaaaccgagtttcacaagaaggaacacaaatgcccttattgtaataagctacacgccagcaagaagactctagccaaacacgtgaaaaggttccatcctgagaatgcacaggagttcatcagcattaaaaaaacgaaatctgagtcctggaagtgcgatatttgcaaaaaatcattcactcggcgaccccatctggaagaacacatgatactgcatagccaggataaacccttcaaatgtacctactgcgaagagcattttaagagcagattcgccagactcaagcaccaggaaaagtttcacctcggcccttttccttgtgacatctgcgggaggcaattcaatgatactgggaacctgaaaaggcacattgagtgcacccatggagggaaacgcaaatggacctgcttcatatgcggaaagtctgtccgtgaacgcaccaccctgaaagagcacctccgaattcactcaggcgaaaaacctcacttatgcagtatttgtgggcagtctttcaggcacggtagttcctaccggctccacctgcgcgtgcaccatgatgataagagatacgaatgtgacgagtgcggcaagactttcatccgccatgatcacctgactaagcacaaaaaaatccattcgggtgaaaaagcccaccagtgtgaggagtgtggaaagtgttttgggaggcgggatcaccttacagttcattacaaatctgtgcatctgggtgagaaggtgtggcagaagtataaggccacttttcaccagtgcgatgtctgcaagaaaattttcaaaggaaagagcagcctggaaatgcacttcaggacccacagtggcgagaagccctacaaatgccaaatctgtaatcagtcgtttaggattaaaaagaccctcactaagcacctggtcattcacagtgatgccaggccattcaactgccagcattgtaacgcgacgtttaagcgtaaggacaaactaaagtatcacattgaccatgttcacgaaatcaagtcccccgacgatccacttagcactagcgaagaaaaattggtttcattgccagtcgaatactcaagcgacgacaaaattttccaaacggagaccaagcagtacatggatcagcccaaggtgtatcaatccgaggcaaagaccatgctccaaaatgtaagcgcagaagtttgcgtgcccgtgactcttgtcccagtccaaatgcccgacaccccctcagacctggtcaggcataccactactttgcccccatcaagccacgaaattctaagcccccagccccagagtactgactacccacgagcggcagatctggcgtttctcgagaagtacacgctgacacctcagccggcaaacatcgtacatcctgtacggccagagcagatgctggatccccgtgagcagagctatctaggcaccctgctggggctcgactctaccactggcgtgcaaaatatatctaccaacgagcaccattcttag

SEQ ID NO: 258485 - DNA, 2833 bp, Artificial Sequence
  derived and/or modified sequence
atctagttttcctttataaatcacttaagacacttatgaagtttcttgttctgaaattgctgtactgcaatgaagaagaggagaaaggttacttcaaatcttgagaagatccatctaggctatcataaagattcttcagaaggaaatgttgcagtggagtgtgaccaagtgacctatactcattctgcaggaagaccaactcctgaagctcttcactgttaccaggaacttcctccctctccagatcagagaaagcttttaagttctttgcagtataataagaatttgctaaaatatttaaatgatgataggcagaagcaaccatctttttgtgatttacttatcatagtggaaggaaaagaatttagtgcacataaagtagtcgttgctgtcggcagtagttattttcatgcgtgtttgagcaaaaatccaagcactgatgttgtcaccctggatcacgtaacacattcagtttttcagcatttgcttgaatttctttacacatcagaattttttgtgtacaaatatgaaatacctcttgttttagaggctgcaaaatttttggacattatagatgcagtgaagttgttaaataacgaaaatgttgccccttttcattcagagctaactgaaaagtcatcaccagaagaaacactaaatgaattaactggaagactatcaaataatcatcagtgcaaattctgtagtagacatttttgttataaaaagtctttagagaatcatttggctaaaacccataggtcccttttattagggaaaaaacatgggttaaaaatgctggagagaagtttctccgcaagaagatcaaaaaggaatcggaagtgccctgttaagtttgatgacaccagcgatgatgaacaggaaagtggtgatgggtcagacaatttgaatcaagaaaattttgataaggaaaagtcagatagaaatgattctgaggaccctggaagtgaatataatgctgaagaagatgagctagaggaggagatgtcagatgagtactctgacattgaagaacaaagtgaaaaggatcataatgatgcagaagaagaacctgaggctggtgattctgtaggaaatgttcatgaggggttaactccagtggtcattcagaacagcaacaaaaaaatattgcagtgtcctaaatgtgataaaacatttgaccgaataggaaaatatgagagccacacccgtgttcacacaggtgagaagccctttgagtgtgatatttgtcaccagcgctattcaacaaagtctaacctaactgttcacagaaagaagcacagtaatgaaacagaatttcataagaaggagcacaagtgcccttattgtaataaacttcatgcaagcaagaagactttagccaagcatgttaagagatttcatcctgaaaatgcacaagaatttatttccattaagaagactaagagtgaaagttggaaatgtgatatttgtaagaaatcttttactcgaagaccacacttggaggaacatatgattctacattctcaagataaaccttttaagtgtacctattgtgaagaacattttaaatcacggtttgctcggttaaagcatcaagaaaagttccatctgggtccttttccatgtgatatatgtggtcgccagtttaacgacactggaaatttgaaacgtcatatagaatgtactcatggtggaaagagaaaatggacttgctttatctgtggaaaatcagtacgagaaagaactactttgaaagaacatttgagaatccacagtggagaaaagcctcacctttgtagtatttgtgggcaaagttttcgtcatggaagttcgtatagacttcacttacgagtacatcatgatgataaaagatatgagtgcgatgaatgtggaaaaacatttatccgtcatgatcaccttacaaagcacaaaaaaatacattcaggtgaaaaagctcatcagtgtgaagaatgtggaaaatgttttggtcgtagggatcatctcactgttcattacaaaagcgtacaccttggagagaaagtgtggcaaaaatataaagcaacatttcatcaatgtgatgtttgtaagaaaatttttaaaggcaaatcaagtctggaaatgcattttcgaacgcattcaggtgaaaaaccatacaagtgtcaaatttgcaatcagtcttttagaattaagaaaacattaacaaaacacctggttattcattctgatgcccgacctttcaactgtcagcactgtaatgcaacatttaagcggaaagacaagctgaaataccacattgaccatgttcatgaaataaaatctcctgatgatcctctcagtacttctgaggaaaaacttgtatccttgccagttgagtactcatctgatgacaaaatctttcaaacagaaacaaaacaatatatggaccagcccaaagtttatcagtcggaagccaagacgatgttacagaatgtatctgctgaagtatgtgttccagtaactctggttccagttcagatgcctgacactccgagtgacctagtgcgtcatactaccacactcccaccatcttctcatgagattctgtcaccacagccacagtcaactgattatccacgagcagcggatttagcttttctggaaaaatatactcttactcctcaacctgcaaatatagttcacccagttcgacctgaacaaatgctagatcctagagaacaatcttatcttggaacattactgggccttgatagcactactggtgttcaaaatatttctacgaatgagcatcattcatgagtaaatctaaacattccacagatttttggatggt

SEQ ID NO: 258486 - protein, 498 aa, Artificial Sequence
  derived and/or modified sequence
MRPPACWWLLAPPALLALLTCSLAFGLASEDTKKEVKQSQDLEKSGISRKNDIDLKGIVFVIQSQSNSFHAKRAEQLKKSILKQAADLTQELPSVLLLHQLAKQEGAWTILPLLPHFSVTYSRNSSWIFFCEEETRIQIPKLLETLRRYDPSKEWFLGKALHDEEATIIHHYAFSENPTVFKYPDFAAGWALSIPLVNKLTKRLKSESLKSDFTIDLKHEIALYIWDKGGGPPLTPVPEFCTNDVDFYCATTFHSFLPLCRKPVKKKDIFVAVKTCKKFHGDRIPIVKQTWESQASLIEYYSDYTENSIPTVDLGIPNTDRGHCGKTFAILERFLNRSQDKTAWLVIVDDDTLISISRLQHLLSCYDSGEPVFLGERYGYGLGTGGYSYITGGGGMVFSREAVRRLLASKCRCYSNDAPDDMVLGMCFSGLGIPVTHSPLFHQARPVDYPKDYLSHQVPISFHKHWNIDPVKVYFTWLAPSDEDKARQETQKGFREEL

SEQ ID NO: 258487 - DNA, 1497 bp, Artificial Sequence
  derived and/or modified sequence
atgcgaccccctgcctgctggtggctactcgcaccccccgccctcctggccctgttaacatgttcactcgcctttggcttggcctcagaagatactaagaaggaggttaagcaaagtcaggacctggagaaaagcggcatctcccgaaagaacgacatcgacctcaaggggattgtgtttgtgatccagtctcagtcaaactcatttcacgccaagcgggcggagcaattaaagaaaagtatactcaaacaagcggccgacctgacccaagaactcccatcagtgctcctgctccaccagctggccaaacaggaaggggcttggactatcttgcctctgctaccacacttttccgtgacatactcgcgaaactcaagttggatctttttctgtgaggaggagactaggattcagataccgaagctgttggaaactctgcgtcgttatgatccctcaaaggagtggtttttgggtaaggctctgcacgacgaagaggcaaccataatccatcactacgcctttagcgagaatcctacagtgttcaagtatcctgacttcgccgcagggtgggcactgagtatccctctggtgaacaaactaactaaacgcctgaaatccgagtcccttaagtctgattttacaattgaccttaagcacgaaatcgctctatacatctgggataaaggagggggccctccccttacaccagtgcctgagttctgcacaaacgacgtcgacttttactgtgcgaccacatttcattcttttctcccactgtgtcgtaaaccggtgaagaagaaagacatttttgttgcggtgaaaacctgcaaaaagttccacggggaccgcattccaattgtgaaacagacttgggaaagccaggcttctctgatcgagtattatagtgattataccgaaaacagtatcccgacagtggacctcggcatcccgaatacggatagggggcactgcgggaagactttcgctattctggaaagattccttaacagatcacaggacaagaccgcgtggctagtgatagtggatgacgataccctgatcagcatcagtcgcttgcagcatctcttgtcctgctacgattccggcgaaccagtatttttgggggagaggtacgggtacggattggggacagggggatattcttacatcaccggcgggggtggcatggtattctctcgggaggccgttcgtagactgctagcctcaaagtgtcggtgttatagtaatgacgccccggacgacatggtactgggtatgtgcttttctggactgggcatccccgttacacatagtcccctctttcaccaggcacgacctgtggactatccaaaagattatctgtctcaccaggtgcctatcagttttcataaacactggaatatcgatcccgttaaagtttacttcacttggttagcaccctctgacgaggataaggcacgtcaggaaacacaaaaaggcttccgtgaggagctgtag

SEQ ID NO: 258488 - DNA, 1497 bp, Artificial Sequence
  derived and/or modified sequence
atgaggcccccagcctgctggtggctgctggcccccccagccctgctggccctgctgacctgcagcctggccttcggcctggccagcgaggacaccaagaaggaggtgaagcagagccaggacctggagaagagcggcatcagcaggaagaatgacatcgacctgaagggcatcgtgtttgtgatccagagccagagcaacagcttccacgccaagagagctgagcagctgaagaagagcatcctgaagcaggccgctgacctgacccaggagctgcccagcgtgctgctgctgcaccagctggccaagcaggagggcgcctggaccatcctgcccctgctgccccacttctctgtgacctacagcaggaacagctcctggatcttcttctgtgaggaggagacccgcatccagatccccaagctgctggagaccctgcggcgctatgaccccagcaaggagtggttcctgggcaaggccctgcatgatgaggaggccaccatcatccaccactacgccttcagcgagaaccccaccgtcttcaagtacccagactttgctgctggctgggccctgagcatccccctggtgaacaagctgaccaagaggctgaagtctgagagcctgaagagtgacttcaccatcgacctgaagcatgaaattgccctgtacatctgggacaagggcggcggcccccccctgacccctgtgcctgagttctgcaccaatgatgtggacttctactgtgccaccaccttccacagcttcctgcccctgtgcaggaagcctgtgaagaagaaggacatctttgtggccgtgaagacctgcaagaagttccacggggaccgcatccccatcgtgaagcagacctgggagagccaggccagcctcatcgagtactacagcgactacacagagaacagcatccccaccgtggacctgggcatccccaacacagaccggggccactgtgggaagacctttgccatcctggagcgcttcctgaacagaagccaggacaagacagcctggctggtgattgtggatgatgacaccctcatcagcatcagccggctgcagcacctgctgagctgctatgacagcggggagcctgtgttcctgggggagagatatggctacggcctgggcaccggcggctacagctacatcactggaggcggcggcatggtgttcagccgggaggccgtgcggcggctgctggccagcaagtgccgctgctacagcaatgatgccccagatgacatggtgctgggcatgtgcttcagcggcctgggcatccctgtgacccacagccccctcttccaccaggcccggcctgtggactaccccaaggactacctgagccaccaggtgcccatctccttccacaagcactggaacatcgaccctgtgaaggtgtacttcacctggctggcccccagtgatgaggacaaggcccggcaggagacccagaagggcttccgggaggagctgtag

SEQ ID NO: 258489 - DNA, 1497 bp, Artificial Sequence
  derived and/or modified sequence
atgcggccccccgcctgctggtggctgctggccccccccgccctgttggcccttcttacctgcagcctggcttttggtttggccagtgaagatacaaagaaggaggtgaagcagagccaagatctagaaaagtccgggatctccaggaagaatgacattgatctgaagggaattgtttttgttattcaatctcaatcgaattcctttcatgcgaagcgggctgagcagcttaaaaagagcattctgaaacaggctgccgacctcacccaggaactcccttcagtcttgcttttacatcagcttgctaaacaggaaggggcgtggacaatcctgccccttctcccgcacttctctgtgacgtattcacgcaactcatcatggatcttcttctgcgaggaggagacaaggatacaaatcccaaaactcctggagacccttaggcgttacgatccaagtaaagagtggttcctggggaaagcactgcatgatgaggaggctacaattattcatcactatgccttctccgagaaccctaccgtcttcaaatacccagattttgctgcgggttgggcactcagcattcccctggtcaacaagctcacaaaacgccttaaatcagaaagtctcaaaagcgatttcaccatcgacttgaagcatgaaattgccttatatatttgggacaaaggcggaggaccacccctgacaccagtacctgaattttgcacgaacgatgtggatttttactgcgcaaccacttttcactctttcctgccgttgtgtcggaaaccggtgaaaaagaaggatatctttgtcgccgtcaaaacttgcaagaagttccacggagatagaattccgatcgtaaaacagacctgggagtcccaggcctcactgatcgaatactactccgactatactgagaattctattccaaccgtggaccttggaattcccaataccgatagaggacactgcggcaaaactttcgccattctggagaggtttctgaatcgcagccaggacaaaacggcttggttagttattgtcgatgacgacacgctcatttccatatcacggcttcagcaccttctttcctgctatgactccggggagccagtctttctgggggagagatatgggtatggcctaggcactgggggatattcatacatcaccgggggcggcgggatggtattttctcgggaagccgtacggcgactccttgcatctaagtgcagatgctatagcaacgatgcaccagacgatatggtactcggtatgtgttttagtggccttgggatccctgtaactcacagtccgcttttccatcaggcaaggcctgttgattatccaaaggattatctgagccatcaggtccccatctcatttcacaaacactggaatatagatcctgtgaaggtctactttacctggcttgctccgtcagacgaagataaggcaagacaggaaacccagaaagggtttagggaagagttgtag

SEQ ID NO: 258490 - DNA, 1497 bp, Artificial Sequence
  derived and/or modified sequence
atgcgcccaccggcatgttggtggcttctggcccctcccgcactactggcactacttacgtgttccctcgcctttggcctcgcatccgaggataccaaaaaggaagtgaagcaaagccaggatctggagaaaagtggcatttccaggaaaaacgacattgatctcaaagggatcgtgtttgtgattcaatcccagtccaatagctttcatgctaaacgcgctgaacaactgaaaaaaagcatccttaagcaggccgctgatttgacacaggagctgccctctgtccttctgctccatcagttagcgaagcaggagggagcatggacaatcctgccactcctgccacacttcagtgttacatatagcagaaattcttcatggatctttttttgcgaagaagagacacgcatccagatccctaaattgctagaaacactcagacgctatgacccaagtaaggagtggtttctaggaaaggcgctccacgatgaggaggctaccattatccaccactacgctttctccgaaaaccccaccgtgtttaaatatcccgatttcgccgctggatgggcactgtctatcccccttgtcaataaactgaccaaacgattaaagtccgagagtctgaaatccgattttaccatagacctgaagcacgagattgctctgtacatctgggacaagggtggtggaccccctctcacgcctgttccagagttttgtacgaacgacgtggacttctattgtgctactaccttccactctttccttcccctgtgccgaaaacccgtgaaaaaaaaggatatcttcgtggccgttaagacgtgtaagaagttccatggcgaccgcattcccattgtcaaacaaacctgggagagtcaggcatcattgatcgagtattattcggactataccgagaactctatccccaccgtagatctggggatccccaatacagatcggggacattgcggaaaaactttcgcaatactcgagaggttcctgaacaggtcacaggacaagaccgcatggcttgttattgttgatgacgacactttaattagcatttcacgactgcagcaccttctttcttgttatgatagcggggagcctgtctttctgggagaacggtacggttacggtctgggcacgggcggatactcatatataacaggcggaggaggaatggtcttcagccgcgaagccgtgaggcgcctcctcgccagtaagtgtcgatgctacagtaacgatgcgcctgatgacatggttctcggcatgtgcttttcgggtttaggcatccctgtgacccattcacccctgtttcaccaagccaggccagtagattaccctaaggactacttatcacaccaggtccccatttccttccacaaacattggaatattgatccagtcaaagtgtattttacatggttggccccatcagatgaagacaaggcccgtcaggagactcaaaagggcttccgggaggagctgtag

SEQ ID NO: 258491 - DNA, 4254 bp, Artificial Sequence
  derived and/or modified sequence
cgatggcgcggcggagacggagggaggaggggagccggcagagaagggtcagccgcggcggcagggcggcggcggcagcggcgcagctccgctccccgcgcgtctcccttccccgcgcccaggtagggcgctcagcctccgccgccaggatgcggccgcccgcctgctggtggctgctcgcgccgccggcgctgctcgcgctcctcacctgctccctggcttttggtttggcttctgaagatacaaagaaagaggtcaagcagtctcaggatttggagaaaagtggtatatcaaggaaaaatgacatagacttaaaaggaattgtattcgtcatccagagtcaaagtaattcttttcatgcaaagagagcagagcagttaaaaaaaagcatcttaaagcaggctgcagatcttacacaggagctccccagtgtcctcctccttcatcagctggctaaacaagaaggtgcatggaccatacttccgttgttaccgcatttttctgtaacatatagcagaaattcatcttggattttcttctgtgaagaagagacaagaatacagattccaaaactcttggaaaccctcagaagatatgacccctctaaggaatggtttttgggaaaagcattacatgatgaagaagctacaataattcaccattatgccttttccgagaatcctacagtttttaagtatccagactttgctgcaggctgggccttaagtattccacttgtaaacaagcttaccaagagactaaagagtgaatccttgaaatccgactttacaatagatttaaaacatgagattgccctctacatctgggacaaaggcggaggacctcccctgaccccagtgcctgagttttgtaccaatgacgtggacttctactgtgctaccacattccattcttttctaccgctttgtagaaagccagtgaagaagaaggatatttttgttgcagtaaaaacatgcaagaaatttcatggtgacagaatacctattgttaagcagacttgggagagccaggcaagtctcattgaatactatagtgactatactgaaaattccattcctactgtggatttgggaattcctaatacagatagaggtcattgtggaaagacatttgccattttggaaagatttctgaatcgtagccaggacaaaacagcatggttagtcattgtggatgatgatacattaataagtatctccaggctccagcacttgcttagctgttatgactccggcgagcctgtgtttctgggagagcgctacggctacggcctgggcactggtggctacagctacatcacgggaggaggaggaatggtcttcagcagagaagccgtcaggagacttctcgccagtaaatgtcgatgctacagcaatgatgctcccgatgatatggtcctgggaatgtgctttagtggcttgggaatccctgtgacacacagccctctcttccatcaggctcggccggtggattaccctaaggactacctttctcatcaagttcccatatcgttccacaaacactggaacatcgatccagtgaaggtgtatttcacatggttggcacccagtgacgaagacaaagccaggcaggagacacagaaaggttttcgagaggagttataaatcagggtgacctgtgcgcctagcctgcgcagggaatgaactggagactgtggcctcatcccactgtgctgtgctcacaacacttgtgtctgccacatggcattgggtgcttcctgactttagggggagattttatgtatggtattttttgacagaggaagaaaaggggtcacaggagaaacatttttttttctgggaaaaatcacttgcttttgacttatgcagttgttttaacacttagtgatgactgtgtattctccaagctgtgatacagcagtttttttttattgtcacagggaaataaatggtaccagaagtccctttcctgttctgtctcttcattgtaatggaagtttcagttgggcatgagcctggagagatgtgactgtctacagttctatttgtatatataaaaagaagactgaaagtcttttgacatggatattgtgaatggtatgaacttttaaaccatattattgatgatgaaaattatttcctgggaactcagtaggaataataccgtattaaggaataatactgtacataaaacatcatgaaaccctagatatgaaatcccctgaagtctgtaatcatggtggttatgttttgtctattcttttgctgtttgtgcctcataaaaagagaatgaggtcttctgctagagcttcgtattgctttggaagttcatctgtgttttatttctccctgaagccctatctttatggcttacttgtaacatgaaagtagtagatgctgccagaaaatagtgtcctcaatattttaaaacaatgttgacatgttttgttcaagtcagcaagctctatgtgagtctcaggaagtgaattaaatttggaccttatgttttactcttgttttttttttttttttaaatgttacttaatgactctctcctgactcaggagagaaaccccttgtggaaggacagcatggtgatcaggcaatttctctgggttcccaaagaatgacatttgaacacagtattttgaaacagctctagttttcaaattatatctttaatatatagtaatgtaacatattcagtattaatgtataaaaagcactctaattatataattcagtttttgtaaaggtatttgcataaaatttaatatgtcttaaactaattttggtaaattacttcttttttttctttttaataaaaactgttactcattaactttgcttataatgctttttatagcccagcacagaatttaaagccataccaccaaaagtacctgtgtgtgttaatatgtttttcttgtagcatagattgactatttgcaatagtattagtatttaccatttttccaaattagcaactaccagacctcacgtgttgcagtgataacacaatgcattggattcagttttgtgaaaatggattctgtggccatccaagggatgtatcagggatgatcagctgatgagaggctccagaaggatttctagatcgcttcaagcctatactgatggccttagctttgttcagtcattgtaactgggattgttgtcattgctaccgtggtagtcaccttcatgtcatctataatagtactcctggagagccctggctgcctacaccagtggaaaagagtctccagttctgctctggcctactaactgttaccactgagagaacaacatgttcatttgacatgattgaagctggcatccgtatatgaagatccttgtcaagctttcttctgtggtctgattagtgccttctactgataccggggcacctcctctggtacttttaagtgttttgttaattatatttactttttggaatggtgtaagcctaaccacaagtaaaagatctttgcctaagtttttgatttctcaaatattgtgttcattagtctagactgggaatggggaggggaaatggggaaaatgaatgaatgaaatcagaaaaaagtcagcggctcagtaaatacagtttaaagagagaataattacttcagagctacccttttaagagaaaaccatcagaaattgataatgtttatataaagtttataaagccattgtgttttgttatataacaaatcagagatgttattttagaatcgattcccatctaaagaactcaattttgagtctgacatttccaggaccagatattgtcttactcacatttcctttgctttgaaatagggctttccttccaaatggctatttttaggctagggatgttaacatcagggatttgtgtgtggaataactggaatgtcatttttgcttttaagccatttctgatgatatagccaaagcaggttgtctgactatgtaggatttttacatcttgaaactaaatcagaaatccagacatgaaaataacctttctagaatgcctaggagcagaaaacaataatagcatgctaaatcacaaatgatgctatgtatgggtatgtaaatatcagtgctgtctgcatttctgggtttattgaagacctcttgttgtatatatcctcaaaaattaatgtaattgacatcttcaagaatgtttctattgtcttccattcataatcagagatgtaatttgtatggactaaataaaaactttattatgtaatgaaaa

SEQ ID NO: 258492 - DNA, 1497 bp, Artificial Sequence
  derived and/or modified sequence
atgagaccccccgcctgctggtggctgctggccccccccgccctgctggccctgctgacctgcagcctggccttcggcctggccagcgaggacaccaagaaggaggtgaagcagagccaggacctggagaagagcggcatcagcagaaagaacgacatcgacctgaagggcatcgtgttcgtgatccagagccagagcaacagcttccacgccaagagagccgagcagctgaagaagagcatcctgaagcaggccgccgacctgacccaggagctgcccagcgtgctgctgctgcaccagctggccaagcaggagggcgcctggaccatcctgcccctgctgccccacttcagcgtgacctacagcagaaacagcagctggatcttcttctgcgaggaggagaccagaatccagatccccaagctgctggagaccctgagaagatacgaccccagcaaggagtggttcctgggcaaggccctgcacgacgaggaggccaccatcatccaccactacgccttcagcgagaaccccaccgtgttcaagtaccccgacttcgccgccggctgggccctgagcatccccctggtgaacaagctgaccaagagactgaagagcgagagcctgaagagcgacttcaccatcgacctgaagcacgagatcgccctgtacatctgggacaagggcggcggcccccccctgacccccgtgcccgagttctgcaccaacgacgtggacttctactgcgccaccaccttccacagcttcctgcccctgtgcagaaagcccgtgaagaagaaggacatcttcgtggccgtgaagacctgcaagaagttccacggcgacagaatccccatcgtgaagcagacctgggagagccaggccagcctgatcgagtactacagcgactacaccgagaacagcatccccaccgtggacctgggcatccccaacaccgacagaggccactgcggcaagaccttcgccatcctggagagattcctgaacagaagccaggacaagaccgcctggctggtgatcgtggacgacgacaccctgatcagcatcagcagactgcagcacctgctgagctgctacgacagcggcgagcccgtgttcctgggcgagagatacggctacggcctgggcaccggcggctacagctacatcaccggcggcggcggcatggtgttcagcagagaggccgtgagaagactgctggccagcaagtgcagatgctacagcaacgacgcccccgacgacatggtgctgggcatgtgcttcagcggcctgggcatccccgtgacccacagccccctgttccaccaggccagacccgtggactaccccaaggactacctgagccaccaggtgcccatcagcttccacaagcactggaacatcgaccccgtgaaggtgtacttcacctggctggcccccagcgacgaggacaaggccagacaggagacccagaagggcttcagagaggagctgtag

SEQ ID NO: 258493 - protein, 96 aa, Artificial Sequence
  derived and/or modified sequence
MSPGLLTTRKEALMAFRDVAVAFTQKEWKLLSSAQRTLYREVMLENYSHLVSLGIAFSKPKLIEQLEQGDEPWREENEHLLDLCPGRRITRSGVRD

SEQ ID NO: 258494 - protein, 603 aa, Artificial Sequence
  derived and/or modified sequence
MSPGLLTTRKEALMAFRDVAVAFTQKEWKLLSSAQRTLYREVMLENYSHLVSLGIAFSKPKLIEQLEQGDEPWREENEHLLDLCPEPRTEFQPSFPHLVAFSSSQLLRQYALSGHPTQIFPSSSAGGDFQLEAPRCSSEKGESGETEGPDSSLRKRPSRISRTFFSPHQGDPVEWVEGNREGGTDLRLAQRMSLGGSDTMLKGADTSESGAVIRGNYRLGLSKKSSLFSHQKHHVCPECGRGFCQRSDLIKHQRTHTGEKPYLCPECGRRFSQKASLSIHQRKHSGEKPYVCRECGRHFRYTSSLTNHKRIHSGERPFVCQECGRGFRQKIALLLHQRTHLEEKPFVCPECGRGFCQKASLLQHQSSHTGERPFLCLECGRSFRQQSLLLSHQVTHSGEKPYVCAECGHSFRQKVTLIRHQRTHTGEKPYLCPQCGRGFSQKVTLIGHQRTHTGEKPYLCPDCGRGFGQKVTLIRHQRTHTGEKPYLCPKCGRAFGFKSLLTRHQRTHSEEELYVDRVCGQGLGQKSHLISDQRTHSGEKPCICDECGRGFGFKSALIRHQRTHSGEKPYVCRECGRGFSQKSHLHRHRRTKSGHQLLPQEVF

SEQ ID NO: 258495 - DNA, 291 bp, Artificial Sequence
  derived and/or modified sequence
atgagccccggcctgctgaccaccagaaaggaggccctgatggccttcagagacgtggccgtggccttcacccagaaggagtggaagctgctgagcagcgcccagagaaccctgtacagagaggtgatgctggagaactacagccacctggtgagcctgggcatcgccttcagcaagcccaagctgatcgagcagctggagcagggcgacgagccctggagagaggagaacgagcacctgctggacctgtgccccggcagaagaatcaccagaagcggcgtgagagactag

SEQ ID NO: 258496 - DNA, 1812 bp, Artificial Sequence
  derived and/or modified sequence
atgagccccggcctgctgaccaccagaaaggaggccctgatggccttcagagacgtggccgtggccttcacccagaaggagtggaagctgctgagcagcgcccagagaaccctgtacagagaggtgatgctggagaactacagccacctggtgagcctgggcatcgccttcagcaagcccaagctgatcgagcagctggagcagggcgacgagccctggagagaggagaacgagcacctgctggacctgtgccccgagcccagaaccgagttccagcccagcttcccccacctggtggccttcagcagcagccagctgctgagacagtacgccctgagcggccaccccacccagatcttccccagcagcagcgccggcggcgacttccagctggaggcccccagatgcagcagcgagaagggcgagagcggcgagaccgagggccccgacagcagcctgagaaagagacccagcagaatcagcagaaccttcttcagcccccaccagggcgaccccgtggagtgggtggagggcaacagagagggcggcaccgacctgagactggcccagagaatgagcctgggcggcagcgacaccatgctgaagggcgccgacaccagcgagagcggcgccgtgatcagaggcaactacagactgggcctgagcaagaagagcagcctgttcagccaccagaagcaccacgtgtgccccgagtgcggcagaggcttctgccagagaagcgacctgatcaagcaccagagaacccacaccggcgagaagccctacctgtgccccgagtgcggcagaagattcagccagaaggccagcctgagcatccaccagagaaagcacagcggcgagaagccctacgtgtgcagagagtgcggcagacacttcagatacaccagcagcctgaccaaccacaagagaatccacagcggcgagagacccttcgtgtgccaggagtgcggcagaggcttcagacagaagatcgccctgctgctgcaccagagaacccacctggaggagaagcccttcgtgtgccccgagtgcggcagaggcttctgccagaaggccagcctgctgcagcaccagagcagccacaccggcgagagacccttcctgtgcctggagtgcggcagaagcttcagacagcagagcctgctgctgagccaccaggtgacccacagcggcgagaagccctacgtgtgcgccgagtgcggccacagcttcagacagaaggtgaccctgatcagacaccagagaacccacaccggcgagaagccctacctgtgcccccagtgcggcagaggcttcagccagaaggtgaccctgatcggccaccagagaacccacaccggcgagaagccctacctgtgccccgactgcggcagaggcttcggccagaaggtgaccctgatcagacaccagagaacccacaccggcgagaagccctacctgtgccccaagtgcggcagagccttcggcttcaagagcctgctgaccagacaccagagaacccacagcgaggaggagctgtacgtggacagagtgtgcggccagggcctgggccagaagagccacctgatcagcgaccagagaacccacagcggcgagaagccctgcatctgcgacgagtgcggcagaggcttcggcttcaagagcgccctgatcagacaccagagaacccacagcggcgagaagccctacgtgtgcagagagtgcggcagaggcttcagccagaagagccacctgcacagacacagaagaaccaagagcggccaccagctgctgccccaggaggtgttctag

SEQ ID NO: 258497 - DNA, 291 bp, Artificial Sequence
  derived and/or modified sequence
atgagtcccggtctcctgaccacacgaaaagaagcccttatggctttccgtgatgtcgcagttgcgtttacccagaaagaatggaagcttttgagttctgctcagagaacattataccgggaagtgatgctcgagaattactcccacctggtatctttggggatcgctttctccaagcctaaactcattgaacagttagaacagggtgacgaaccttggagggaggagaatgagcatctgctggacctttgtcccggaaggcgtatcacccgctcaggtgtcagggattag

SEQ ID NO: 258498 - DNA, 1812 bp, Artificial Sequence
  derived and/or modified sequence
atgtctcccggactgctcaccacgcggaaagaggcgctgatggccttccgggacgtggcagtggcctttacccaaaaggagtggaagttattgtcatctgcacaacggaccctgtaccgcgaagtgatgctggagaactactctcatctggtttcactaggaattgccttcagtaaaccaaaattaatcgagcagctggaacaaggggacgaaccgtggcgtgaagaaaatgaacatctgctcgacttgtgtcctgagccaaggaccgaatttcagccctcatttccacatctggtcgctttctcaagtagccagctgctgagacagtacgcactgtccggccaccctactcagatattcccctcctcatcagctggaggagacttccagctggaagcccccaggtgtagctcagagaagggcgaatctggtgagactgaaggccccgattcatctttgaggaaaagaccaagcagaatctctcggacattcttctccccgcaccaaggtgaccccgtcgaatgggttgaaggcaacagggaggggggaaccgatcttcggttggcgcagcggatgagccttggaggatctgataccatgcttaagggcgccgatacatccgagagtggggccgtaattcggggtaactataggctgggcttgtctaagaagtcgtcattgtttagtcaccaaaagcaccatgtatgcccggaatgtggccgtggattttgccagcgaagcgacttgattaagcatcagagaacccatacaggcgagaagccctatttatgccccgagtgtggccgccggttttcacagaaggcctccctgtcaattcaccagagaaaacactcaggcgagaaaccctacgtatgcagagagtgtggcaggcactttcggtatacaagctcactgactaatcataagcggatacacagcggagagaggccctttgtctgccaagagtgcggccgaggcttcaggcagaagatcgcattgctactgcatcagaggacacatctggaggagaaaccctttgtctgcccagagtgtgggcgcggcttctgccagaaagcctcccttctgcaacaccagagcagccacaccggggagcgccctttcctgtgcctggagtgcggtaggagctttcgacagcagtcccttcttttgagtcatcaagtcacacactctggcgagaaaccctacgtatgcgccgaatgcggccactctttcaggcagaaagtgacattgattcgccatcaacgaactcacacgggcgaaaagccgtacctctgtccacagtgtggacgaggcttctctcagaaggttacactgatcgggcatcaaagaacccacactggtgagaaaccgtacctgtgtcctgattgtggaagagggtttggtcagaaggtgacactgattcggcaccagaggacacacaccggggagaaaccatacttgtgtccaaaatgtggccgtgccttcgggtttaaaagtctcctcactagacatcagaggacacacagtgaagaggaactgtacgtagatcgcgtgtgtggtcaggggctaggacagaagagccatctcatttccgatcagcgcactcattcaggcgaaaaaccctgcatttgtgacgagtgcggacggggctttggttttaagtctgctttaatccggcatcaacgaacccactcaggcgaaaaaccatacgtgtgccgagaatgcggtaggggtttctctcagaagagccacctacatcggcaccgacgtactaagtctggccatcaactgcttcctcaagaagtgttttag

SEQ ID NO: 258499 - DNA, 291 bp, Artificial Sequence
  derived and/or modified sequence
atgagccctggcctgctgaccaccaggaaggaggccctgatggccttcagagatgtggccgtggccttcacccagaaggagtggaagctgctgagcagcgcccagaggaccctgtaccgggaggtgatgctggagaactacagccacctggtgtccctgggcatcgccttcagcaagcccaagctgattgagcagctggagcagggagatgagccctggagggaggagaatgagcacctgctggacctgtgccctggaagacgcatcaccaggtctggagtgcgggactag

SEQ ID NO: 258500 - DNA, 1812 bp, Artificial Sequence
  derived and/or modified sequence
atgagccctggcctgctgaccaccaggaaggaggccctgatggccttcagagatgtggccgtggccttcacccagaaggagtggaagctgctgagcagcgcccagaggaccctgtaccgggaggtgatgctggagaactacagccacctggtgtccctgggcatcgccttcagcaagcccaagctgattgagcagctggagcagggagatgagccctggagggaggagaatgagcacctgctggacctgtgcccagagcccaggacagagttccagcccagcttcccccacctggtggccttcagcagcagccagctgctgcggcagtatgccctgagcggccaccccacccagatcttccccagcagcagcgctggaggagacttccagctggaggccccccgctgcagcagcgagaagggggagagcggggagacagagggccctgacagcagcctgaggaagaggcccagccgcatcagcaggaccttcttcagcccccaccagggcgaccctgtggagtgggtggagggcaaccgggagggcggcacagacctgcggctggcccagaggatgagcctgggcggcagtgacaccatgctgaagggagctgacaccagcgagagcggggctgtgatccggggcaactaccgcctgggcctgagcaagaagagcagcctcttcagccaccagaagcaccacgtgtgcccagaatgtggccggggcttctgccagaggagtgacctgatcaagcaccagaggacccacactggagagaagccctacctgtgcccagaatgtggccgccgcttcagccagaaggccagcctgagcatccaccagaggaagcacagcggggagaagccctacgtgtgccgggagtgtggccgccacttccgctacaccagcagcctgaccaaccacaagaggatccacagcggggagcggccctttgtgtgccaggagtgtggccggggcttccggcagaagatcgccctgctgctgcaccagaggacccacctggaggagaagccctttgtgtgcccagaatgtggccggggcttctgccagaaggccagcctgctgcagcaccagagcagccacactggagagcggcccttcctgtgcctggagtgtggccgctccttccggcagcagagcctgctgctgagccaccaggtgacccacagcggggagaagccctacgtgtgtgccgagtgtggccacagcttccggcagaaggtgaccctcatccgccaccagaggacccacactggagagaagccctacctgtgcccccagtgtggccggggcttcagccagaaggtgaccctcatcggccaccagaggacccacactggagagaagccctacctgtgcccagactgtggccggggcttcggccagaaggtgaccctcatccgccaccagaggacccacactggagagaagccctacctgtgccccaagtgtggccgggccttcggcttcaagagcctgctgaccaggcaccagaggacccacagcgaggaggagctgtatgtggacagagtgtgtggccagggcctgggccagaagagccacctgatcagtgaccagaggacccacagcggggagaagccctgcatctgtgatgaatgtggccggggcttcggcttcaagagcgccctgatccgccaccagaggacccacagcggggagaagccctacgtgtgccgggagtgtggccggggcttcagccagaagagccacctgcaccgccacaggaggaccaagagcggccaccagctgctgccccaggaggtgttctag

SEQ ID NO: 258501 - DNA, 291 bp, Artificial Sequence
  derived and/or modified sequence
atgagccccggcctgctgaccacccggaaggaggccctgatggccttccgggacgtcgcagtggcatttacccagaaggagtggaagctgctgagctccgcccagcgcactctttatcgggaggtgatgttagagaattattcacacctggtgagcctgggcattgcttttagcaagcccaagctgatcgagcaactggaacagggggacgaaccctggagggaggaaaacgagcacttgctagacctgtgcccaggccgtcggattacgcggtctggagtcagagattag

SEQ ID NO: 258502 - DNA, 1812 bp, Artificial Sequence
  derived and/or modified sequence
atgagccccggcctgctgaccacccggaaggaggccctgatggccttccgggatgtggcggttgccttcacccaaaaagaatggaagttgctgtcatccgcccagagaacactgtacagagaggttatgcttgagaattacagccacctagtgagtctcgggattgctttcagtaaaccaaagctgatcgaacagcttgagcagggggacgaaccttggcgcgaggaaaacgaacacctgctcgatctgtgtcctgagccccgaaccgaatttcagccctcattcccgcatcttgtggctttcagtagcagtcagttactaaggcaatatgccctcagtggccaccctacccaaattttccctagcagtagcgccggaggtgactttcaactggaagcgcctcgctgctcctctgagaagggcgagtccggggagacagaaggtcccgactcttctctgcggaaaagaccaagtcgcatttcacggacattctttagcccacaccagggcgaccccgtagagtgggtcgagggaaatcgggaaggggggaccgacttgagactggcccagagaatgtctctcggcggcagtgacacaatgctcaaaggggccgataccagcgaaagcggtgctgtcatcagaggcaactatagacttggactttcaaagaaaagtagtctcttttcccaccagaaacaccacgtgtgtccagagtgcggccgtggattttgtcagaggagcgacctgataaaacaccagagaactcacactggcgagaagccctatctgtgccccgagtgcggccggagatttagccagaaggccagccttagcatacaccagagaaaacactctggcgagaaaccatacgtctgccgcgagtgcggccgtcacttccggtacacctcatcccttaccaatcataaaagaattcacagtggggagcgcccctttgtatgccaggagtgtggtcggggcttccggcagaaaattgcactgcttcttcaccagcgcacgcatctagaagaaaaaccttttgtttgccctgagtgtggccgtgggttttgccagaaagcctctcttcttcagcatcagtcgtcccacacaggggagcgaccctttctttgcttggaatgcggcagatctttcagacagcagtcccttctgctgagtcaccaggtgacacattccggagaaaagccttacgtgtgtgcggaatgcggccactccttcagacaaaaagtgacccttattaggcaccagcgcactcataccggagagaagccatacctgtgcccacagtgcggaagaggcttctcacagaaagtgacactgattggccatcaacgcacccacactggcgagaaaccctacttatgcccggattgtggaagaggctttggtcagaaagtgacgctgatacgacaccaaaggacgcataccggggaaaagccgtacctatgtcccaagtgcggtagagcctttggcttcaagtcgctgcttactaggcaccaacgcacccacagtgaagaggagctgtatgtggaccgggtgtgcgggcaggggctcggacagaaatcacaccttattagcgatcagagaactcacagcggagaaaagccctgtatttgcgacgaatgtggacgcggcttcggctttaagtccgctttgattaggcatcagcggacccatagtggtgagaaaccgtacgtctgcagggagtgcggtcgggggttttctcagaagtcccacttgcacagacaccgcagaaccaagtctgggcaccagctgctccctcaggaggtattttag

SEQ ID NO: 258503 - DNA, 291 bp, Artificial Sequence
  derived and/or modified sequence
atgtcgcctggattgcttactaccagaaaggaggcactcatggcattcagggacgttgccgtggcctttacacagaaagagtggaaactactgagctctgcccaaagaactctgtatagagaagtcatgctcgaaaactactcccacttggtgagccttggtatcgcattcagcaagccaaaactgattgaacagcttgaacaaggagacgagccctggagggaagaaaacgaacacctactggatctgtgccccggaaggcgcattacacggtctggagtcagagattag

SEQ ID NO: 258504 - DNA, 1812 bp, Artificial Sequence
  derived and/or modified sequence
atgagcccgggactgttgacgacgcgcaaggaggccctgatggccttccgcgacgtggctgtcgcattcacccagaaagagtggaagctcctgtcttccgcacagagaaccctatatcgcgaggtcatgctagaaaattactcccacttagtgtctctgggtatcgcttttagtaagccaaaacttatcgaacagttagaacaaggcgatgaaccatggcgagaagaaaatgaacatcttctggatctctgccctgaacctcgtaccgagttccagccaagtttccctcatctggtggcattcagtagtagtcagttgctccggcaatatgccctgagcggccacccaacacagatctttcctagcagcagtgccggaggggacttccagttggaggctccgagatgcagttccgaaaagggtgagagtggcgagaccgagggccctgacagctcattgcgaaagaggccaagtagaatttccagaacatttttctcaccccaccagggcgatcctgtggaatgggttgagggaaatagagagggcggaacagatctgcgcctagcgcagcggatgtccctgggcggatctgacacaatgcttaagggcgctgacacttcagaaagcggagccgtcattcgcggaaactatcgactgggattgtcaaaaaaatcatccctgttttcccaccagaagcatcacgtgtgccccgagtgtggcagaggtttttgccagcgaagcgacttaattaaacaccagcgcacgcacactggtgaaaagccgtatctttgtcccgagtgcggaagacgtttctcccaaaaggccagcctatccattcatcagagaaaacacagtggtgaaaagccttacgtgtgtcgcgagtgtggccgtcacttccgatacacaagttctctgaccaaccacaagcgcatccattccggtgaacgcccattcgtgtgccaggagtgcgggagggggtttaggcagaaaattgccttgctcttgcatcagcgaacccacttagaggagaagccattcgtgtgtcctgagtgtggacgcggtttttgccaaaaggcgtctctgctccagcaccagagtagccatacgggagaacgtccgttcctttgcctggaatgtggcaggtcctttaggcagcagtctttactgctgagccatcaggtgacccactccggcgagaagccttatgtttgcgctgaatgcggccattcattcaggcagaaagtaaccctcatccgtcatcagcgaacacacactggggagaagccctacctctgcccccagtgcggaagaggtttctcccaaaaggtaactcttatcggacaccagcgcacacatacaggggagaagccatacttgtgtccggactgtggcagaggcttcgggcaaaaggtgaccttaatcaggcaccagagaacccatacaggagaaaagccctatctgtgtcccaagtgcggtagggcattcggcttcaagtccttgttgacccgccatcagcgcacacactcagaagaggagctgtatgttgacagggtttgcgggcaaggcttgggacagaagtcccatctcatcagtgaccagaggactcactctggcgaaaagccctgtatctgtgacgaatgtggacgtgggttcgggtttaagtcggctcttatccggcaccaacgcacccacagcggtgagaaaccatacgtttgtcgtgaatgtggtcgtgggttcagtcagaagtcccacctccaccgccacaggcggacaaagtcaggtcaccagttgctccctcaagaggtgttttag

SEQ ID NO: 258505 - DNA, 543 bp, Artificial Sequence
  derived and/or modified sequence
atttgcctctgcaacttgactctcctctaggaagagtactccagagagcagggatatgtcaccaggactcctgacaaccaggaaggaggcattgatggccttccgggatgtggctgtggccttcacccagaaggagtggaagctattgagttctgctcagaggaccctgtacagggaggtgatgctggagaactacagccatctggtctccctgggaattgcattttccaaaccaaaactcatcgaacagctggagcaaggcgacgaaccttggagagaggagaacgaacatcttctggacctttgtccaggcaggcggatcacaaggtcaggagttcgagactagtctggccaacatagtgaaaccccatctctactaaaaatacaaaaaaaactagccgagtgtggtggtgcgcacctgtaatcacagctactcgggaggctgaggcaggaggatcgcgtgaactcgggaggcggaggttgcagtgagccgagatcacactattgcactccagcccaggcaacagtgcgagactccatctc

SEQ ID NO: 258506 - DNA, 1986 bp, Artificial Sequence
  derived and/or modified sequence
tacttccgcgttccggcatcgtcgcctggtgcgtgatttgcctctgcaacttgactctcctctaggaagagtactccagagagcagggatatgtcaccaggactcctgacaaccaggaaggaggcattgatggccttccgggatgtggctgtggccttcacccagaaggagtggaagctattgagttctgctcagaggaccctgtacagggaggtgatgctggagaactacagccatctggtctccctgggaattgcattttccaaaccaaaactcatcgaacagctggagcaaggcgacgaaccttggagagaggagaacgaacatcttctggacctttgtccagagcctagaacagaattccagccaagttttccccacctggtggccttttctagctcgcagctcctcagacaatatgcgctaagtggccatcccacacagatcttcccaagctcatctgcaggaggtgacttccaactagaagctccaagatgctctagtgaaaaaggagaaagtggagagacagaaggccccgacagctcattaagaaagaggccaagcagaatttctaggacattcttcagcccacatcaaggtgacccagtagaatgggtagaagggaacagagaaggaggaacagaccttcgcctggcccaaaggatgagtcttggggggtcagacacaatgttgaagggagcagacacttcagaatctggagcagtcatacgtggaaactatagactgggacttagcaaaaagtcaagcctgttcagccaccagaagcatcatgtgtgccctgaatgcgggagaggcttttgccagagatcagaccttatcaagcaccagaggacacacaccggggagaagccatacctgtgtcctgagtgtgggcgtcggtttagccagaaggcctccctctccatacaccagaggaagcactcgggggagaagccgtatgtgtgcagggaatgtgggcgacacttcaggtatacatcctctctcactaatcacaagaggattcactccggggagaggccctttgtatgtcaggagtgtgggcgaggctttcgccagaagatagccctccttctacaccagaggacgcacttggaggagaagcccttcgtgtgtcctgagtgtgggagaggcttttgccagaaggcatcactcctccagcaccagagctcacacacaggggagaggcccttcctgtgccttgagtgtgggcgtagcttcaggcagcagtcactcctccttagtcaccaggtcacacactcaggagagaagccttatgtctgtgctgagtgtgggcacagctttcgccaaaaggtcactctcatcaggcaccagaggacacacacaggggagaagccttacctgtgcccccagtgtgggcggggttttagccagaaggtcaccctcattggacaccagaggacacacacaggggagaagccctacctgtgccctgattgtgggcgtggctttggtcagaaggtcaccctcatcagacaccagaggacacacacaggggagaagccttatctgtgccccaagtgtgggcgtgcatttggctttaagtcgctcctcacccgacaccagaggacacactcagaggaggagctttacgtagacagggtgtgtggacaaggacttggccagaagtcacaccttatctctgaccaaaggacacactcaggagagaagccctgcatttgcgatgaatgtgggcgcggctttggctttaagtctgccctcatccgacatcagcggacccattctggggagaagccgtatgtctgcagggagtgtgggcgtggctttagccagaagtctcacttgcatagacacaggaggaccaagtctggtcatcagctcctaccccaagaggtcttctgacctttcctttccccgtgagtgtgaagctggcagaaatcactagtaaatgcttcagtttcctgaaatggaatggaaaaaaaaaaa

SEQ ID NO: 258507 - protein, 1307 aa, Artificial Sequence
  derived and/or modified sequence
MMTDTQDGPSESSQIMRSLTPLINREEAFGEAGEAGLWPSITHTPDSQEEGLNDIQEMIKTEKSYPERRLRGVLEELSCGCCRFLSLADKDQGHSSRTRLDRERLKSCMRELENMGQQARMLRAQVKRHTVRDKLRLCQNFLQKLRFLADEPQHSIPDIFIWMMSNNKRVAYARVPSKDLLFSIVEEETGKDCAKVKTLFLKLPGKRGFGSAGWTVQAKVELYLWLGLSKQRKEFLCGLPCGFQEVKAAQGLGLHAFPPVSLVYTKKQAFQLRAHMYQARSLFAADSSGLSDPFARVFFINQSQCTEVLNETLCPTWDQMLVFDNLELYGEAHELRDDPPIIVIEIYDQDSMGKADFMGRTFAKPLVKMADEAYCPPRFPPQLEYYQIYRGNATAGDLLAAFELLQIGPAGKADLPPINGPVDVDRGPIMPVPMGIRPVLSKYRVEVLFWGLRDLKRVNLAQVDRPRVDIECAGKGVQSSLIHNYKKNPNFNTLVKWFEVDLPENELLHPPLNIRVVDCRAFGRYTLVGSHAVSSLRRFIYRPPDRSAPSWNTTVRLLRRCRVLCNGGSSSHSTGEVVVTMEPEVPIKKLETMVKLDATSEAVVKVDVAEEEKEKKKKKKGTAEEPEEEEPDESMLDWWSKYFASIDTMKEQLRQQEPSGIDLEEKEEVDNTEGLKGSMKGKEKARAAKEEKKKKTQSSGSGQGSEAPEKKKPKIDELKVYPKELESEFDNFEDWLHTFNLLRGKTGDDEDGSTEEERIVGRFKGSLCVYKVPLPEDVSREAGYDSTYGMFQGIPSNDPINVLVRVYVVRATDLHPADINGKADPYIAIRLGKTDIRDKENYISKQLNPVFGKSFDIEASFPMESMLTVAVYDWDLVGTDDLIGETKIDLENRFYSKHRATCGIAQTYSTHGYNIWRDPMKPSQILTRLCKDGKVDGPHFGPPGRVKVANRVFTGPSEIEDENGQRKPTDEHVALLALRHWEDIPRAGCRLVPEHVETRPLLNPDKPGIEQGRLELWVDMFPMDMPAPGTPLDISPRKPKKYELRVIIWNTDEVVLEDDDFFTGEKSSDIFVRGWLKGQQEDKQDTDVHYHSLTGEGNFNWRYLFPFDYLAAEEKIVISKKESMFSWDETEYKIPARLTLQIWDADHFSADDFLGAIELDLNRFPRGAKTAKQCTMEMATGEVDVPLVSIFKQKRVKGWWPLLARNENDEFELTGKVEAELHLLTAEEAEKNPVGLARNEPDPLEKPNRPDTSFIWFLNPLKSARYFLWHTYRWLLLKLLLLLLLLLLLALFLYSVPGYLVKKILGA

SEQ ID NO: 258508 - DNA, 3924 bp, Artificial Sequence
  derived and/or modified sequence
atgatgaccgatacccaggacggacccagcgaaagcagtcaaattatgcgcagcctgacacctttaatcaatagggaagaagcatttggcgaggctggagaagccggactgtggccgtccattacacacactcctgacagccaggaggaggggctcaacgacatacaggaaatgattaaaaccgagaagtcgtaccctgagcgccgtctacgcggcgtgctggaggagctttcgtgtggatgctgccgctttctgtctctggcagataaagatcagggacactcctctcggaccagactcgatagggaacggttaaaaagctgcatgagagaattggagaatatggggcagcaggctcgtatgctgagagcacaggttaaacgacacactgtgcgcgacaaactgagactctgccagaatttcctccaaaagctgcgtttcttggcggacgagccccagcatagtattcctgatattttcatttggatgatgtccaacaacaagcgggttgcctatgcccgcgtgcctagtaaagacctcctcttctcaatcgtggaagaggaaacaggtaaagattgtgcgaaggttaaaaccttattcctcaagttacccggaaaacgaggctttggatcggctggttggaccgtgcaggccaaagtcgagctctacctctggttggggctgtcaaagcagaggaaagaatttctctgtggtctgccatgcggctttcaggaggtgaaggccgcccagggcctgggtttacatgccttccctccagtcagtcttgtctacactaagaaacaggcatttcaattgcgcgcgcacatgtatcaggccaggtccctctttgccgccgactcatctggtttaagcgatccgtttgctcgggtctttttcatcaatcagtctcagtgcaccgaggtactcaatgagactttatgtcctacatgggatcagatgctcgtgtttgacaatctggaattgtacggcgaggctcatgaacttcgggatgacccaccgataattgtgattgagatatacgatcaggattctatgggaaaagcagacttcatggggcggacgttcgccaagcctctagtgaaaatggcggacgaagcctactgtcccccgagattcccacctcagctggaatactatcagatctaccggggaaacgcaactgctggcgatctcctcgctgccttcgaacttctccagattggcccggctggcaaagcggacctccccccaattaacggaccagtggacgtggatcgcgggcctattatgcccgtgccgatggggatccgccccgtgctgagcaagtatcgagtggaggtgctgttctggggactcagggaccttaaacgggtgaatctggcccaggtggatcggcctcgggttgatattgagtgcgcgggaaaaggcgtgcagagttctttaatccacaattataagaagaatccgaatttcaatacactggttaagtggtttgaggtcgatctgccggagaacgaattgctgcaccccccactgaacatcagggttgtggactgccgtgcgttcggtagatacaccctggttggatcgcacgcagtgtctagtttgcggagattcatatataggccaccagatcgttcagctcccagttggaatactactgtaaggttgcttagaagatgccgggtgctgtgcaacggaggctcgagtagtcattccacaggcgaggttgtggttacgatggaaccagaggtgccaataaagaaactggaaactatggttaagcttgatgccaccagcgaggccgttgtcaaggtggacgttgctgaagaagagaaagagaagaaaaaaaaaaagaaaggaaccgccgaagagcccgaggaggaagaaccagacgaatcgatgctcgactggtggtccaagtatttcgcatctatcgatactatgaaagagcagctaagacagcaggagccttctggtattgacctcgaggaaaaggaagaagtcgacaatacggaagggctgaaggggagtatgaagggcaaggagaaggcccgcgccgccaaagaggagaagaagaaaaagacacagtcctcaggttctggacaggggagtgaggcccccgagaaaaagaagcctaagatcgacgagcttaaagtatatcctaaggagttagagtccgaatttgataacttcgaagactggcttcacacgttcaatcttctgagaggaaagacgggggacgacgaggacggatcgaccgaggaggaaagaatcgtcggccggtttaaaggaagcctttgcgtgtacaaagtgcctctgccagaggatgtctcaagggaagcaggatatgacagcacctacgggatgttccagggaattccgtcaaacgaccccatcaatgtgctcgtaagagtgtatgtggttagggctacggatctacatccagccgatattaatggcaaagccgatccatacatcgccatacggctgggcaagaccgatatcagggataaagagaactacatctccaagcagctgaacccagtattcggtaaatcctttgatatcgaggcatcctttcccatggaatccatgctcaccgtcgctgtgtacgattgggatttagttggtaccgacgatctgataggtgaaacaaagatcgacctggaaaatcggttctattcaaaacatcgcgccacctgcggcattgctcagacttactcaactcatggatacaatatatggcgcgatcctatgaaaccctcccagatcttgacacggctatgcaaagacggaaaggtggatgggcctcactttgggcctccagggcgagtgaaagtggcaaaccgagtctttacgggtccttccgaaatcgaggacgaaaacggccagcggaaacctaccgatgaacatgtcgctctgctcgccctaagacattgggaggacatccccagggctggatgccggctggtccctgagcacgtggagactaggcccctgctcaacccagacaaaccaggaatcgaacaaggccgtctggaactttgggtggacatgtttcccatggacatgccggcaccaggaacacccctggacatctccccacgcaaacctaagaagtatgaactgcgggtgatcatctggaataccgacgaagtcgttcttgaggatgacgatttttttacaggtgaaaaaagctctgatatcttcgtcagaggatggctgaagggacagcaggaggataaacaggacacagatgtgcactatcattctctgacgggcgaaggtaactttaactggaggtacctatttcccttcgattaccttgccgccgaggagaaaatcgttatatcaaaaaaggagtcaatgttctcgtgggacgagactgaatacaagatcccagccaggctcactttgcaaatttgggacgcggatcatttctccgccgatgattttctaggggctattgaactggacctcaataggttcccccgtggcgctaagaccgccaagcagtgcaccatggagatggcaactggagaggtggacgttccccttgtcagcatctttaagcagaagagggtgaagggatggtggcccttgctggcacggaacgaaaatgacgagttcgagttaacaggtaaggtggaggccgagctgcacttgctgaccgcagaagaggctgagaaaaatccggtagggctagcccggaacgagcctgatcctctcgaaaaacctaatagacctgacacctcatttatctggtttctcaatccactaaagtccgcccgttacttcctctggcacacctaccggtggctactgctgaaactgctgctgttgttgcttctacttctcctgctcgccctgtttctttattccgtcccaggatacctggttaagaaaatcctaggggcctag

SEQ ID NO: 258509 - DNA, 3924 bp, Artificial Sequence
  derived and/or modified sequence
atgatgacagacacccaggacggccccagcgagagcagccagatcatgaggagcctgacccccctcatcaaccgggaggaggcctttggagaggccggggaggccggcctgtggcccagcatcacccacaccccagacagccaggaggagggcctgaatgacatccaggagatgatcaagacagagaagagctacccagagcggcggctgcggggcgtgctggaggagctgagctgtggctgctgccgcttcctgagcctggccgacaaggaccagggccacagcagcaggacccggctggaccgggagcggctgaagagctgcatgagggagctggagaacatgggccagcaggccaggatgctgcgggcccaggtgaagaggcacacagtgcgggacaagctgcggctgtgccagaacttcctgcagaagctgcgcttcctggctgatgagccccagcacagcatcccagacatcttcatctggatgatgagcaacaacaagagggtggcctatgcccgggtgcccagcaaggacctgctcttcagcatcgtggaggaggagaccgggaaggactgtgccaaggtgaagaccctcttcctgaagctgcccgggaagaggggctttggatctgctggctggacagtgcaggccaaggtggagctgtacctgtggctgggcctgagcaagcagaggaaggagttcctgtgtggcctgccctgtggcttccaggaggtgaaggccgcccagggcctgggcctgcacgccttcccccctgtgtccctggtgtacaccaagaagcaggccttccagctgcgggcccacatgtaccaggcccggagcctgtttgctgctgacagcagcggcctgagtgacccctttgcccgggtcttcttcatcaaccagagccagtgcacagaggtgctgaatgagaccctgtgccccacctgggaccagatgctggtgtttgacaacctggagctgtatggagaggcccacgagctgagagatgatcctcccatcatcgtcatcgagatctatgaccaggacagcatgggcaaggctgacttcatgggccgcacctttgccaagcccctggtgaagatggctgatgaggcctactgccccccacgcttccccccccagctggagtactaccagatctacagaggaaatgccacagctggggacctgctggccgcctttgagctgctgcagatcggccctgctgggaaggctgacctgccccccatcaatggacctgtggatgtggaccggggccccatcatgcctgtgcccatgggcatccggcctgtgctgagcaagtacagagtggaggtgctcttctggggcctgcgggacctgaagagggtgaacctggcccaggtggaccggccccgggtggacattgaatgtgccgggaaaggagtgcagagcagcctcatccacaactacaagaagaaccccaacttcaacaccctggtgaagtggtttgaggtggacctgcctgaaaatgagctgctgcacccccccctgaacatccgggtggtggactgccgggccttcggccgctacaccctggtgggcagccatgctgtgagcagcctgcggcgcttcatctacagacctccagacagaagtgcccccagctggaacaccaccgtgcggctgctgcggcgctgccgggtgctgtgcaatggaggcagcagcagccacagcactggagaggtggtggtgaccatggagcctgaggtgcccatcaagaagctggagaccatggtgaagctggatgccaccagcgaggccgtggtgaaggtggatgtggccgaggaggagaaggagaagaagaagaagaagaagggcacagctgaggagcctgaggaggaggagccagatgagagcatgctggactggtggagcaagtactttgccagcattgacaccatgaaggagcagctgcggcagcaggagcccagcggcatcgacctggaggagaaggaggaggtggacaacacagagggcctgaagggctccatgaagggcaaggagaaggcccgggccgccaaggaggagaagaagaagaagacccagagcagcggcagcggccagggcagcgaggcccctgagaagaagaagcccaagattgatgagctgaaggtgtaccccaaggagctggagagcgagtttgacaactttgaggactggctgcacaccttcaacctgctgcggggcaagacaggagatgatgaagatggcagcacagaggaggagagaattgtgggccgcttcaagggcagcctgtgtgtgtacaaggtgcccctgcctgaagatgtgtcccgggaggccggctatgacagcacctacggcatgttccagggcatccccagcaatgaccccatcaacgtgctggtgcgggtgtatgtggtgcgggccacagacctgcaccctgctgacatcaacgggaaggctgacccctacatcgccatccggctgggcaagacagacatccgggacaaggagaactacatcagcaagcagctgaaccctgtgtttgggaagagctttgatattgaggccagcttccccatggagagcatgctgactgtggccgtgtatgactgggacctggtgggcacagatgacctgattggagagaccaagattgacctggagaaccgcttctacagcaagcaccgggccacctgtggcatcgcccagacctacagcacccacggctacaacatctggagggaccccatgaagcccagccagatcctgacccggctgtgcaaggatggcaaggtggatggcccccacttcggccccccaggccgggtgaaggtggccaacagagtcttcaccggccccagcgagattgaagatgaaaatggccagaggaagcccacagatgagcacgtggccctgctggccctgcggcactgggaggacatccccagggctggctgccgcctggtgcctgagcacgtggagacccggcccctgctgaacccagacaagccaggcatcgagcagggccgcctggagctgtgggtggacatgttccccatggacatgcctgcccctggcacccccctggacatcagccccaggaagcccaagaagtatgagctgcgggtcatcatctggaacacagatgaggtggtgctggaggatgatgacttcttcaccggggagaagagcagtgacatctttgtgcggggctggctgaagggccagcaggaggacaagcaggacacagatgtgcactaccacagcctgaccggggagggcaacttcaactggagatacctgttcccctttgactacctggccgctgaggagaagatcgtcatcagcaagaaggagagcatgttctcctgggatgaaacagagtacaagatcccagcccggctgaccctgcagatctgggatgctgaccacttcagcgcagatgacttcctgggcgccatcgagctggacctgaaccgcttccccaggggggccaagacagccaagcagtgcaccatggagatggccaccggggaggtggatgtgcccctggtgtccatcttcaagcagaagagggtgaagggctggtggcccctgctggccagaaatgaaaatgatgaatttgagctgaccgggaaggtggaggccgagctgcacctgctgacagctgaggaggccgagaagaaccctgtgggcctggccagaaatgaaccagaccccctggagaagcccaacagaccagacaccagcttcatctggttcctgaaccccctgaagagcgcccgctacttcctgtggcacacctaccgctggctgctgctgaagctgctgctgctgctgctgctgctgctgctgctggccctcttcctgtacagcgtgcccggctacctggtgaagaagatcctgggcgcctag

SEQ ID NO: 258510 - DNA, 3924 bp, Artificial Sequence
  derived and/or modified sequence
atgatgaccgacacccaggacggccccagcgagagcagccagatcatgcgcagtctaacccctttgattaatagagaagaagcattcggagaggccggcgaggcagggttatggcccagcatcacccacacccctgacagtcaggaggagggtttgaacgacatccaagaaatgataaagactgagaagagctatcccgaacggcgcttacggggagtcctggaagagctctcatgcggctgctgcaggtttctgagccttgcggacaaggaccaaggccacagcagtagaacacgtttagaccgggagcggctaaagagctgtatgagagaactggagaacatggggcaacaagcaaggatgttgcgcgctcaggtgaagagacataccgtgagggataaattgaggttatgtcaaaattttcttcagaaactgaggttcctcgcagacgaaccacagcactccatccccgacatcttcatttggatgatgtccaacaataagagggtcgcatacgcgcgcgtgccctctaaggacctgttgttctcgattgttgaggaggagacgggtaaagattgcgccaaggtgaagactctgttcctgaaactgccaggcaagcgcggcttcggtagtgctgggtggacagtgcaggctaaggtagagctctacttatggctggggttatcaaagcaacgaaaggaatttctgtgtggcctgccttgtggtttccaagaagtcaaggctgcccaggggctcggcctgcatgcctttccccccgtcagtctggtgtacacaaagaagcaggcgtttcagctgagagcacatatgtatcaggccaggagtctcttcgctgctgactcctctggcctaagtgacccgttcgcccgcgtctttttcatcaaccagtcccaatgcaccgaggtgctgaacgagacactgtgcccaacctgggatcagatgttagtcttcgataatcttgagttatatggtgaagctcacgagcttagagacgatcccccaatcatagttattgaaatctatgatcaggattcaatgggcaaagctgatttcatgggcaggacattcgcgaaaccgcttgtgaagatggctgatgaagcctattgcccacccagatttcctccacagctggaatactaccagatctaccgaggaaatgccacagccggtgatttactggcggccttcgagctgcttcagatcggcccagccggaaaggccgatctccctccgatcaatggccccgtggacgtggatcggggccccattatgccagttcccatgggaataagacccgtcttatccaaatatagggtggaggtgctgttctggggccttcgcgatctgaaacgagttaatcttgcacaagtggaccgcccaagagtggatatcgagtgtgctggcaagggtgtacagagcagccttattcataactataaaaaaaacccaaactttaacactttggtcaaatggttcgaggtggatctgccggagaacgaattattgcatcctccccttaatatccgcgttgttgattgtcgagccttcggcagatatactttggtggggtctcatgccgttagcagtctccgacgctttatctatcgacccccggatagaagtgccccgtcctggaatacaaccgtgcggctgctcagaaggtgcagggtgctttgcaacggcggctccagctcacacagcaccggagaggtggtggtgacaatggaaccagaggttccaatcaagaagttagaaacgatggttaaacttgacgctaccagcgaggctgtggtaaaagtcgacgtcgcagaagaagagaaggagaagaaaaaaaagaagaagggtactgccgaagagccagaggaggaagaacccgacgaatccatgctggattggtggagtaaatacttcgcgtcaattgatacaatgaaggagcagctgagacagcaggagcctagcgggatagacttagaagaaaaggaagaggtggacaacacagaggggctgaaaggctccatgaagggtaaggagaaagcccgtgcagctaaagaagagaaaaagaaaaaaacgcagtcatcaggctcaggacagggctccgaggcccctgagaaaaaaaagccaaagatcgatgagctcaaagtgtatcccaaagaactggagtctgaatttgacaacttcgaagactggctgcatacgttcaacctgctccggggcaaaacaggcgatgatgaagacgggtctacagaagaggagcggattgtaggtcgcttcaaaggaagcttgtgtgtttataaggtgcccttgccagaggacgtttctcgggaagccggatacgattctacatacggaatgttccaaggtatcccctctaacgaccccattaacgtactggtgcgcgtctacgtagttagagccactgacttacaccccgctgacataaacggcaaagcggacccgtatatcgctataagactcggtaagacagacatcagggacaaagaaaactatatatccaaacagcttaatcccgtcttcgggaagtcattcgacatcgaagccagttttccgatggagtctatgctgactgtggcagtctatgattgggacctggtcggcaccgacgatttaataggtgaaacaaaaattgacctggagaatcgcttttactccaaacatcgggcaacctgtggcattgcacagacttactctactcacgggtataacatctggcgcgaccctatgaagccctcccagatcctgacccgcctctgcaaagacggaaaggtcgacggcccccacttcgggccccccggacgcgtcaaagtggcaaaccgtgtttttactgggcccagcgaaatcgaagacgagaacggtcagcgaaaacctacggatgagcatgttgcgttgctcgcactcagacattgggaagatattccccgagcgggatgtcgtctcgtgcctgagcatgtggagacacgcccacttctgaaccccgataaacctggtatagagcagggccgactggaattatgggtggatatgtttccaatggacatgcctgcccccggaacgcctttggacattagccctagaaagccaaagaagtacgagcttcgggtaataatctggaatacagatgaagtagtgctagaggacgatgacttcttcaccggtgagaagagttctgatatattcgttagaggatggttaaagggacagcaagaagataagcaggatactgatgttcactatcattcacttactggagagggtaattttaattggcgttacttgttccccttcgactacctcgctgctgaggagaaaattgttatctcaaagaaggagtccatgtttagctgggacgagaccgaatacaagataccagcgcgccttacgctccagatttgggatgccgaccattttagcgctgatgatttccttggggccatcgagctggaccttaacagatttcctagaggtgccaaaaccgcaaagcagtgcaccatggaaatggcgactggcgaggtggacgtgcccctggtttctatctttaaacagaaacgtgtcaaggggtggtggcctcttttggctaggaatgaaaacgacgagttcgagctgacgggcaaggtcgaagccgagttacacttgcttaccgccgaggaggccgagaaaaatcctgtagggctagctagaaatgaaccggatcctctggagaaaccaaatagacctgatacttcatttatctggttcctcaaccctctgaagtccgcccgttattttctctggcacacctaccgttggttactgctgaagcttctgctcctgctgctgcttctcttgctgctcgctctatttctctacagcgtgcctggctacctggttaagaagatcctcggcgcctag

SEQ ID NO: 258511 - DNA, 4954 bp, Artificial Sequence
  derived and/or modified sequence
ccgtgagttctgcccaggccctgtgagctcaccagagccacagactcacagcccagaggtggcttcttccttcaggaactgaagaacccccatgaacaccaacatctccaggttctgagaacagaacctgggaaattgatgacttcctcatgatgaccgatactcaggatggccctagcgagagctcccagatcatgaggaagaaggcctgaacgacatacaggagatgatcaaaacggagaagtcctaccctgagcgtcgcctgcggggcgtcctggaggagctgagctgtggctgctgccgcttcctctccctcgctgacaaggaccagggccactcatcccgcaccaggcttgaccgggagcgcctcaagtcctgcatgagggagctggaaaacatggggcagcaggccaggatgctgcgggcccaggtgaagcggcacacggtgcgggacaagctgaggctgtgccagaacttcctgcagaagctgcgcttcctggcggacgagccccagcacagcattcccgacatcttcatctggatgatgagcaacaacaagcgtgtcgcctatgcccgtgtgccctccaaggacctgctcttctccatcgtggaggaggagactggcaaggactgcgccaaggtcaagacgctcttccttaagctgccagggaagcggggcttcggctcggcaggctggacagtgcaggccaaggtggagctgtacctgtggctgggcctcagcaaacagcgcaaggagttcctgtgcggcctgccctgtggcttccaggaggtcaaggcagcccagggcctgggcctgcatgccttcccacccgtcagcctggtctacaccaagaagcaggcgttccagctccgagcgcacatgtaccaggcccgcagcctctttgccgccgacagcagcggactctcagacccctttgcccgcgtcttcttcatcaatcagagtcagtgcacagaggtgctgaatgagaccctgtgtcccacctgggaccagatgctggtgttcgacaacctggagctctatggtgaagctcatgagctgagggacgatccgcccatcattgtcattgaaatctatgaccaggattccatgggcaaagctgacttcatgggccggaccttcgccaaacccctggtgaagatggcagacgaggcgtactgcccaccccgcttcccacctcagctcgagtactaccagatctaccgtggcaacgccacagctggagacctgctggcggccttcgagctgctgcagattggaccagcagggaaggctgacctgccccccatcaatggcccggtggacgtggaccgaggtcccatcatgcccgtgcccatgggcatccggcccgtgctcagcaagtaccgagtggaggtgctgttctggggcctacgggacctaaagcgggtgaacctggcccaggtggaccggccacgggtggacatcgagtgtgcagggaagggggtgcagtcgtccctgatccacaattataagaagaaccccaacttcaacaccctcgtcaagtggtttgaagtggacctcccagagaacgagctgctgcacccgcccttgaacatccgtgtggtggactgccgggccttcggtcgctacacactggtgggctcccatgccgtcagctccctgcgacgcttcatctaccggcccccagaccgctcggcccccagctggaacaccacgggggaggttgtggtgactatggagccagaggtacccatcaagaaactggagaccatggtgaagctggacgcgacttctgaagctgttgtcaaggtggatgtggctgaggaggagaaggagaagaagaagaagaagaagggcactgcggaggagccagaggaggaggagccagacgagagcatgctggactggtggtccaagtactttgcctccattgacaccatgaaggagcaacttcgacaacaagagccctctggaattgacttggaggagaaggaggaagtggacaataccgagggcctgaaggggtcaatgaagggcaaggagaaggcaagggctgccaaagaggagaagaagaagaaaactcagagctctggctctggccaggggtccgaggcccccgagaagaagaaacccaagattgatgagcttaaggtataccccaaagagctggagtccgagtttgataactttgaggactggctgcacactttcaacttgcttcggggcaagaccggggatgatgaggatggctccaccgaggaggagcgcattgtgggacgcttcaagggctccctctgcgtgtacaaagtgccactcccagaggacgtgtcccgggaagccggctacgactccacctacggcatgttccagggcatcccgagcaatgaccccatcaatgtgctggtccgagtctatgtggtccgggccacggacctgcaccctgctgacatcaacggcaaagctgacccctacatcgccatccggctaggcaagactgacatccgcgacaaggagaactacatctccaagcagctcaaccctgtctttgggaagtcctttgacatcgaggcctccttccccatggaatccatgctgacggtggctgtgtatgactgggacctggtgggcactgatgacctcattggggaaaccaagatcgacctggagaaccgcttctacagcaagcaccgcgccacctgcggcatcgcccagacctactccacacatggctacaatatctggcgggaccccatgaagcccagccagatcctgacccgcctctgcaaagacggcaaagtggacggcccccactttgggccccctgggagagtgaaggtggccaaccgcgtcttcactgggccctctgagattgaggacgagaacggtcagaggaagcccacagacgagcatgtggcgctgttggccctgaggcactgggaggacatcccccgcgcaggctgccgcctggtgccagagcatgtggagacgaggccgctgctcaaccccgacaagccgggcatcgagcagggccgcctggagctgtgggtggacatgttccccatggacatgccagcccctgggacgcctctggacatctcacctcggaagcccaagaagtacgagctgcgggtcatcatctggaacacagatgaggtggtcttggaggacgacgacttcttcacaggggagaagtccagtgacatcttcgtgagggggtggctgaagggccagcaggaggacaagcaggacacagacgtccactaccactccctcactggcgagggcaacttcaactggcgctacctgttccccttcgactacctggcggcggaggagaagatcgtcatctccaagaaggagtccatgttctcctgggacgagaccgagtacaagatccccgcgcggctcaccctgcagatctgggatgcggaccacttctccgctgacgacttcctgggggccatcgagctggacctgaaccggttcccgcggggcgcaaagacagccaagcagtgcaccatggagatggccaccggggaggtggacgtgcccctcgtgtccatcttcaagcaaaagcgcgtcaaaggctggtggcccctcctggcccgcaatgagaacgatgagtttgagctcacgggcaaggtggaggctgagctgcatttactgacagcagaggaggcagagaagaacccagtgggcctggcccgcaatgaacctgaccccctagagaaacccaaccggcccgacacgagcttcatctggttcctgaaccctctcaagtcggctcgctacttcttgtggcacacgtatcgctggctgctcctcaaactgttgctgctcctgctgctgctcctcctcctcgccctgttcctctactctgtgcctggctacctggtcaagaaaatcctcggggcctgagcccagtggcctcctggccggcccgacacggccttcgtctggttcctcaaccctctcaagtccatcaagtacctcatctgcacccggtacaagtggctcatcatcaagatcgtgctggcgctgttggggctgctcatgttggggctcttcctctacagcctccctggctacatggtcaaaaagctccttggggcatgaaggccgccagctcccgccagccgctccccagccctgccgcatttcctttcagtggcttggactctttcccatctcccctggggagcctgaggagcccagcgtccactcttcatgccttgggccgagcctgcctcctgcttgcgggggccgcctgtcctcactgccccaggctgcggcttgcccagtcccgcccctctgacccctgcctgtgggctggggagccttggatggggtggggacctggaatgggtctctcttgccccacctggctgaggcgccacccttcttcaggcccaggctccagaggaagactcctgaaaccctccccaggtcttccaagtacaggattgaagctttagtgaaattaaccaaggaccatgggtcagtgcccagggctttaaaaagaatgaacgagcaaaaggtatccccgccgtgacccctgcagatagcaccggtctttgatccgcagcaggggccagaccctgcccacaagtcccagcgcggctgcttctgccactgctgggctccacttggctcctctcacttcccagggggtcgcctgtcctgcctgtgggtttccatggcttcccagagctccctctgccccagccagcgcctccaggcccagctgaggagctgtgagaagcagcagaggggactccccatcccgggcacaccctgtcctcccacccctgcccccttgcccttccagccctttcagctgcagctgggagctggcccgtcaagtgctgcccctgcctgtgtctgggtttctgttggctgtttttcttttcttgagtggtgatttttctctaaataaaagaagtcaagcactga

SEQ ID NO: 258512 - DNA, 5108 bp, Artificial Sequence
  derived and/or modified sequence
ccgtgagttctgcccaggccctgtgagctcaccagagccacagactcacagcccagaggtggcttcttccttcaggaactgaagaacccccatgaacaccaacatctccaggttctgagaacagaacctgggaaattgatgacttcctcatgatgaccgatactcaggatggccctagcgagagctcccagatcatgaggtccctcactcccctgatcaacagggaggaggcatttggggaggctggggaggcggggctgtggcccagcatcacccacactcctgattcacaggaagaaggcctgaacgacatacaggagatgatcaaaacggagaagtcctaccctgagcgtcgcctgcggggcgtcctggaggagctgagctgtggctgctgccgcttcctctccctcgctgacaaggaccagggccactcatcccgcaccaggcttgaccgggagcgcctcaagtcctgcatgagggagctggaaaacatggggcagcaggccaggatgctgcgggcccaggtgaagcggcacacggtgcgggacaagctgaggctgtgccagaacttcctgcagaagctgcgcttcctggcggacgagccccagcacagcattcccgacatcttcatctggatgatgagcaacaacaagcgtgtcgcctatgcccgtgtgccctccaaggacctgctcttctccatcgtggaggaggagactggcaaggactgcgccaaggtcaagacgctcttccttaagctgccagggaagcggggcttcggctcggcaggctggacagtgcaggccaaggtggagctgtacctgtggctgggcctcagcaaacagcgcaaggagttcctgtgcggcctgccctgtggcttccaggaggtcaaggcagcccagggcctgggcctgcatgccttcccacccgtcagcctggtctacaccaagaagcaggcgttccagctccgagcgcacatgtaccaggcccgcagcctctttgccgccgacagcagcggactctcagacccctttgcccgcgtcttcttcatcaatcagagtcagtgcacagaggtgctgaatgagaccctgtgtcccacctgggaccagatgctggtgttcgacaacctggagctctatggtgaagctcatgagctgagggacgatccgcccatcattgtcattgaaatctatgaccaggattccatgggcaaagctgacttcatgggccggaccttcgccaaacccctggtgaagatggcagacgaggcgtactgcccaccccgcttcccacctcagctcgagtactaccagatctaccgtggcaacgccacagctggagacctgctggcggccttcgagctgctgcagattggaccagcagggaaggctgacctgccccccatcaatggcccggtggacgtggaccgaggtcccatcatgcccgtgcccatgggcatccggcccgtgctcagcaagtaccgagtggaggtgctgttctggggcctacgggacctaaagcgggtgaacctggcccaggtggaccggccacgggtggacatcgagtgtgcagggaagggggtgcagtcgtccctgatccacaattataagaagaaccccaacttcaacaccctcgtcaagtggtttgaagtggacctcccagagaacgagctgctgcacccgcccttgaacatccgtgtggtggactgccgggccttcggtcgctacacactggtgggctcccatgccgtcagctccctgcgacgcttcatctaccggcccccagaccgctcggcccccagctggaacaccacggtcaggcttctccggcgctgccgtgtgctgtgcaatgggggctcctcctctcactccacaggggaggttgtggtgactatggagccagaggtacccatcaagaaactggagaccatggtgaagctggacgcgacttctgaagctgttgtcaaggtggatgtggctgaggaggagaaggagaagaagaagaagaagaagggcactgcggaggagccagaggaggaggagccagacgagagcatgctggactggtggtccaagtactttgcctccattgacaccatgaaggagcaacttcgacaacaagagccctctggaattgacttggaggagaaggaggaagtggacaataccgagggcctgaaggggtcaatgaagggcaaggagaaggcaagggctgccaaagaggagaagaagaagaaaactcagagctctggctctggccaggggtccgaggcccccgagaagaagaaacccaagattgatgagcttaaggtataccccaaagagctggagtccgagtttgataactttgaggactggctgcacactttcaacttgcttcggggcaagaccggggatgatgaggatggctccaccgaggaggagcgcattgtgggacgcttcaagggctccctctgcgtgtacaaagtgccactcccagaggacgtgtcccgggaagccggctacgactccacctacggcatgttccagggcatcccgagcaatgaccccatcaatgtgctggtccgagtctatgtggtccgggccacggacctgcaccctgctgacatcaacggcaaagctgacccctacatcgccatccggctaggcaagactgacatccgcgacaaggagaactacatctccaagcagctcaaccctgtctttgggaagtcctttgacatcgaggcctccttccccatggaatccatgctgacggtggctgtgtatgactgggacctggtgggcactgatgacctcattggggaaaccaagatcgacctggagaaccgcttctacagcaagcaccgcgccacctgcggcatcgcccagacctactccacacatggctacaatatctggcgggaccccatgaagcccagccagatcctgacccgcctctgcaaagacggcaaagtggacggcccccactttgggccccctgggagagtgaaggtggccaaccgcgtcttcactgggccctctgagattgaggacgagaacggtcagaggaagcccacagacgagcatgtggcgctgttggccctgaggcactgggaggacatcccccgcgcaggctgccgcctggtgccagagcatgtggagacgaggccgctgctcaaccccgacaagccgggcatcgagcagggccgcctggagctgtgggtggacatgttccccatggacatgccagcccctgggacgcctctggacatctcacctcggaagcccaagaagtacgagctgcgggtcatcatctggaacacagatgaggtggtcttggaggacgacgacttcttcacaggggagaagtccagtgacatcttcgtgagggggtggctgaagggccagcaggaggacaagcaggacacagacgtccactaccactccctcactggcgagggcaacttcaactggcgctacctgttccccttcgactacctggcggcggaggagaagatcgtcatctccaagaaggagtccatgttctcctgggacgagaccgagtacaagatccccgcgcggctcaccctgcagatctgggatgcggaccacttctccgctgacgacttcctgggggccatcgagctggacctgaaccggttcccgcggggcgcaaagacagccaagcagtgcaccatggagatggccaccggggaggtggacgtgcccctcgtgtccatcttcaagcaaaagcgcgtcaaaggctggtggcccctcctggcccgcaatgagaacgatgagtttgagctcacgggcaaggtggaggctgagctgcatttactgacagcagaggaggcagagaagaacccagtgggcctggcccgcaatgaacctgaccccctagagaaacccaaccggcccgacacgagcttcatctggttcctgaaccctctcaagtcggctcgctacttcttgtggcacacgtatcgctggctgctcctcaaactgttgctgctcctgctgctgctcctcctcctcgccctgttcctctactctgtgcctggctacctggtcaagaaaatcctcggggcctgagcccagtggcctcctggccggcccgacacggccttcgtctggttcctcaaccctctcaagtccatcaagtacctcatctgcacccggtacaagtggctcatcatcaagatcgtgctggcgctgttggggctgctcatgttggggctcttcctctacagcctccctggctacatggtcaaaaagctccttggggcatgaaggccgccagctcccgccagccgctccccagccctgccgcatttcctttcagtggcttggactctttcccatctcccctggggagcctgaggagcccagcgtccactcttcatgccttgggccgagcctgcctcctgcttgcgggggccgcctgtcctcactgccccaggctgcggcttgcccagtcccgcccctctgacccctgcctgtgggctggggagccttggatggggtggggacctggaatgggtctctcttgccccacctggctgaggcgccacccttcttcaggcccaggctccagaggaagactcctgaaaccctccccaggtcttccaagtacaggattgaagctttagtgaaattaaccaaggaccatgggtcagtgcccagggctttaaaaagaatgaacgagcaaaaggtatccccgccgtgacccctgcagatagcaccggtctttgatccgcagcaggggccagaccctgcccacaagtcccagcgcggctgcttctgccactgctgggctccacttggctcctctcacttcccagggggtcgcctgtcctgcctgtgggtttccatggcttcccagagctccctctgccccagccagcgcctccaggcccagctgaggagctgtgagaagcagcagaggggactccccatcccgggcacaccctgtcctcccacccctgcccccttgcccttccagccctttcagctgcagctgggagctggcccgtcaagtgctgcccctgcctgtgtctgggtttctgttggctgtttttcttttcttgagtggtgatttttctctaaataaaagaagtcaagcactga

SEQ ID NO: 258513 - DNA, 3924 bp, Artificial Sequence
  derived and/or modified sequence
atgatgacagacacacaggacggaccttccgaaagttcacagatcatgcgctcactcacccctctgataaatagagaagaagctttcggtgaagccggagaggcaggactgtggccgtccatcacccacacgcccgacagccaggaggaaggactgaacgatatccaggaaatgattaagaccgagaagtcctacccagagcgccgtctgcggggagtgctggaggagcttagttgcggctgctgtcggttcctttctttggctgataaagaccagggccacagttctcggaccaggctggatagagagaggctgaaatcttgcatgcgggaactcgagaacatgggtcagcaagccaggatgctgagggcacaggtgaaacgccataccgttagagacaaactgcgtctgtgccagaatttcttacaaaagttgagattcctagccgatgaaccccaacacagtattccagacatcttcatctggatgatgtctaacaataagcgggttgcgtatgcgagagtgccatctaaggaccttctgttttcaatcgttgaggaagaaaccggcaaggactgtgcaaaggtgaagactctattcctgaagctgcctggaaagagaggctttgggtccgctggctggacggtccaggcgaaagttgaactttatctgtggctgggcctgagcaagcagaggaaagagttcctgtgcggacttccatgtggcttccaagaggtaaaagctgcccaaggacttggccttcacgcttttcctcccgtttctttggtttatacaaaaaaacaagcctttcagctgcgcgcacatatgtatcaggctagatctttgttcgctgccgactcctctggtctctctgatccattcgcacgggtgttcttcatcaaccagtcccagtgtaccgaggttttgaacgagactctctgccctacatgggatcagatgctcgtctttgataatcttgagctctatggcgaagctcacgagttaagggatgacccccctattatcgtgattgaaatctatgaccaggattcaatgggaaaagctgattttatgggtcgcacctttgctaagcccttggtcaagatggccgacgaagcctattgccctcctaggtttcctcctcaactggagtactaccaaatctacagaggaaacgccaccgctggtgacctactcgcagcctttgagctcctccagattggaccagcaggaaaggccgacctgcccccaataaatggcccagtggatgttgacagaggtcctattatgcccgtccccatgggaatccggccagtgttgagcaagtatagagtggaagtactattttggggactccgcgatctgaagagggttaatttagctcaggtcgatagacctcgtgtggacattgaatgtgccggtaaaggagtgcagtcaagtctgatccacaattacaaaaagaatcccaatttcaatacactagtaaagtggtttgaagtagatctgcctgagaatgagctgctgcatccaccactcaacattcgggtggttgattgccgcgcattcggaaggtatactctcgtgggctcccatgcagtgagcagtctgcggaggttcatttaccggcctcccgataggtccgctccctcatggaacaccacagtgcgtttgttgaggaggtgtagagtcctctgtaatgggggatcctcttctcacagcacgggggaagttgtcgttaccatggaacctgaggtgcctattaagaagttggaaactatggtcaagctggatgcaactagcgaagccgtggtgaaagtggacgttgcggaagaggaaaaagaaaagaagaaaaagaaaaaaggtaccgctgaggagccagaggaggaggaacccgacgagtcaatgcttgactggtggtctaaatactttgcttcaatcgacacaatgaaagagcagttgagacagcaggagccgtctgggattgacctggaagaaaaggaggaagtagacaataccgaaggtctgaagggctccatgaaagggaaggagaaggcaagagcagctaaagaggagaagaagaaaaagactcaatccagcggtagcggccaggggtctgaggcacctgagaagaaaaagccgaaaatcgacgaactgaaggtctatcccaaggagctggagagcgagtttgacaattttgaagactggctgcacacgttcaatcttctgcggggaaagaccggcgatgatgaagacggctccaccgaggaagaacggatcgtcggaagattcaaggggagcctgtgcgtgtataaggttccccttccagaggacgtgtctagagaagcaggttacgacagcacgtacggaatgttccaaggcataccttctaacgatcccatcaacgtgctcgtgagagtctacgttgttagagccactgacctacaccctgccgacatcaacggcaaggcagacccctacatcgccatcagacttggaaagacagacataagggacaaagagaattatatttcgaaacagctgaaccccgtctttggtaagtcctttgacatcgaagcctcatttcccatggagtcaatgctgacagtagcagtgtacgattgggaccttgtgggcaccgacgacctgattggagagaccaagatcgatcttgaaaaccgtttttattcaaagcatcgggctacctgcggcattgcccagacctattcaactcacggatataatatctggcgcgaccccatgaagccaagccaaatcttgacacgactgtgcaaagatggaaaggtggacggaccccatttcggacccccaggacgagtgaaggttgctaatagagtcttcacaggacccagtgaaatcgaggatgagaatggacaacggaaacccaccgacgagcacgtggccctgctggccctgcgtcactgggaggatatcccaagagccggttgtcgcctggtgccagaacacgtagagacgaggcccctgcttaaccctgacaaacccggaatcgagcagggtcgtctggagctgtgggtggacatgtttcctatggacatgccagcccctgggaccccccttgacatcagccctcggaaaccgaaaaagtatgaactccgggtaatcatctggaatactgatgaggtggtcctggaggatgatgacttctttaccggcgagaaatctagcgacattttcgtgaggggctggttaaaagggcagcaggaagataaacaggatacagatgtgcattaccatagccttaccggagagggtaacttcaactggcggtacctgttccctttcgattacctggccgctgaagagaagattgtcatcagtaaaaaggagagcatgttctcatgggatgagacagaatacaagattccggcacgcctgaccctccagatctgggacgcagatcatttctccgcggacgactttctcggcgcaatcgagctcgacttaaacagatttccgagaggtgctaaaactgcaaagcagtgcacaatggagatggctacaggagaagtcgatgtaccactcgtctctatatttaaacagaaacgcgtgaagggttggtggccactactcgcgaggaacgaaaatgacgaattcgagctgaccggcaaagtggaggcagagttgcatctcctgactgccgaagaagctgaaaagaatccagtgggtctcgcaaggaatgagccagaccccctagagaagcctaacagaccagataccagttttatctggttcctgaatcccctgaaaagcgcgagatactttctatggcatacctacaggtggctcttgctgaagttactccttctcctgctgctgctcctactgctcgccctgttcctgtactctgtgccgggatacctggtaaagaaaattcttggggcatag

SEQ ID NO: 258514 - DNA, 3924 bp, Artificial Sequence
  derived and/or modified sequence
atgatgaccgacacccaggacggccccagcgagagcagccagatcatgagaagcctgacccccctgatcaacagagaggaggccttcggcgaggccggcgaggccggcctgtggcccagcatcacccacacccccgacagccaggaggagggcctgaacgacatccaggagatgatcaagaccgagaagagctaccccgagagaagactgagaggcgtgctggaggagctgagctgcggctgctgcagattcctgagcctggccgacaaggaccagggccacagcagcagaaccagactggacagagagagactgaagagctgcatgagagagctggagaacatgggccagcaggccagaatgctgagagcccaggtgaagagacacaccgtgagagacaagctgagactgtgccagaacttcctgcagaagctgagattcctggccgacgagccccagcacagcatccccgacatcttcatctggatgatgagcaacaacaagagagtggcctacgccagagtgcccagcaaggacctgctgttcagcatcgtggaggaggagaccggcaaggactgcgccaaggtgaagaccctgttcctgaagctgcccggcaagagaggcttcggcagcgccggctggaccgtgcaggccaaggtggagctgtacctgtggctgggcctgagcaagcagagaaaggagttcctgtgcggcctgccctgcggcttccaggaggtgaaggccgcccagggcctgggcctgcacgccttcccccccgtgagcctggtgtacaccaagaagcaggccttccagctgagagcccacatgtaccaggccagaagcctgttcgccgccgacagcagcggcctgagcgaccccttcgccagagtgttcttcatcaaccagagccagtgcaccgaggtgctgaacgagaccctgtgccccacctgggaccagatgctggtgttcgacaacctggagctgtacggcgaggcccacgagctgagagacgacccccccatcatcgtgatcgagatctacgaccaggacagcatgggcaaggccgacttcatgggcagaaccttcgccaagcccctggtgaagatggccgacgaggcctactgcccccccagattccccccccagctggagtactaccagatctacagaggcaacgccaccgccggcgacctgctggccgccttcgagctgctgcagatcggccccgccggcaaggccgacctgccccccatcaacggccccgtggacgtggacagaggccccatcatgcccgtgcccatgggcatcagacccgtgctgagcaagtacagagtggaggtgctgttctggggcctgagagacctgaagagagtgaacctggcccaggtggacagacccagagtggacatcgagtgcgccggcaagggcgtgcagagcagcctgatccacaactacaagaagaaccccaacttcaacaccctggtgaagtggttcgaggtggacctgcccgagaacgagctgctgcacccccccctgaacatcagagtggtggactgcagagccttcggcagatacaccctggtgggcagccacgccgtgagcagcctgagaagattcatctacagaccccccgacagaagcgcccccagctggaacaccaccgtgagactgctgagaagatgcagagtgctgtgcaacggcggcagcagcagccacagcaccggcgaggtggtggtgaccatggagcccgaggtgcccatcaagaagctggagaccatggtgaagctggacgccaccagcgaggccgtggtgaaggtggacgtggccgaggaggagaaggagaagaagaagaagaagaagggcaccgccgaggagcccgaggaggaggagcccgacgagagcatgctggactggtggagcaagtacttcgccagcatcgacaccatgaaggagcagctgagacagcaggagcccagcggcatcgacctggaggagaaggaggaggtggacaacaccgagggcctgaagggcagcatgaagggcaaggagaaggccagagccgccaaggaggagaagaagaagaagacccagagcagcggcagcggccagggcagcgaggcccccgagaagaagaagcccaagatcgacgagctgaaggtgtaccccaaggagctggagagcgagttcgacaacttcgaggactggctgcacaccttcaacctgctgagaggcaagaccggcgacgacgaggacggcagcaccgaggaggagagaatcgtgggcagattcaagggcagcctgtgcgtgtacaaggtgcccctgcccgaggacgtgagcagagaggccggctacgacagcacctacggcatgttccagggcatccccagcaacgaccccatcaacgtgctggtgagagtgtacgtggtgagagccaccgacctgcaccccgccgacatcaacggcaaggccgacccctacatcgccatcagactgggcaagaccgacatcagagacaaggagaactacatcagcaagcagctgaaccccgtgttcggcaagagcttcgacatcgaggccagcttccccatggagagcatgctgaccgtggccgtgtacgactgggacctggtgggcaccgacgacctgatcggcgagaccaagatcgacctggagaacagattctacagcaagcacagagccacctgcggcatcgcccagacctacagcacccacggctacaacatctggagagaccccatgaagcccagccagatcctgaccagactgtgcaaggacggcaaggtggacggcccccacttcggcccccccggcagagtgaaggtggccaacagagtgttcaccggccccagcgagatcgaggacgagaacggccagagaaagcccaccgacgagcacgtggccctgctggccctgagacactgggaggacatccccagagccggctgcagactggtgcccgagcacgtggagaccagacccctgctgaaccccgacaagcccggcatcgagcagggcagactggagctgtgggtggacatgttccccatggacatgcccgcccccggcacccccctggacatcagccccagaaagcccaagaagtacgagctgagagtgatcatctggaacaccgacgaggtggtgctggaggacgacgacttcttcaccggcgagaagagcagcgacatcttcgtgagaggctggctgaagggccagcaggaggacaagcaggacaccgacgtgcactaccacagcctgaccggcgagggcaacttcaactggagatacctgttccccttcgactacctggccgccgaggagaagatcgtgatcagcaagaaggagagcatgttcagctgggacgagaccgagtacaagatccccgccagactgaccctgcagatctgggacgccgaccacttcagcgccgacgacttcctgggcgccatcgagctggacctgaacagattccccagaggcgccaagaccgccaagcagtgcaccatggagatggccaccggcgaggtggacgtgcccctggtgagcatcttcaagcagaagagagtgaagggctggtggcccctgctggccagaaacgagaacgacgagttcgagctgaccggcaaggtggaggccgagctgcacctgctgaccgccgaggaggccgagaagaaccccgtgggcctggccagaaacgagcccgaccccctggagaagcccaacagacccgacaccagcttcatctggttcctgaaccccctgaagagcgccagatacttcctgtggcacacctacagatggctgctgctgaagctgctgctgctgctgctgctgctgctgctgctggccctgttcctgtacagcgtgcccggctacctggtgaagaagatcctgggcgcctag

SEQ ID NO: 258515 - protein, 1230 aa, Artificial Sequence
  derived and/or modified sequence
MIKTEKSYPERRLRGVLEELSCGCCRFLSLADKDQGHSSRTRLDRERLKSCMRELENMGQQARMLRAQVKRHTVRDKLRLCQNFLQKLRFLADEPQHSIPDIFIWMMSNNKRVAYARVPSKDLLFSIVEEETGKDCAKVKTLFLKLPGKRGFGSAGWTVQAKVELYLWLGLSKQRKEFLCGLPCGFQEVKAAQGLGLHAFPPVSLVYTKKQAFQLRAHMYQARSLFAADSSGLSDPFARVFFINQSQCTEVLNETLCPTWDQMLVFDNLELYGEAHELRDDPPIIVIEIYDQDSMGKADFMGRTFAKPLVKMADEAYCPPRFPPQLEYYQIYRGNATAGDLLAAFELLQIGPAGKADLPPINGPVDVDRGPIMPVPMGIRPVLSKYRVEVLFWGLRDLKRVNLAQVDRPRVDIECAGKGVQSSLIHNYKKNPNFNTLVKWFEVDLPENELLHPPLNIRVVDCRAFGRYTLVGSHAVSSLRRFIYRPPDRSAPSWNTTGEVVVTMEPEVPIKKLETMVKLDATSEAVVKVDVAEEEKEKKKKKKGTAEEPEEEEPDESMLDWWSKYFASIDTMKEQLRQQEPSGIDLEEKEEVDNTEGLKGSMKGKEKARAAKEEKKKKTQSSGSGQGSEAPEKKKPKIDELKVYPKELESEFDNFEDWLHTFNLLRGKTGDDEDGSTEEERIVGRFKGSLCVYKVPLPEDVSREAGYDSTYGMFQGIPSNDPINVLVRVYVVRATDLHPADINGKADPYIAIRLGKTDIRDKENYISKQLNPVFGKSFDIEASFPMESMLTVAVYDWDLVGTDDLIGETKIDLENRFYSKHRATCGIAQTYSTHGYNIWRDPMKPSQILTRLCKDGKVDGPHFGPPGRVKVANRVFTGPSEIEDENGQRKPTDEHVALLALRHWEDIPRAGCRLVPEHVETRPLLNPDKPGIEQGRLELWVDMFPMDMPAPGTPLDISPRKPKKYELRVIIWNTDEVVLEDDDFFTGEKSSDIFVRGWLKGQQEDKQDTDVHYHSLTGEGNFNWRYLFPFDYLAAEEKIVISKKESMFSWDETEYKIPARLTLQIWDADHFSADDFLGAIELDLNRFPRGAKTAKQCTMEMATGEVDVPLVSIFKQKRVKGWWPLLARNENDEFELTGKVEAELHLLTAEEAEKNPVGLARNEPDPLEKPNRPDTAFVWFLNPLKSIKYLICTRYKWLIIKIVLALLGLLMLGLFLYSLPGYMVKKLLGA

SEQ ID NO: 258516 - DNA, 234 bp, Artificial Sequence
  derived and/or modified sequence
gaggccgagaaaaatcccgtgggtctcgctaggaatgaacccgatccgttggagaagcctaaccgccccgatactgcatttgtttggtttctgaaccccctgaaaagtatcaagtacctaatttgtacgcgctataaatggctgattattaaaatcgttttagcactgggttgcagctgctggggacccttgcaaccaccgtggctgcacggccagaaggccccatggggctag

SEQ ID NO: 258517 - DNA, 234 bp, Artificial Sequence
  derived and/or modified sequence
gaggccgagaagaaccctgtgggcctggccagaaatgaaccagaccccctggagaagcccaacagaccagacacagcctttgtgtggttcctgaaccccctgaagagcatcaagtacctgatctgcacccgctacaagtggctgatcatcaagatcgtgctggccctgggctgcagctgctggggccccctgcagcccccctggctgcacggccagaaggccccctggggctag

SEQ ID NO: 258518 - DNA, 234 bp, Artificial Sequence
  derived and/or modified sequence
gaggccgagaagaaccccgtgggcctggcccggaacgagcccgacccattggaaaaaccgaaccggccagataccgcctttgtttggtttctcaatcctctgaaaagcatcaagtacctcatctgtacacggtataaatggttaattattaaaatcgttttggcccttggctgtagttgctgggggcccctgcagcccccgtggctccacggacaaaaggccccctgggggtag

SEQ ID NO: 258519 - DNA, 231 bp, Artificial Sequence
  derived and/or modified sequence
gaggcagagaagaacccagtgggcctggcccgcaatgaacctgaccccctagagaaacccaaccggcccgacacggccttcgtctggttcctcaaccctctcaagtccatcaagtacctcatctgcacccggtacaagtggctcatcatcaagatcgtgctggcgctgggctgctcatgttggggccctctacagcctccctggctacatggtcaaaaagctccttggggc

SEQ ID NO: 258520 - DNA, 234 bp, Artificial Sequence
  derived and/or modified sequence
gaggccgagaagaacccagttggcctcgccagaaacgagccagacccattggagaagccaaatcgaccggacactgctttcgtgtggttcctaaatccgcttaagtcaattaaatatctgatctgtaccaggtataagtggcttatcattaagatagtactagctctcggctgctcttgttggggtcctctccagcccccttggctgcacggtcaaaaggctccctgggggtag

SEQ ID NO: 258521 - DNA, 234 bp, Artificial Sequence
  derived and/or modified sequence
gaggccgagaagaaccccgtgggcctggccagaaacgagcccgaccccctggagaagcccaacagacccgacaccgccttcgtgtggttcctgaaccccctgaagagcatcaagtacctgatctgcaccagatacaagtggctgatcatcaagatcgtgctggccctgggctgcagctgctggggccccctgcagcccccctggctgcacggccagaaggccccctggggctag

SEQ ID NO: 258522 - protein, 45 aa, Artificial Sequence
  derived and/or modified sequence
MSDKPDLSEVEKFDRSKLKKTNTEEKNTLPSKETIQQEKECVQTS

SEQ ID NO: 258523 - DNA, 138 bp, Artificial Sequence
  derived and/or modified sequence
atgtcagacaaaccagatttgtcggaggtcgagaagtttgatcgcagcaagctgaagaagactaatactgaggagaagaacaccctccccagcaaagagactatacagcaggagaaggaatgcgtccagacatcatag

SEQ ID NO: 258524 - DNA, 138 bp, Artificial Sequence
  derived and/or modified sequence
atgtctgacaagccagacctgtctgaggtggagaagtttgacaggagcaagctgaagaagaccaacacagaggagaagaacaccctgcccagcaaggagaccatccagcaggagaaggaatgtgtgcagaccagctag

SEQ ID NO: 258525 - DNA, 138 bp, Artificial Sequence
  derived and/or modified sequence
atgagcgacaagcccgacctgagcgaggtggagaagttcgaccggtcgaagctgaaaaagacaaatactgaagaaaaaaatactctgccatctaaagagacaattcaacaggagaaggagtgtgtgcagacttcctag

SEQ ID NO: 258526 - DNA, 138 bp, Artificial Sequence
  derived and/or modified sequence
atgtccgacaagccggacctcagcgaggtggaaaaattcgatcgaagcaagctgaaaaagaccaacacagaggagaagaacactctgcctagtaaggagaccattcagcaggagaaggagtgtgtgcagacctcatag

SEQ ID NO: 258527 - DNA, 685 bp, Artificial Sequence
  derived and/or modified sequence
ggcggggcctgctgggtggcttagcactgcagggctctgcgcgggaacgctaacctggtccggagcgagtctgggtctcagccccgcgaacagcctttcacgagtcttcaagctttcaggctatcttctagtcaagatgagtgataagccagacttgtcggaagtggagaagtttgacaggtcaaaactgaagaaaactaatactgaagaaaaaaatactcttccctcaaaggaaactatccagcaagagaaagagtgtgttcaaacatcataaaatggggatcgcctcccaacagcagatttcgacattacctgagagtcttgattttaggcttgttttttgtaaacccatgtgtttgtagagattttaggcgtcttcggatatcttctcacctatgttccctggctaagaagtcagaggtagccaatgtttccttaaattcatttttaaacttaccattggtgcatatgttccagatggcagatgctgtcaataatctcaccattgatgacctttgtgtatgtagttcttgcatcctatactggataagcctgttttaacctgctatgatgggtgcttccattgcttcataatcttcatgaagttgcatgcttttgcagcttttcacagtttatttgcatttctaatgtagtaataaagtaaccaatataatcattatcttga

SEQ ID NO: 258528 - DNA, 138 bp, Artificial Sequence
  derived and/or modified sequence
atgagcgacaagcccgacctgagcgaggtggagaagttcgacagaagcaagctgaagaagaccaacaccgaggagaagaacaccctgcccagcaaggagaccatccagcaggagaaggagtgcgtgcagaccagctag

SEQ ID NO: 258529 - DNA, 138 bp, Artificial Sequence
  derived and/or modified sequence
atgagtgataagccagacctaagtgaggtagaaaagtttgaccggtctaagctcaagaagactaataccgaggaaaaaaatacgctgccctctaaggagaccatccagcaggaaaaagagtgcgtgcagacttcttag

SEQ ID NO: 258530 - DNA, 138 bp, Artificial Sequence
  derived and/or modified sequence
atgagcgacaagcccgacctgagcgaggtggagaagttcgaccggtcaaagcttaagaagacgaatacagaggagaaaaatacgttgcctagcaaggaaactatccagcaggaaaaagagtgcgtccaaacaagctag

SEQ ID NO: 258531 - DNA, 138 bp, Artificial Sequence
  derived and/or modified sequence
atgtccgataaaccagatctgagtgaggtcgagaaattcgatcgctccaagctgaagaagaccaacactgaggaaaagaacacactgccgtctaaagagacaatccaacaagagaaggagtgtgtacagacaagctag

SEQ ID NO: 258532 - protein, 136 aa, Artificial Sequence
  derived and/or modified sequence
MSAALLRRGLELLAASEAPRDPPGQAKPRGAPVKRPRKTKAIQAQKLRNSAKGKVPKSALDEYRKRECRDHLRVNLKFLTRTRSTVAESVSQQILRQNRGRKACDRPVAKTKKKKAEGTVFTEEDFQKFQQEYFGS

SEQ ID NO: 258533 - DNA, 411 bp, Artificial Sequence
  derived and/or modified sequence
atgagcgcggcattactgaggagaggacttgagcttttagccgctagtgaggcccccagggaccctcctggacaggccaagcctagaggtgcccctgtgaagcgcccgcgcaaaaccaaggctattcaggcccagaaattgagaaatagtgctaagggcaaagtccccaagagcgcactggatgagtacagaaaaagagagtgtcgggatcacctaagagtgaatctgaagtttctgacccgtacgaggtctaccgtggccgaaagcgtttctcagcaaatcctgcggcagaacaggggtcgtaaagcctgcgataggccggttgcgaagacaaaaaaaaagaaggccgaaggtaccgtgtttactgaggaagactttcagaagttccaacaggagtactttggatcatag

SEQ ID NO: 258534 - DNA, 411 bp, Artificial Sequence
  derived and/or modified sequence
atgtctgctgccctgctgcggcggggcctggagctgctggccgccagcgaggccccccgggaccccccaggccaggccaagcccaggggggcccctgtgaagaggcccaggaagaccaaggccatccaggcccagaagctgaggaacagcgccaagggcaaggtgcccaagagcgccctggatgagtacaggaagagagaatgtcgggaccacctgcgggtgaacctgaagttcctgaccaggaccaggagcacagtggccgagagcgtgtcccagcagatcctgcggcagaacagaggaaggaaggcctgtgacaggcctgtggccaagaccaagaagaagaaggccgagggcaccgtcttcacagaggaggacttccagaagttccagcaggagtacttcggcagctag

SEQ ID NO: 258535 - DNA, 411 bp, Artificial Sequence
  derived and/or modified sequence
atgagcgccgccctgctgcggcggggcctggagctgctggccgcctccgaagcaccacgcgatccacctggccaggccaaaccgagaggggctcctgtcaaacggcctcgaaaaacgaaagccattcaggctcagaagcttagaaactccgctaaaggcaaagtgccaaaatctgccctggatgagtatcgaaagagggagtgccgcgatcatctgcgggtcaaccttaaattcttgacccgaacccggtcaacagtagctgaatccgtttcacagcaaatcctcaggcagaatcgagggcgaaaagcatgcgacagacccgtggccaaaacaaaaaagaagaaggctgaaggaacagtgttcacggaggaagatttccagaaatttcagcaggagtacttcgggagctag

SEQ ID NO: 258536 - DNA, 411 bp, Artificial Sequence
  derived and/or modified sequence
atgagtgcagctctattacggcgtggcctggaattactggctgcatcagaggctcctcgcgacccacccggacaggcaaaacccagaggagcccctgtgaagcggccacgcaagactaaagcaattcaggcgcagaaactgcggaactccgcgaagggcaaagtccccaagtcggcccttgacgagtacaggaaacgcgagtgtagagatcacttgcgggtgaatctgaaatttctcacccgcactaggtctacagtggccgaaagcgtctctcagcagatcctccggcagaaccgcggtagaaaggcctgcgatcggccagttgccaagactaaaaaaaagaaagctgagggtaccgtgtttaccgaagaggacttccagaagtttcaacaagaatatttcggatcatag

SEQ ID NO: 258537 - DNA, 927 bp, Artificial Sequence
  derived and/or modified sequence
ggcacttccgcccatccccctccggatccctctgttcgggctcgggtttccgccgagacgacagggactgccaggtcggaagtagtgtgaggctcgtgggcggagccaagcgccgccatgtccgccgccctgctgcggcggggcctggagctgctggcggcgtccgaggccccccgggaccctccaggtcaggccaagccgagaggggctccggtgaaacggccccggaagacgaaggcaattcaggcccagaaactgcggaactcggccaagggaaaggtgcccaagtcggcactggacgagtaccggaagcgagagtgtcgagaccacctcagagtaaacctgaagtttctgaccaggacgagaagcaccgtggctgagtctgtgagccagcagattttgcgccagaaccggggccgcaaggcctgtgaccggcctgtggccaagaccaagaagaagaaggctgagggcaccgtgttcaccgaggaagacttccagaagttccagcaggaatacttcggcagctaggctccctggagggcacggtgaagaggccttcaagccctgcagcctccgactcctgctggctccaggaaccggccgtgccgcgcggccagcagatggcgatgcaggaccagcctggctcgaggaagccgcggagctgagccgagtggaggctggaatggagctggtgggccggaagtcctggggaggatttacacacagaccggagctggcttccgcaggcctgggcagagcatctgcacctgccggaaaggaacgtatctgttttgtttgcttttgcccaggtggggcctctgggctgtttgctgtggagcaaggctaattcctgagcccttggggacgacagctccaggagtaggaagaagggtgggcttccaagttacaataaatgtgaacccaaga

SEQ ID NO: 258538 - DNA, 411 bp, Artificial Sequence
  derived and/or modified sequence
atgagcgccgccctgctgagaagaggcctggagctgctggccgccagcgaggcccccagagacccccccggccaggccaagcccagaggcgcccccgtgaagagacccagaaagaccaaggccatccaggcccagaagctgagaaacagcgccaagggcaaggtgcccaagagcgccctggacgagtacagaaagagagagtgcagagaccacctgagagtgaacctgaagttcctgaccagaaccagaagcaccgtggccgagagcgtgagccagcagatcctgagacagaacagaggcagaaaggcctgcgacagacccgtggccaagaccaagaagaagaaggccgagggcaccgtgttcaccgaggaggacttccagaagttccagcaggagtacttcggcagctag

SEQ ID NO: 258539 - protein, 379 aa, Artificial Sequence
  derived and/or modified sequence
MAATAAAVVAEEDTELRDLLVQTLENSGVLNRIKAELRAAVFLALEEQEKVENKTPLVNESLKKFLNTKDGRLVASLVAEFLQFFNLDFTLAVFQPETSTLQGLEGRENLARDLGIIEAEGTVGGPLLLEVIRRCQQKEKGPTTGEGALDLSDVHSPPKSPEGKTSAQTTPSKKANDEANQSDTSVSLSEPKSKSSLHLLSHETKIGSFLSNRTLDGKDKAGLCPDEDDMEGDSFFDDPIPKPEKTYGLRKEPRKQAGSLASLSDAPPLKSGLSSLAGAPSLKDSESKRGNTVLKDLKLISDKIGSLGLGTGEDDDYVDDFNSTSHRSEKSEISIGEEIEEDLSVEIDDINTSDKLDDLTQDLTVSQLSDVADYLEDVA

SEQ ID NO: 258540 - DNA, 1484 bp, Artificial Sequence
  derived and/or modified sequence
gcaagatggcggcgacggcggccgcagtggtggccgaggaggacacggagctgcgggacctgctggtgcagacgctggagaacagcggggtcctgaaccgcatcaaggctgaactccgagcagctgtgtttttagcactagaggagcaagaaaaagtagagaacaaaactcctttagttaatgagagcctgaaaaagtttttaaataccaaagacggtcgtttagtggctagtcttgttgcagaatttcttcagttttttaaccttgactttactttggctgtttttcaacctgaaactagcacactgcaaggtctcgaaggtcgagagaatttagcccgagatttaggtataattgaagcagaaggtactgtgggtggacccttattattagaagtgatcaggcgctgtcaacagaaagaaaaagggccaaccactggggaaggtgcacttgatctatctgatgtacattctccaccaaagtcaccagagggaaaaacaagtgcacagacaacaccaagtaagaaggccaatgatgaggccaatcagagtgatacaagtgtctccttgtcagaacccaagagcaaaagcagccttcacttactgtcccatgaaacaaaaattggatcttttctaagcaacagaactttagatggcaaagacaaagctggcctttgtccagatgaagatgatatggaaggagattctttctttgatgatcccattcctaagccagagaaaacttacggtttgaggaaggaacctaggaagcaagcaggaagtctggcctcgctctcggatgcaccccccttaaaaagtggactcagctccctggcgggagccccttctttaaaagactctgagagtaaaaggggaaatacagttttgaaagatctgaaattgatcagtgataaaattggatcacttggattaggaactggagaagatgatgactatgttgatgattttaatagtaccagccatcgctcagagaaaagtgagataagtattggtgaagagatagaagaagacctttctgtggaaatagatgacatcaataccagtgataagcttgatgacctcacacaagatctgactgtatcccagctcagtgatgttgcggattatctggaagatgttgcatagacacgaagaaggaagtattctaattaacaaggacagaggactgaccggttccattttttttttttccagacaatcactcagctggaatgtctgctctctattggtgccttgcatttcaaaaacactgcagatattttttaaaagtaattttcattttactaaacaaaatacttcctatttgagcccatgtgtggaagatttaatattcttaatttaactgtacatttctttatggaaattgattatctacactcagtttcattacagggaaggaacccatgaaaacatcagtgttaagagcatgatgaaaggtgtcaataaagccgtaggatcgcgcaa

SEQ ID NO: 258541 - DNA, 1140 bp, Artificial Sequence
  derived and/or modified sequence
atggctgccaccgccgccgcggtggtggccgaagaggacaccgaactgcgcgatttgcttgtacagacactcgagaatagcggtgttctgaacagaattaaggccgagctaagagccgccgtctttctggcccttgaagaacaggaaaaagtagagaacaaaactcctttggtgaacgaaagcctgaaaaagtttctgaacaccaaagatggacgtctcgtggcttctctggttgccgagtttctccagtttttcaacctagactttaccctggctgtttttcaacctgagacctcaactcttcagggcctcgagggacgagagaatctggctcgcgatctcggaattatagaggcggagggaacagttgggggacccctgcttttggaagtgatcaggcgttgccagcaaaaggagaaaggccccactacaggagagggagccttggatttgtctgacgtccatagccctcccaagtctcccgaaggcaagacaagcgcccagaccacccccagcaaaaaagccaacgacgaagcgaatcagtctgatacctccgtctcccttagcgagcctaaatccaagagctcgcttcatctgctgtcacatgagacgaaaattgggtcttttttaagcaatcggacccttgacgggaaagacaaagccggcctgtgtccggacgaggacgatatggaaggagacagtttctttgatgacccaatacctaagcccgaaaagacatatggacttaggaaggaaccccggaagcaggcaggtagtttagcaagcctgtccgacgccccccccctgaaatctggcctgagcagtttggctggagcaccgagcctgaaagacagtgagagtaagagaggaaacaccgttctgaaagacctgaaactcatctctgataagattggctcccttggcctgggaacaggggaagacgacgattatgttgacgattttaattccactagccaccgctctgaaaagtctgaaatttcgataggcgaggagatcgaggaggatctgtccgttgagatagatgatattaacaccagtgacaaactcgacgacctgacacaggatctgaccgtctctcagcttagtgatgtggccgactacctggaggacgtagcctag

SEQ ID NO: 258542 - DNA, 1140 bp, Artificial Sequence
  derived and/or modified sequence
atggccgccacagctgctgctgtggtggccgaggaggacacagagctgcgggacctgctggtgcagaccctggagaacagcggcgtgctgaaccgcatcaaggccgagctgcgggctgctgtgttcctggccctggaggagcaggagaaggtggagaacaagacccccctggtgaatgaaagcctgaagaagttcctgaacaccaaggatggccgcctggtggccagcctggtggccgagttcctgcagttcttcaacctggacttcaccctggccgtgttccagcctgagaccagcaccctgcagggcctggagggccgggagaacctggcccgggacctgggcatcattgaagctgagggcaccgtgggcggccccctgctgctggaggtgatccgccgctgccagcagaaggagaagggccccaccaccggggagggcgccctggacctgagtgatgtgcacagcccccccaagagccctgagggcaagaccagcgcccagaccacccccagcaagaaggccaatgatgaggccaaccagagcgacacctctgtgtccctgtctgagcccaagagcaagagcagcctgcacctgctgagccatgagaccaagattggcagcttcctgagcaacagaaccctggatggcaaggacaaggccggcctgtgcccagatgaagatgacatggagggggacagcttctttgatgaccccatccccaagccagagaagacctacggcctgaggaaggagcccaggaagcaggccggcagcctggccagcctgagtgatgccccacccctgaagagcggcctgagcagcctggccggggcccccagcctgaaggacagcgagagcaagaggggcaacacagtgctgaaggacctgaagctgatcagtgacaagattggcagcctgggcctgggcactggagaagatgatgattatgtggatgacttcaacagcaccagccacaggtctgagaagtctgagatcagcattggagaggagattgaggaggacctgtctgtggagattgatgacatcaacaccagtgacaagctggatgacctgacccaggacctgactgtgtcccagctgagtgatgtggccgactacctggaggatgtggcctag

SEQ ID NO: 258543 - DNA, 1140 bp, Artificial Sequence
  derived and/or modified sequence
atggccgccaccgccgccgccgtggtggccgaggaggacaccgagctgcgggatcttttggtccagacattggagaattcaggcgtcctgaataggatcaaagctgaactaagagccgccgtgttcctagcgcttgaggaacaagaaaaagtagagaacaaaacccctttagtgaatgagtcactgaagaaatttttaaacaccaaggatggtagactcgtcgccagtctggtagctgagtttctgcagttctttaatctggattttacactggcagtatttcagccagaaacgtccacactccagggtctcgaagggcgggaaaatctcgctcgcgacttgggtatcatcgaagctgaagggacggtcggaggccccctgttgctggaagttattcgccggtgccagcaaaaagaaaagggccccaccacgggcgagggcgctctggacctaagcgacgtgcactcaccacccaagtcacccgaaggaaagacgagcgcccagaccacaccatctaagaaggccaacgatgaggccaaccagtcagatacatccgtatctctcagcgaacccaagagtaagtcatctctgcacctattgagccatgaaactaagattggtagtttcctgtccaatcggactctcgacggtaaggataaagccggcctgtgccccgacgaggacgacatggaaggggactcttttttcgatgatccgatccctaagcctgagaaaacctacggactcaggaaagaacccaggaagcaggcaggtagtctggcatcattatcggatgctccacctttgaagtctggcctgagctcattagccggagcgcccagcctcaaagattccgagtccaagcggggtaacacagttctgaaagatcttaaactgatttctgacaagatcggatcgctagggctcggaaccggggaagacgacgattacgttgacgatttcaacagtacgagccacaggtctgaaaaatccgaaataagtatcggagaagagattgaagaggacttaagtgtggagatagacgacataaatacatccgacaagttggatgacctcactcaggatttgaccgtgtcacaacttagtgatgtagcggactatctcgaagatgttgcttag

SEQ ID NO: 258544 - DNA, 1140 bp, Artificial Sequence
  derived and/or modified sequence
atggccgctacggccgctgcggtggtagctgaagaggatacggaacttagggatctgctggttcaaacacttgagaattctggagtcctgaatcgcatcaaggctgagctgagagccgctgtcttcttggccctggaggagcaggaaaaggtggagaacaaaacgcctctggtgaacgagtctctgaaaaaatttctgaatacgaaagacgggagactggtggcttctctggtggcggagtttttgcagttttttaacctggattttaccctcgccgttttccaaccagagacctccacgctgcaaggcttggaaggacgtgaaaacctggctagggacctgggaataatcgaggccgagggcacagtaggcggtcctcttctgctggaggtgattcggaggtgccagcaaaaggagaaggggcctactacaggcgagggggcattagacctgagcgacgtccattcaccccctaagagtccagaggggaagacttctgcacaaactactcccagtaagaaagcaaacgacgaggctaatcagagtgacacttcagtgtccctctccgaacctaaaagcaaaagctcactgcacttgctcagtcatgaaaccaaaataggtagtttcctatctaaccgtaccctagacggtaaagacaaagctggcctctgtccggatgaagacgacatggaaggcgacagcttcttcgatgacccaatcccaaaaccagagaaaacttacgggctgaggaaagaaccacgaaaacaggccggaagccttgctagcctgtcagatgcccctccccttaaaagcgggttgtctagcctggccggagctccttcccttaaagactccgagtccaagagaggcaacaccgtgcttaaagacctgaagctaatttcagataagataggctcactcggcctgggaaccggcgaggatgacgactacgtagatgattttaactccacatcacaccgtagcgaaaaatctgaaatttccatcggagaggaaattgaagaggacttgagcgtcgaaatcgatgacattaacactagcgataagctagatgatttaactcaggacctgacagtgtctcagctatccgacgtggccgactacctggaggacgtggcgtag

SEQ ID NO: 258545 - DNA, 1140 bp, Artificial Sequence
  derived and/or modified sequence
atggccgccaccgccgccgccgtggtggccgaggaggacaccgagctgagagacctgctggtgcagaccctggagaacagcggcgtgctgaacagaatcaaggccgagctgagagccgccgtgttcctggccctggaggagcaggagaaggtggagaacaagacccccctggtgaacgagagcctgaagaagttcctgaacaccaaggacggcagactggtggccagcctggtggccgagttcctgcagttcttcaacctggacttcaccctggccgtgttccagcccgagaccagcaccctgcagggcctggagggcagagagaacctggccagagacctgggcatcatcgaggccgagggcaccgtgggcggccccctgctgctggaggtgatcagaagatgccagcagaaggagaagggccccaccaccggcgagggcgccctggacctgagcgacgtgcacagcccccccaagagccccgagggcaagaccagcgcccagaccacccccagcaagaaggccaacgacgaggccaaccagagcgacaccagcgtgagcctgagcgagcccaagagcaagagcagcctgcacctgctgagccacgagaccaagatcggcagcttcctgagcaacagaaccctggacggcaaggacaaggccggcctgtgccccgacgaggacgacatggagggcgacagcttcttcgacgaccccatccccaagcccgagaagacctacggcctgagaaaggagcccagaaagcaggccggcagcctggccagcctgagcgacgccccccccctgaagagcggcctgagcagcctggccggcgcccccagcctgaaggacagcgagagcaagagaggcaacaccgtgctgaaggacctgaagctgatcagcgacaagatcggcagcctgggcctgggcaccggcgaggacgacgactacgtggacgacttcaacagcaccagccacagaagcgagaagagcgagatcagcatcggcgaggagatcgaggaggacctgagcgtggagatcgacgacatcaacaccagcgacaagctggacgacctgacccaggacctgaccgtgagccagctgagcgacgtggccgactacctggaggacgtggcctag

SEQ ID NO: 258546 - protein, 249 aa, Artificial Sequence
  derived and/or modified sequence
MASASGAMAKHEQILVLDPPTDLKFKGPFTDVVTTNLKLRNPSDRKVCFKVKTTAPRRYCVRPNSGIIDPGSTVTVSVMLQPFDYDPNEKSKHKFMVQTIFAPPNTSDMEAVWKEAKPDELMDSKLRCVFEMPNENDKLNDMEPSKAVPLNASKQDGPMPKPHSVSLNDTETRKLMEECKRLQGEMMKLSEENRHLRDEGLRLRKVAHSDKPGSTSTASFRDNVTSPLPSLLVVIAAIFIGFFLGKFIL

SEQ ID NO: 258547 - DNA, 750 bp, Artificial Sequence
  derived and/or modified sequence
atggccagcgccagcggcgccatggccaagcacgagcagatcctggtgctggacccccccaccgacctgaagttcaagggccccttcaccgacgtggtgaccaccaacctgaagctgagaaaccccagcgacagaaaggtgtgcttcaaggtgaagaccaccgcccccagaagatactgcgtgagacccaacagcggcatcatcgaccccggcagcaccgtgaccgtgagcgtgatgctgcagcccttcgactacgaccccaacgagaagagcaagcacaagttcatggtgcagaccatcttcgccccccccaacaccagcgacatggaggccgtgtggaaggaggccaagcccgacgagctgatggacagcaagctgagatgcgtgttcgagatgcccaacgagaacgacaagctgaacgacatggagcccagcaaggccgtgcccctgaacgccagcaagcaggacggccccatgcccaagccccacagcgtgagcctgaacgacaccgagaccagaaagctgatggaggagtgcaagagactgcagggcgagatgatgaagctgagcgaggagaacagacacctgagagacgagggcctgagactgagaaaggtggcccacagcgacaagcccggcagcaccagcaccgccagcttcagagacaacgtgaccagccccctgcccagcctgctggtggtgatcgccgccatcttcatcggcttcttcctgggcaagttcatcctgtag

SEQ ID NO: 258548 - DNA, 750 bp, Artificial Sequence
  derived and/or modified sequence
atggcgtccgcctccggcgccatggcaaaacatgagcagatactggtcctggatcctcccactgatctgaaatttaagggaccctttactgacgtagtgactactaacctgaaacttcggaatccctctgataggaaagtgtgctttaaagtgaaaactacggccccacgtagatactgtgttaggcccaattcgggtatcattgatcctggttccacagtgactgtgagtgtaatgctgcagcccttcgattacgaccctaacgagaagagcaagcacaagtttatggtgcagacaatattcgcccctcccaatacgagtgacatggaggctgtctggaaggaagcaaaacccgatgaactaatggactctaaacttcgttgcgtttttgagatgcccaacgagaacgacaagttaaatgatatggagcctagcaaagccgtgcccttaaacgcttctaagcaggatggtccaatgcctaagcctcactcagtgtccctgaacgatacagagacccgcaagttaatggaagagtgcaaacggctacaaggagaaatgatgaaactgtcagaggagaatcggcatcttcgagacgagggtctgcgtctcaggaaggtcgcccacagtgacaaacctggctctacctctaccgccagtttccgcgataacgtgacgtcccctctgccaagcctgctcgtcgttattgccgctattttcattgggtttttccttggcaaattcattttgtag

SEQ ID NO: 258549 - DNA, 750 bp, Artificial Sequence
  derived and/or modified sequence
atggccagcgccagcggggccatggccaagcatgagcagatcctggtgctggaccccccaacagacctgaagttcaagggccccttcacagatgtggtgaccaccaacctgaagctgaggaaccccagcgacaggaaggtgtgcttcaaggtgaagaccacagccccccggcgctactgtgtgcggcccaacagcggcatcatcgaccccggcagcacagtgacagtgtctgtgatgctgcagccctttgattatgaccccaatgagaagagcaagcacaagttcatggtgcagaccatctttgccccacccaacaccagtgacatggaggccgtgtggaaggaggccaagccagatgagctgatggacagcaagctgcgctgtgtgtttgagatgcccaatgaaaatgacaagctgaatgacatggagcccagcaaggctgtgcccctgaatgccagcaagcaggacggccccatgcccaagccccacagcgtgtccctgaatgacacagagaccaggaagctgatggaggagtgcaagaggctgcagggcgagatgatgaagctgtctgaggagaacagacacctgagagatgagggcctgcggctgaggaaggtggcccacagcgacaagccaggcagcaccagcacagccagcttccgggacaacgtgaccagccccctgcccagcctgctggtggtgattgctgccatcttcatcggcttcttcctgggcaagttcatcctgtag

SEQ ID NO: 258550 - DNA, 750 bp, Artificial Sequence
  derived and/or modified sequence
atggccagcgccagcggcgccatggccaagcacgagcagatcctggtcctggatccccctacagaccttaagtttaaaggcccgttcaccgacgtcgttactacaaacctgaagctccgaaaccctagtgacaggaaggtgtgttttaaggttaaaacaacggcgccgaggagatattgcgtgcgacccaacagtggaatcatcgacccagggtcgactgtgactgtaagcgttatgcttcagccgttcgattatgatcctaacgagaagtccaaacacaagtttatggtccaaacgattttcgccccgccaaatactagcgacatggaagccgtgtggaaagaagccaagcccgatgagctaatggactccaaactcagatgcgttttcgagatgcccaacgagaacgataagctgaatgatatggagccaagcaaggcggttccactgaacgcctctaaacaggatggccccatgccaaagcctcacagcgtttcactcaacgacaccgagacccgcaaactaatggaggagtgcaaacgattgcagggcgaaatgatgaaactcagcgaggagaatcggcacttgcgggacgagggcctgaggctcagaaaggtggcgcattccgacaaacctggttctaccagcacagcctccttcagagacaatgttacaagcccactgccatccctgctcgtagtgattgcagccatcttcattggtttctttctggggaaattcatactgtag

SEQ ID NO: 258551 - DNA, 750 bp, Artificial Sequence
  derived and/or modified sequence
atggcatccgcatcaggggcaatggctaaacatgagcagatcctggtgctcgatccacctacggatctgaaatttaagggaccttttacggatgtggtgactacaaatctgaaattacgcaaccctagcgaccgcaaggtttgttttaaggtgaagacgacagcccctcggagatactgtgtgcgccctaactcggggattatcgatcctgggtcgactgttacagtatcggtgatgctccagccatttgactatgatccgaacgagaaatccaagcacaaatttatggtgcagactattttcgctccacctaacacttctgatatggaggccgtctggaaagaagctaaaccggacgaacttatggactccaaactccgctgcgtgtttgagatgccaaacgagaatgacaaactgaacgacatggaaccatctaaagctgtgccattgaacgcatccaagcaggatggacctatgcctaaaccccattctgtgagtctaaatgatacagagacacggaagctgatggaggagtgtaagagactgcagggcgagatgatgaaactctcggaggagaacaggcacctccgcgacgaagggctgcggcttcgtaaggtcgcccacagcgataaaccaggatccaccagtaccgcttcttttcgggacaacgtgacctctcccctcccgagtctgctcgtcgtgattgcagctattttcatcggcttttttctcggaaagttcatactttag

SEQ ID NO: 258552 - DNA, 6815 bp, Artificial Sequence
  derived and/or modified sequence
tcacgtgggtcgccgaggctcgcaagtgcgcgtggccgtggcggctggtgtggggttgagtcagttgtgggacccggagctgctgacccagcgggtggcccaccgaaccggtgacacagcggcaggcgttagggctcgggagccgcgagcctggcctcgtcctagagctcggccgagccgtcgccgccgtcgtcccccgcccccagtcagcaaaccgccgccgcgggcgcgcccccgctctgcgctgtctctccgatggcgtccgcctcaggggccatggcgaagcacgagcagatcctggtcctcgatccgcccacagacctcaaattcaaaggccccttcacagatgtagtcactacaaatcttaaattgcgaaatccatcggatagaaaagtgtgtttcaaagtgaagactacagcacctcgccggtactgtgtgaggcccaacagtggaattattgacccagggtcaactgtgactgtttcagtaatgctacagccctttgactatgatccgaatgaaaagagtaaacacaagtttatggtacagacaatttttgctccaccaaacacttcagatatggaagctgtgtggaaagaggcaaaacctgatgaattaatggattccaaattgagatgcgtatttgaaatgcccaatgaaaatgataaattgaatgatatggaacctagcaaagctgttccactgaatgcatctaagcaagatggacctatgccaaaaccacacagtgtttcacttaatgataccgaaacaaggaaactaatggaagagtgtaaaagacttcagggagaaatgatgaagctatcagaagaaaatcggcacctgagagatgaaggtttaaggctcagaaaggtagcacattcggataaacctggatcaacctcaactgcatccttcagagataatgtcaccagtcctcttccttcacttcttgttgtaattgcagccattttcattggattctttctagggaaattcatcttgtagagtgaagcatgcagagtgctgtttctttttttttttttctcttgaccagaaaaagatttgtttacctaccatttcattggtagtatggcccacggtgaccatttttttgtgtgtacagcgtcatataggctttgcctttaatgatctcttacggttagaaaacacaataaaaacaaactgttcggctactggacaggttgtatattaccagatcatcactagcagatgtcagttgcacattgagtcctttatgaaattcataaataaagaattgttctttctttgtggttttaataagagttcaagaattgttcagagtcttgtaaatgttattttaataatccctttaaattttatctgttgctgttacctcttgaaatatgatttatttagattgctaatcccactcattcaggaaatgccaagaggtattccttggggaaatggtgcctcttacagtgtaaatttttcctcctttacctttgctaatatcatggcagaatttttcttatcccttgtgaggcagttgttgactgagtttttcatccttacaatcctgtcccatggtatttaacataaaaaaaaataaaactgttaacagattcttgctcgatagcttgtttgtgtctgtcgtgttattagagggaactccactatatatggtcacttgaaattatgatgcaaaggtttctcttgcattgaaaccctcttggatattacagtatttttaattgaaagtcctaattctgttaaggaaaggagttgattaaattttaaggtaccactggtattttgggagattataatcagtttgttttcaagataatagaaaataaggtccatgagaatagaagttatgtgatttcagtgagttgatgtgtacagcatggctgtgctccatctgatttaccccattcttaagttctgagagtatgttctcaaggaagatttaactctctttggttttaaattactttttaaccagcctaataaataagtcttactacttttcataatatttcataatagttaaaagtaggtgtttttttcgtgctcaatttggcactcaaaataatgttcattatggaagtttggtaatactgagcaagcctgtggaattttctttatgaaaaatgattttagcctttgcaaatgttaaccatgtgaaacacattttcagtataagtatgcgttacagggtttgatactttcctgcacttaggtttgtcctattcttcatttattcatactaggatagaaaattttggaatcagaaaatagatccagtgtttagctacatacaatctagtacaagtgaatttttattcttaaacataggtgtgttggctctttttttaaaagatgcgctctacctgaaaaggaaattggattttagaactggatgtggtgcagtgaagtattttaggcccaggtctgtgtacacattttatagaagaatgaagtactctgaagtattttggttgccttttcatttcaactgtgttttgaatttgtcagatcacacatatattgtgttattgggcgctgtggtatcttttataaaacctcttgcttgtgtgcaaaagttcctaaaaggaaacacaagtaatgcctatccattactagcatgctatgctgcatgctttactgccattgctgtatgctttactgtctttgtaaaaatccccctctccccttttctggtaactggaaaagcatgctaaaaatagtcttatattttcaccccataaatgcagaatcagtaattccttggcttaaagctcttatataatcaatattattggtggtaaataccaagtttggtatctcatagctatctttttttaaagaaattaagttcttgaaaatttagccaaatcccgttttatgggaatgctctttagaattcattttgttcagcccctttgttctatggttgagaaatctgaggccttacgaaggttaagagaactttccccgtgtctcacaggtaggtagaggcagagctggaactagatatctggtctgttgactctagctcagtgtcttctggtaactgttgaaaattgtcttagtttgagagatggctgaaataatgaacataaaatgctatttataataacaagtatatgtgaaatttcttattgtaagactactaccggcttactgttgaatagtttggttatagtgtttaggctagaaatgcctcccacattggtaataaacattacaaaatacaatgtatttttaggtaggcattttataaaatgcattatgccatggttgcttttgagatagattgtagtctgggtagcatctttaaaatgtatgtgggcttaactgttgttcatatcaggagatgctctgattgtataggtgagactctgtttctgttatttttaattgctgtatgaaatgtgatcagattattttactaccaacagttatagtttgaaagtccaactgtattaattgactgataatatgataatatagagattaaattgtttgtcttcattccttatatgtttagaagtttttgctttgtctgcctgcttacttgtatatgtaagcatgagggaaatacactgttgctaatactgaaattacaatcaagtaactaaggccttgagttcatatgtgacactgaatgcactagcttccttcgttctataactaatgtaccttaacttcccccattcttatatttacaagaagctaagtcattatgttctgagtgtgtggtatgttcccttaaaaaaaaatgacacttggaagaaaaatgtatgaaattcagaaattccgatcaaagaaaagtaattctttctttttttttttgagacagagtcttgctttgttgcccaggctggagggcagtggtgtgatctcacctcactgcagcttccgcctcctgggttcaagtgattctcatggctcagccgcctgagtagctgggattacaggtgtgagccaacaagcccggctaatttttgtatttttagtagagacaaggtttcaccatgttggtcaggctgggctcaaactcctgaatccgcctgcctcggcctcccaaagtgctgggattacaggtgtgagctgccgcacccagccaagaaaaataatactcttaaatacttagatgttcacctaaagttgatattatttggtatgggaattacttttgaactgtaatctttcagattacaccactttgaaaacaagttttaacagtagggtaaaaatatagtttttgagggtattcccaacttgtgatcttctaccactttagagacattcaagtaatagttttcttagagctttgcacattcctattcactgagattttaaaaatttcacctttattcgagggaaggatcaatgcttattaccatttggaaaaacgaagatcagaaggtaaatgatctttattttctagctttaaagggaaattaaaccattcatgaataaactttaaaaatgtgaagtgtccttttccttttcacaatacaaaaaaaatttcaacagattgtgtggtttgtgcatttatatcctgttaagcattaatagctaatcactgggacttgaattctgatggcagatagtctcttgcttagtgagatggagttaactattttttagtaggaagtgagaacagctgattttcatgccacgtttcatagccccacttttggtagactaccaccacgcttcttcgcgtaagcagtggcatcttgggaatgaatgcccagccgctcgtgggttggtgcaaagaagtataaacatatatcactaaggaaaaagaaagtttgtcttgcccttctgacacagtgtgtgcacttcaggcaatttttggaaaatataaaaaattccaaattctgcctttcagcagcatcaattgctaggaacatttcattcatttccctgtaatattaatgttctttaagcataatcactaattataagttgtatcctatttttttccagcttaatttctgtggtttattgaaaaccaagtataaatgtgactaaaagcattttgctttgtttttatagttaactttcttaaggttatggacattttataatgtaacatttgattggcctggcctcttgacaattcccttctagttatgcatatcctcctgttgccacatttcttgttttaaaactcagtttcttgttttccagttgttgctatgtataacacccatcttgaaagagagtatataggaagttattcagataacttttgtagtagtgatattcaactatagcagtaccttaactcatgatgagcttaggaacataaaagataattgttgcttgaatagcacccccagagatactgacctaattggtctggggtggagatctggcatggtagtttttttcaagctccaatcatcggccagacagttgctttatgtaggtttttaaatgccaaaggcagatatgaagtagatttaattaagacttgacttcagcaatacaggggaacttaaaatacttatttttctttaaactgcaggagtcactgttaggtattgcttaaaaaaaattgcataaaagctttgcttgtcaagttaggattgctggaataccactaaagatttttgacttgtgaataaatgagctgtcatcgcaaaaaggcgatttgagaaatgtgggcttcagtattaattgccattttgctgacacccagtgtacctacctacctgagaaatttattttgtccatcatgtatttctcaaagcaaaaggtggttttcaagtataatgtcgttttcaacatgcttattacttagttttacgtcagctcatttcatcatcattgataacttgtgaaatacttatctccatcctatggaataggggagacgggtttagacaggttcaattagctcaagtctacacagctgaagtagcagagaaagtgggatctagatggtctgatcctagtgatctaccatatgaaggacatagtttgtgtcctggtccaagtcaaatattgactcctcacaaacagtaagtatggcaattttgtgatgcctttgattccactttacatggagtactattatttgtgaaatgtctttaagatttttggtcttaaatttttgaagactgctttccccctttatctcccagaaaattgagaagaagtaaactcctgcccactaacaatctcagtccgtgaacaaaaccaacatgaacattcctaaacaagagtgtgtgttactctaagaagaaggctatagaatttatggaaatggcttatgtaacctacaagactggagaacagaatgtgactggccttttctaatggtcctttaagatttaatgattaaagcaagagttttttataattgactttgtggtctaaattcttgatactgtttataattctacaaagaacaaaaattgttatgtactataggcacttaagaaccctgaggaaaaataatacaatgtgtgtgtgtgagagagagagtgagttactgacattgttccaaaaaaaaaaaaaaaaaaaaaaaaaatgtggagggttgaaatggtaaggaattggaatcttttgtattttcgagcaataagaattcctattcttgtttcaaatagaggtttgttaggaattacagttgtggggagcaaactttcttttttgtgctgttttaattcaaaatgtatatccttaattgtatataatatgtagataaatatatgagggtattaagctactttgaattaaatttaaggatatatttcacatgaaaacaaatacaaacgagaatcaaaataaagttttgcaaagta

SEQ ID NO: 258553 - protein, 169 aa, Artificial Sequence
  derived and/or modified sequence
MDTRNKAQLLVLLTLLSVLFSQTSAWPLYRAPSALRLGDRIPFEGANEPDQVSLKEDIDMLQNALAENDTPYYDVSRNARHADGVFTSDFSKLLGQLSAKKYLESLMGKRVSNISEDPVPVKRHSDAVFTDNYTRLRKQMAVKKYLNSILNGKRSSEGESPDFPEELEK

SEQ ID NO: 258554 - DNA, 507 bp, Artificial Sequence
  derived and/or modified sequence
atggacacccgcaacaaggcccagctgctggtgctgctgaccctgctgagcgtgctgttcagccagaccagcgcctggcccctgtaccgcgcccccagcgccctgcgcctgggcgaccgcatccccttcgagggcgccaacgagcccgaccaggtgagcctgaaggaggacatcgacatgctgcagaacgccctggccgagaacgacaccccctactacgacgtgagccgcaacgcccgccacgccgacggcgtgttcaccagcgacttcagcaagctgctgggccagctgagcgccaagaagtacctggagagcctgatgggcaagcgcgtgagcaacatcagcgaggaccccgtgcccgtgaagcgccacagcgacgccgtgttcaccgacaactacacccgcctgcgcaagcagatggccgtgaagaagtacctgaacagcatcctgaacggcaagcgcagcagcgagggcgagagccccgacttccccgaggagctggagaag

SEQ ID NO: 258555 - DNA, 510 bp, Artificial Sequence
  derived and/or modified sequence
atggacaccagaaacaaggcccagctgctggtgctgctgaccctgctgagcgtgctgttcagccagaccagcgcctggcccctgtacagagcccccagcgccctgagactgggcgacagaatccccttcgagggcgccaacgagcccgaccaggtgagcctgaaggaggacatcgacatgctgcagaacgccctggccgagaacgacaccccctactacgacgtgagcagaaacgccagacacgccgacggcgtgttcaccagcgacttcagcaagctgctgggccagctgagcgccaagaagtacctggagagcctgatgggcaagagagtgagcaacatcagcgaggaccccgtgcccgtgaagagacacagcgacgccgtgttcaccgacaactacaccagactgagaaagcagatggccgtgaagaagtacctgaacagcatcctgaacggcaagagaagcagcgagggcgagagccccgacttccccgaggagctggagaagtag

SEQ ID NO: 258556 - DNA, 510 bp, Artificial Sequence
  derived and/or modified sequence
atggacacacggaacaaggcgcagctcctcgtgttgttgacacttctctctgtacttttctcccagacgtccgcctggcccctgtaccgcgctccaagcgcactccggctgggtgacaggattccttttgaaggcgccaacgaaccggatcaggtctctctgaaagaagacattgacatgctccagaacgcgttggctgaaaatgacacaccttactacgacgtttctcgcaacgcccgccacgcagacggcgtctttacatctgactttagcaagctgctcggccagctttctgcaaagaagtatctcgagagcctcatgggcaaacgcgtctccaacatatccgaggatccagtccctgtgaaaagacattcagacgcggttttcacggataattataccagactgcgcaagcagatggccgttaagaaatacctgaatagcatactcaacggaaagcggtcatccgaaggcgagtctcctgacttccccgaggagttggagaagtag

SEQ ID NO: 258557 - DNA, 510 bp, Artificial Sequence
  derived and/or modified sequence
atggacaccaggaacaaggcccagctgctggtgctgctgaccctgctgtctgtgctcttcagccagaccagcgcctggcccctgtaccgggcccccagcgccctgcggctgggggaccgcatcccctttgaaggagccaatgaaccagaccaggtgtccctgaaggaggacatcgacatgctgcagaatgccctggctgaaaatgacaccccctactatgatgtgtccagaaatgcccggcatgctgatggagtcttcaccagtgacttcagcaagctgctgggccagctgagcgccaagaagtacctggagagcctgatgggcaagagggtgagcaacatcagcgaggaccctgtgcctgtgaagaggcacagtgatgctgtgttcacagacaactacacccggctgaggaagcagatggctgtgaagaagtacctgaacagcatcctgaatggcaagaggagcagcgagggggagagcccagacttccctgaggagctggagaagtag

SEQ ID NO: 258558 - DNA, 510 bp, Artificial Sequence
  derived and/or modified sequence
atggacacccggaacaaggcccagctgctggtgctgctgaccctgttgtctgtattgttctcacagacctctgcctggccgctctatcgcgctccgagtgccctgaggctgggagatcgcattcccttcgagggcgccaatgaacccgatcaagtctctctgaaggaagatattgacatgctgcaaaatgctctggctgaaaacgacacaccttattatgacgttagcaggaacgctcgccatgcagatggggtcttcacctcagacttctctaagctccttggccagttaagcgccaaaaaatatctcgagtcactcatgggcaagagagtcagcaacatcagtgaggaccctgttcccgtcaaacggcatagtgatgccgtattcacggacaactacacaagattgaggaaacaaatggctgtgaaaaagtatctgaattccattttgaacggcaagcgatccagcgagggcgaaagtccagacttccccgaggagctcgagaagtag

SEQ ID NO: 258559 - DNA, 510 bp, Artificial Sequence
  derived and/or modified sequence
atggatacaaggaataaggctcagctactggtacttttaactctgctttccgtgttatttagtcaaacttcagcttggccgctgtacagagctccatcggccctgagactgggcgatagaattccatttgaaggcgcaaacgagcccgatcaggtgagtcttaaggaggacatcgatatgctacaaaacgccctggccgaaaatgacactccttattatgatgtgtcgcggaacgccagacatgcggacggggtctttacaagcgattttagcaagctcctgggacagctgtctgccaagaagtacctcgagtccctgatgggtaaacgtgtgtcaaacatcagcgaggatcctgtccccgtaaaacgccacagtgatgctgtcttcacagacaattacacaaggttgagaaaacagatggcagtgaaaaagtacctcaactccatcttgaacggtaaaagatcatccgagggtgagtcacctgactttccggaagaacttgagaaatag

SEQ ID NO: 258560 - DNA, 1581 bp, Artificial Sequence
  derived and/or modified sequence
gggtagagtgagaagcaccagcaggcagtaacagccaacccttagccattgctaagggcagagaactggtggagcctttctcttactcccaggacttcagcacctaagacagctccaaaacaaaccagaacagtcagctccgggggagcacgactgggcgagaggcacagaaatggacaccagaaataaggcccagctccttgtgctcctgactcttctcagtgtgctcttctcacagacttcggcatggcctctttacagggcaccttctgctctcaggttgggtgacagaataccctttgagggagcaaatgaacctgatcaagtttcattaaaagaagacattgacatgttgcaaaatgcattagctgaaaatgacacaccctattatgatgtatccagaaatgccaggcatgctgatggagttttcaccagtgacttcagtaaactcttgggtcaactttctgccaaaaagtaccttgagtctcttatgggaaaacgtgttagtaacatctcagaagaccctgtaccagtcaaacgtcactcagatgcagtcttcactgacaactatacccgccttagaaaacaaatggctgtaaagaaatatttgaactcaattctgaatggaaagaggagcagtgagggagaatctcccgactttccagaagagttagaaaaatgatgaaaaagacctttggagcaaagctgatgacaacttcccagtgaattcttgaaggaaaatgatacgcaacataattaaattttgagttctacataagtaattcaagaaaacaacttcaatatccaaaccaaataaaaatattgtgttgtgaatgttgtgatgtattctagctaatgtaataactgtgaagtttacattgtaaatagtatttgagagttctaaattttgtctttaactcataaaaagcctgcaatttcatatgctgtatatcctttctaacaaaaaaatatatttaatgataagtaaatgctaggttaattccaattatatgagacgtttttggaagagtagtaatagagcaaaattgatgtgtttatttatagagtgtacttaactattcaggagagtagaacagataatcagtgtgtctaaatttgaatgttaagcagatggaatgctgtgttaaataaacctcaaaatgtctaagatagtaacaatgaagataaaaagacattcttccaaaaagattttcagaaaatattatgtgtttccatattttataggcaacctttatttttaatggtgttttaaaaaatctcaaatttggattgctaatcaccaaaggctctctcctgatagtctttcagttaaggagaacgacccctgcttctgacactgaaacttccctttctgcttgtgttaagtatgtgtaaaatgtgaagtgaatgaaacactcagttgttcaataataaatatttttgccataatgactcagaatattgctttggtcatatgagcttccttctgtgaaagtacatttggagacacaactatttttccaaaataattttaagaaatcaaagagagaaaataaagaccttgcttatgattgcagataa

SEQ ID NO: 258561 - protein, 484 aa, Artificial Sequence
  derived and/or modified sequence
MARLLRSATWELFPWRGYCSQKAKGELCRDFVEALKAVVGGSHVSTAAVVREQHGRDESVHRCEPPDAVVWPQNVEQVSRLAALCYRQGVPIIPFGTGTGLEGGVCAVQGGVCVNLTHMDRILELNQEDFSVVVEPGVTRKALNAHLRDSGLWFPVDPGADASLCGMAATGASGTNAVRYGTMRDNVLNLEVVLPDGRLLHTAGRGRHFRKSAAGYNLTGLFVGSEGTLGLITATTLRLHPAPEATVAATCAFPSVQAAVDSTVHILQAAVPVARIEFLDEVMMDACNRYSKLNCLVAPTLFLEFHGSQQALEEQLQRTEEIVQQNGASDFSWAKEAEERSRLWTARHNAWYAALATRPGCKGYSTDVCVPISRLPEIVVQTKEDLNASGLTGSIVGHVGDGNFHCILLVNPDDAEELGRVKAFAEQLGRRALALHGTCTGEHGIGMGKRQLLQEEVGAVGVETMRQLKAVLDPQGLMNPGKVL

SEQ ID NO: 258562 - DNA, 1455 bp, Artificial Sequence
  derived and/or modified sequence
atggcccgtctactcaggtctgccacatgggaattattcccgtggaggggatactgctctcagaaggcaaagggcgagctgtgcagggactttgtggaggctctgaaggcggtcgtgggaggcagccacgttagcaccgccgcagtggtgcgtgagcagcatgggcgggatgaatctgtgcacaggtgcgagcccccagacgccgtagtgtggccccagaatgtggagcaagtctcaaggctggccgctctgtgctaccggcagggtgtgccaattattccattcggcacaggcaccggactggagggaggggtgtgcgccgtgcaagggggcgtctgcgtgaaccttactcacatggacagaattctggagttgaaccaggaggacttctcagtagttgtggagccaggtgtgaccagaaaagcactgaacgctcacttacgtgactccgggctctggtttcccgttgaccccggagcggacgcaagtctgtgcgggatggctgccacaggcgcttcaggaaccaatgccgtgcgatatggcaccatgcgcgacaacgttctgaacctggaagttgttctgcccgacggtcgcctactgcacaccgctgggcgggggcgccattttcgaaaaagtgcagcaggttataatctaacaggtttgtttgtaggctccgaggggacccttggcttgattactgccacaacactccggctccaccctgcccctgaagcgacagtggcagcaacttgcgccttccctagtgtgcaggcagctgtagacagcacggtgcacatcctccaagcagctgtccccgtggcgagaattgagttcttggatgaagtaatgatggatgcctgtaatcgctactctaagctgaactgcctcgtggcgccaaccctgttcctagaatttcacgggagtcagcaggccctagaggaacaattacaaaggacagaagaaattgtccagcagaacggtgccagtgacttctcttgggcaaaagaggcggaggaacggtctcgcctctggacagctaggcacaacgcctggtacgcggctctggctacacggcccggctgcaaaggttacagcactgacgtgtgcgtgccgatttctcgcctgcctgagatagtggtacaaacaaaggaagatctgaacgcatccggattaaccggctcaatcgtgggacatgtgggcgacgggaactttcactgtattctgttggtaaatcccgatgacgctgaagaactaggtcgggtaaaggcatttgccgagcagctgggtcgtagggctctggcactacatggcacatgcaccggcgagcacggaataggaatgggcaagagacaactcctgcaggaagaagtgggagctgtgggcgttgagactatgcgccaacttaaggcagtcttagacccacaggggttaatgaatcccggaaaggttttatag

SEQ ID NO: 258563 - DNA, 1997 bp, Artificial Sequence
  derived and/or modified sequence
ggtcaccctgccacccagtgctcacaccctctggccagtgcctggctatggcccgactgctcaggtctgcaacctgggagctgttcccctggaggggctactgctcccagaaggcaaagggagagctctgcagggacttcgtagaggctctgaaggccgtggtgggcggctcccacgtgtccactgccgcggtggtccgagagcagcacgggcgcgatgagtcggtgcacaggtgcgaacctcctgatgctgtggtgtggccccagaacgtggagcaggtcagccggctggcagccctgtgctatcgccaaggtgtgcccatcatcccattcggcaccggcaccgggcttgagggtggcgtctgtgctgtgcagggcggcgtctgcgttaacctgacgcatatggaccgaatcctggagctgaaccaggaggacttctctgtggtggtggagccaggtgtcacccgcaaagccctcaacgcccacctgcgggacagcggcctctggtttcccgtggacccaggcgcggacgcctctctctgtggcatggcggccaccggggcgtcggggaccaacgcggtccgctacggcaccatgcgggacaacgtgctcaacctggaggtggtgctgcccgacgggcggctgctgcacacggcgggccgaggccggcatttccggaagagtgcagccggctacaacctcacggggctcttcgtgggctccgaggggacgctgggcctcatcacagccaccaccctgcgcctgcaccctgcccctgaggccacagtggccgccacgtgtgcgttccccagtgtccaggctgctgtggacagcactgtacacatcctccaggctgcagtgcccgtagcccgcattgagttcctggatgaagtcatgatggatgcctgcaacaggtacagcaagctgaattgcttagtggcgcccacactcttcctggagttccatggctcccagcaggcactggaggagcagctgcagcgcacagaggagatagtccagcagaacggagcctctgacttctcctgggccaaggaggccgaggagcgcagccggctttggacagcacggcacaatgcctggtacgcagccctggccacgcggccaggctgcaagggctactccacggatgtgtgtgtgcccatctcccggctgccggagatcgtggtgcagaccaaggaggatctgaatgcctcaggactcacaggaagcattgtcgggcatgtgggtgacggcaacttccactgcatcctgctggtcaaccctgatgacgccgaggaactgggcagggtcaaggcttttgcagaacagctgggcaggcgggcactggctctccacggaacgtgcacgggggagcatggcatcggaatgggcaagcggcagctgctgcaggaggaggtgggcgccgtgggcgtggagaccatgcggcagctcaaggccgtgctagacccccaaggcctcatgaatccaggcaaagtgctgtgaagggggtctgagcacttagcccacaagttccctgactacggagccggttctggaacttttcttcatgccacggcccctgcaaggaaatagatgctgaggcagtcttcctgccagcgagcccactgtatctgggcccaaggccagagggcccagagagaagcctgagcaccgtgttacctccctggccctctggctggccccaggagcctttggttcagtaaacgacccagggtggttcccagcaaagctgcttcctctctgctcctacgcatcctgtcctggcgggaagagagcgtctgggtccattcaagactctgatgacacccctccccgaggcctcccactgccggggtcccaggacccttcccccttcacctggtgacaggaacactcctttcctggtatggaacgtgagctcccgtgacatgatgataggtcttctccttggggcctcccccaataaatctgtaataaacctgaaacccacctacagct

SEQ ID NO: 258564 - DNA, 1455 bp, Artificial Sequence
  derived and/or modified sequence
atggcccggctgctgcggagcgccacctgggagctgttcccctggaggggctactgcagccagaaggccaagggggagctgtgccgggactttgtggaggccctgaaggctgtggtgggcggcagccacgtgtccacagctgctgtggtgcgggagcagcacggcagagatgaatctgtgcaccgctgtgagcccccagatgctgtggtgtggccccagaatgtggagcaggtgtcccggctggccgccctgtgctaccggcagggcgtgcccatcatcccctttggaactggaacaggcctggagggcggcgtgtgtgctgtgcagggcggcgtgtgtgtgaacctgacccacatggaccgcatcctggagctgaaccaggaggacttctctgtggtggtggagcccggggtgaccaggaaggccctgaatgcccacctgcgggacagcggcctgtggttccctgtggaccccggggctgatgccagcctgtgtggcatggccgccaccggggccagcggcaccaatgctgtgcgctatggcaccatgagggacaacgtgctgaacctggaggtggtgctgcctgatggccgcctgctgcacacagctggccggggccgccacttcaggaagtctgctgctggctacaacctgaccggcctgtttgtgggcagcgagggcaccctgggcctcatcacagccaccaccctgcggctgcacccagcccctgaggccaccgtggccgccacctgtgccttccccagcgtgcaggccgctgtggacagcacagtgcacatcctgcaggccgctgtgcctgtggcccgcatcgagttcctggatgaggtgatgatggatgcctgcaaccgctacagcaagctgaactgcctggtggcccccaccctcttcctggagttccacggcagccagcaggccctggaggagcagctgcagaggacagaggagatcgtgcagcagaatggagccagtgacttctcctgggccaaggaggccgaggagaggagccggctgtggacagcccggcacaatgcctggtatgctgccctggccaccaggcctggctgcaagggctacagcacagatgtgtgtgtgcccatcagccggctgcctgagatcgtggtgcagaccaaggaggacctgaatgccagcggcctgaccggcagcatcgtgggccacgtgggagatggcaacttccactgcatcctgctggtgaacccagatgatgctgaggagctgggccgggtgaaggcctttgctgagcagctgggccggcgggccctggccctgcacggcacctgcaccggggagcacggcatcggcatgggcaagaggcagctgctgcaggaggaggtgggcgctgtgggcgtggagaccatgaggcagctgaaggctgtgctggacccccagggcctgatgaaccctgggaaggtgctgtag

SEQ ID NO: 258565 - DNA, 1455 bp, Artificial Sequence
  derived and/or modified sequence
atggcccggctgctgcggagcgccacctgggagctgttcccctggcggggctattgtagtcagaaggcaaaaggggaactttgtcgggactttgtcgaggccctcaaagctgtggtgggcggcagtcacgtctcaacggcggcagttgttagagagcagcatggacgcgacgagagcgtccataggtgtgagccgcctgacgctgtcgtgtggcctcagaacgtagagcaggtgagcaggctggccgcactgtgttacagacaaggagttccgattatccctttcggcactgggaccgggctcgaggggggggtatgtgcagtgcagggcggggtgtgcgtgaacctgacgcatatggaccggatccttgagttaaaccaggaagatttcagcgttgttgtagaacctggcgtaacacggaaagcgttgaatgcccacctgcgggacagcggtctgtggttccccgtcgatcccggtgcagacgccagcttgtgcggtatggccgcaacaggagccagcgggacaaatgccgtacgttatggaaccatgagggacaacgtcctaaacctggaggtcgtcctccccgacggcaggctgctccacaccgccgggcggggacgacatttcagaaagtcagcagctggctataacttgacagggctattcgtggggtctgaaggaacactgggattgatcaccgctacaacattacgcctgcaccccgcgcccgaggccacagtggccgctacatgcgctttccccagcgtgcaagccgctgtggacagcaccgtccatatcctgcaagccgctgtccccgtcgcccggatcgaattcttggatgaggttatgatggacgcatgcaacaggtactccaaactgaactgtctggtcgcccctaccctgtttctcgaattccatgggtcacagcaggccctggaggagcagctccagagaaccgaggaaattgtgcaacagaatggggcttccgatttcagttgggcaaaagaggccgaggaacgaagccggctgtggacggcccggcacaatgcttggtacgccgcgctggcaacccgccccggttgcaaaggctacagcactgacgtgtgcgtgccaatctcccgtctcccagagatcgtagtacaaacaaaagaggatctgaatgcatcaggactgacaggaagtatagtcggacacgttggagatggaaacttccattgcattctgctggtcaaccctgatgacgccgaggaattggggcgggtgaaagcatttgccgagcaattaggaagacgcgccttagctcttcatggaacttgcactggcgaacacggcatcggcatgggcaagaggcagctgcttcaggaggaggtgggtgctgtgggcgtggaaaccatgcgtcagttgaaagccgtattggatcctcaaggcctgatgaatccaggcaaggtgctgtag

SEQ ID NO: 258566 - DNA, 1455 bp, Artificial Sequence
  derived and/or modified sequence
atggcaaggttacttcggagcgcgacatgggaattgtttccatggaggggttactgtagccaaaaagcgaagggcgaattgtgtcgcgacttcgttgaggcccttaaagctgttgtggggggttcacacgtttcaacagccgcagtggtgagagaacagcatgggagagatgagtcggtccacaggtgcgagcctcccgatgctgtcgtgtggccccagaatgttgagcaggtttctcggctcgccgctctctgttaccgccagggcgtccctatcatcccattcgggaccggcaccggactagaagggggtgtctgcgccgtgcaggggggtgtgtgcgttaacctgacgcacatggatcggattctcgaactgaatcaggaagatttcagcgtggtcgttgagcccggtgtgacacgaaaggccctgaacgcccacctgagagacagcggtttgtggtttcccgtggaccccggtgccgatgcttcactgtgtggaatggccgctaccggggcatcagggacaaacgctgtcagatatggtacaatgcgagacaatgtgctgaatctggaagttgtcctcccagacgggcgacttttgcacactgccggtaggggcagacacttccgcaagagtgccgctgggtacaacctcactggcctatttgttggaagtgagggtaccctcgggttgataaccgccaccacgctgcgtcttcaccccgcaccagaggccacagtggcggcaacctgcgcttttccctctgtgcaggcagcggttgatagcactgtgcacattctccaggccgcagtccccgtagcacggattgagtttctggacgaagtcatgatggacgcctgtaacagatacagcaagcttaattgtcttgtggctccaacactttttttggaatttcacggcagccagcaagccctcgaggagcagcttcagcggactgaggagatagtccagcaaaacggtgcatcagatttcagttgggccaaagaggcagaggaacgttcacgactctggacagccagacacaacgcgtggtatgctgctcttgccactcggcctggctgcaaaggctattctaccgatgtctgtgtacccatctcaaggcttcccgaaatcgttgtccaaacaaaggaggacctaaacgcgtcaggactcactggcagcatagtgggccatgtcggcgatggcaactttcactgcatactgttggtcaacccggatgatgctgaagaactggggagggttaaggcattcgcagagcaactcggcaggagggccctcgcattgcacggcacctgtacaggagagcacggaattgggatgggaaagagacagctcttacaggaggaagtcggtgccgtcggagttgagactatgcgccagctcaaagctgtactggacccccagggtcttatgaatcctgggaaggtgctgtag

SEQ ID NO: 258567 - DNA, 1455 bp, Artificial Sequence
  derived and/or modified sequence
atggccagactgctgagaagcgccacctgggagctgttcccctggagaggctactgcagccagaaggccaagggcgagctgtgcagagacttcgtggaggccctgaaggccgtggtgggcggcagccacgtgagcaccgccgccgtggtgagagagcagcacggcagagacgagagcgtgcacagatgcgagccccccgacgccgtggtgtggccccagaacgtggagcaggtgagcagactggccgccctgtgctacagacagggcgtgcccatcatccccttcggcaccggcaccggcctggagggcggcgtgtgcgccgtgcagggcggcgtgtgcgtgaacctgacccacatggacagaatcctggagctgaaccaggaggacttcagcgtggtggtggagcccggcgtgaccagaaaggccctgaacgcccacctgagagacagcggcctgtggttccccgtggaccccggcgccgacgccagcctgtgcggcatggccgccaccggcgccagcggcaccaacgccgtgagatacggcaccatgagagacaacgtgctgaacctggaggtggtgctgcccgacggcagactgctgcacaccgccggcagaggcagacacttcagaaagagcgccgccggctacaacctgaccggcctgttcgtgggcagcgagggcaccctgggcctgatcaccgccaccaccctgagactgcaccccgcccccgaggccaccgtggccgccacctgcgccttccccagcgtgcaggccgccgtggacagcaccgtgcacatcctgcaggccgccgtgcccgtggccagaatcgagttcctggacgaggtgatgatggacgcctgcaacagatacagcaagctgaactgcctggtggcccccaccctgttcctggagttccacggcagccagcaggccctggaggagcagctgcagagaaccgaggagatcgtgcagcagaacggcgccagcgacttcagctgggccaaggaggccgaggagagaagcagactgtggaccgccagacacaacgcctggtacgccgccctggccaccagacccggctgcaagggctacagcaccgacgtgtgcgtgcccatcagcagactgcccgagatcgtggtgcagaccaaggaggacctgaacgccagcggcctgaccggcagcatcgtgggccacgtgggcgacggcaacttccactgcatcctgctggtgaaccccgacgacgccgaggagctgggcagagtgaaggccttcgccgagcagctgggcagaagagccctggccctgcacggcacctgcaccggcgagcacggcatcggcatgggcaagagacagctgctgcaggaggaggtgggcgccgtgggcgtggagaccatgagacagctgaaggccgtgctggacccccagggcctgatgaaccccggcaaggtgctgtag

SEQ ID NO: 258568 - protein, 352 aa, Artificial Sequence
  derived and/or modified sequence
MKMASFLAFLLLNFRVCLLLLQLLMPHSAQFSVLGPSGPILAMVGEDADLPCHLFPTMSAETMELKWVSSSLRQVVNVYADGKEVEDRQSAPYRGRTSILRDGITAGKAALRIHNVTASDSGKYLCYFQDGDFYEKALVELKVAALGSDLHVDVKGYKDGGIHLECRSTGWYPQPQIQWSNNKGENIPTVEAPVVADGVGLYAVAASVIMRGSSGEGVSCTIRSSLLGLEKTASISIADPFFRSAQRWIAALAGTLPVLLLLLGGAGYFLWQQQEEKKTQFRKKKREQELREMAWSTMKQEQSTRVKLLEELRWRSIQYASRGERHSAYNEWKKALFKPGEEMLQMRLHFVK

SEQ ID NO: 258569 - DNA, 132 bp, Artificial Sequence
  derived and/or modified sequence
atgaaaatggcttcttttcttgctttcctcctgcttaatttccgggtttgtctgctgctgctgcaactcctgatgccacacagcgcccagttctcagtgctgggaccatcaggtccaatcctggccatgtag

SEQ ID NO: 258570 - DNA, 360 bp, Artificial Sequence
  derived and/or modified sequence
atgaaaatggccagcttcctagcatttctcctgcttaacttccgcgtgtgcctgctgctgctccagctgctgatgccccactctgcccagttcagtgtgctcggaccctcaggccctattttggctatggtcggggaagacgccgatctgccatgccacctcttccccaccatgagcgctgagacaatggaactgaagtgggtcagctcctctttgaggcaggttgtgaatgtatatgccgatggaaaggaggtggaagaccggcagtcagcgccatacagaggacggacctcaatattaagggacgggattacagccgggaaagccgccctgagaattcataacgtgaccgccagctag

SEQ ID NO: 258571 - DNA, 1059 bp, Artificial Sequence
  derived and/or modified sequence
atgaagatggctagtttccttgcctttctcctgttaaatttccgtgtgtgcctgttgctcttgcagttactgatgccgcactccgcacagttctctgtcctgggtcccagcggcccgattcttgctatggttggagaagatgccgaccttccctgccatctgtttcctactatgtcagccgagacaatggaactcaagtgggtgtcttccagcctgcgccaagtagtcaatgtttatgccgatgggaaggaggtcgaggacaggcaaagcgctccctaccgcggcaggacatcgattcttagagacggcataaccgccggcaaagccgccctaaggatccacaacgttacggcatccgacagcggcaagtacctctgctactttcaggatggcgacttctatgagaaggccttggtcgagcttaaagtggccgctttagggtctgacctccacgttgacgtcaaaggctacaaggatggcggaattcacctcgaatgcaggtctaccggatggtatccacagccccaaatccaatggtcaaataacaagggggagaacatccccactgtcgaagccccagtagtggccgacggagtcggactctatgcagtggccgcctccgtcataatgaggggaagttctggcgaaggggtgtcgtgcactattcgttccagccttttaggcttggaaaagacagccagtatttctatcgcagatcccttttttcgttctgcccaacggtggatcgccgcccttgcaggcaccctacccgtgcttctgttgctcttaggaggcgcagggtacttcctctggcagcagcaagaggagaaaaagacccagttccggaaaaagaaacgggagcaagagctcagggagatggcctggtctactatgaaacaagaacagtcaactagagtgaagctgctcgaagaactcaggtggcgctctattcaatatgctagtcggggcgaacgtcattctgcgtacaatgagtggaaaaaagctctttttaagcctggtgaggagatgctgcagatgcggctgcactttgtcaagtag

SEQ ID NO: 258572 - DNA, 279 bp, Artificial Sequence
  derived and/or modified sequence
atgaaaatggctagcttcttagcattccttctcctgaattttagagtgtgcttactgctccttcagttactgatgccgcacagcgctcagtttagcgtgttaggaccctccggaccaatcctcgctatggtcggtgaagacgccgaccttccgtgccatcttttcccgaccatgtcggccgagaccatggagcttaagtgggtctcctcatcccttaggcaagttgtcaatgtttacgcagacggcaaggaggtggaagatcggcagagtgctccttag

SEQ ID NO: 258573 - DNA, 132 bp, Artificial Sequence
  derived and/or modified sequence
atgaagatggccagcttcctggccttcctgctgctgaacttccgggtgtgcctgctgctgctgcagctgctgatgccccacagcgcccagttctctgtgctgggccccagcggccccatcctggccatgtag

SEQ ID NO: 258574 - DNA, 360 bp, Artificial Sequence
  derived and/or modified sequence
atgaagatggccagcttcctggccttcctgctgctgaacttccgggtgtgcctgctgctgctgcagctgctgatgccccacagcgcccagttctctgtgctgggccccagcggccccatcctggccatggtgggggaggatgctgacctgccctgccacctgttccccaccatgtctgctgagaccatggagctgaagtgggtgagcagcagcctgcggcaggtggtgaatgtgtatgcagatggcaaggaggtggaggaccggcagagcgccccctaccggggccgcaccagcatcctgagagatggcatcacagctgggaaggccgccctgcgcatccacaacgtgacagccagctag

SEQ ID NO: 258575 - DNA, 1059 bp, Artificial Sequence
  derived and/or modified sequence
atgaagatggccagcttcctggccttcctgctgctgaacttccgggtgtgcctgctgctgctgcagctgctgatgccccacagcgcccagttctctgtgctgggccccagcggccccatcctggccatggtgggggaggatgctgacctgccctgccacctgttccccaccatgtctgctgagaccatggagctgaagtgggtgagcagcagcctgcggcaggtggtgaatgtgtatgcagatggcaaggaggtggaggaccggcagagcgccccctaccggggccgcaccagcatcctgagagatggcatcacagctgggaaggccgccctgcgcatccacaacgtgacagccagtgacagcggcaagtacctgtgctacttccaggatggagacttctatgagaaggccctggtggagctgaaggtggccgccctgggcagtgacctgcacgtggatgtgaagggctacaaggatggcggcatccacctggagtgccgcagcacaggctggtacccccagccccagatccagtggagcaacaacaagggggagaacatccccaccgtggaggcccctgtggtggctgatggagtgggcctgtatgctgtggccgccagcgtcatcatgaggggcagcagcggggagggcgtgtcctgcaccatccgcagcagcctgctgggcctggagaagacagccagcatcagcattgctgaccccttcttccgcagcgcccagcgctggattgctgccctggccggcaccctgcctgtgctgctgctgctgctgggcggggccggctacttcctgtggcagcagcaggaggagaagaagacccagttcaggaagaagaagcgggagcaggagctgcgggagatggcctggagcaccatgaagcaggagcagagcaccagggtgaagctgctggaggagctgcgctggaggagcatccagtatgccagcagaggagagcggcacagcgcctacaatgagtggaagaaggccctcttcaagccaggagaggagatgctgcagatgaggctgcactttgtgaagtag

SEQ ID NO: 258576 - DNA, 279 bp, Artificial Sequence
  derived and/or modified sequence
atgaagatggccagcttcctggccttcctgctgctgaacttccgggtgtgcctgctgctgctgcagctgctgatgccccacagcgcccagttctctgtgctgggccccagcggccccatcctggccatggtgggggaggatgctgacctgccctgccacctgttccccaccatgtctgctgagaccatggagctgaagtgggtgagcagcagcctgcggcaggtggtgaatgtgtatgcagatggcaaggaggtggaggaccggcagagcgccccctag

SEQ ID NO: 258577 - DNA, 132 bp, Artificial Sequence
  derived and/or modified sequence
atgaagatggccagcttcctggccttcctgctgctgaacttccgggtttgtctgctactcctgcagctgctgatgcctcacagcgcacaattctctgttctcggaccctcaggcccaatcctggctatgtag

SEQ ID NO: 258578 - DNA, 360 bp, Artificial Sequence
  derived and/or modified sequence
atgaagatggccagcttcctggccttcctgctgctgaacttccgggtctgtttgttacttctgcagcttctcatgccccactcagcacagttcagtgtgctcggcccctcgggacccatcctggccatggtgggcgaagatgcggacctgccttgtcatctttttcctactatgtctgcagagacaatggagcttaaatgggtgtctagtagtctccggcaggtggtcaatgtctatgctgacggcaaagaagttgaggatagacagagcgcgccctacagagggcgaaccagtattttgcgagacggtataactgcaggcaaggcagccctccgcatccacaacgtgacggcctcttag

SEQ ID NO: 258579 - DNA, 1059 bp, Artificial Sequence
  derived and/or modified sequence
atgaagatggccagcttcctggccttcctgctgctgaacttccgggtgtgtcttctcctcctccaactgctgatgccacacagcgcgcagttttcagttttgggaccctccggtcccatcctggccatggtaggtgaagatgctgacttgccctgccacctgtttcctacaatgtctgctgaaactatggagcttaaatgggtgagcagttccttacgtcaagtggtgaacgtctatgccgatggcaaggaagtagaggacagacagagcgctccttatagaggacggacttcaatactgcgggacggaatcaccgcaggtaaggcagccctgcggattcacaatgtcactgcatctgatagcgggaaatatctgtgttattttcaagacggcgatttctacgaaaaggccctagtggaactgaaagttgcagctctcggcagcgatttacacgtggatgttaagggttacaaagatggcggaatccaccttgaatgccgatctacaggctggtacccccagccacagattcagtggtcaaataacaaaggagaaaatatcccaacagtcgaagctcctgttgtggccgatggcgttggactgtatgctgtggccgcgagtgtaatcatgaggggttcatccggagaaggcgtgtcctgcacaattcggagcagtctgctgggactcgagaagacagccagtatttccatagcggatcctttcttcagaagcgctcagcgctggatcgccgctctcgcaggaacgttaccggtactgcttttgctgctggggggagcagggtactttttgtggcagcagcaggaggagaagaagacgcagttcagaaagaagaagagagagcaagagctgagagaaatggcttggtctacaatgaaacaggaacagagtaccagggtaaaattgctcgaggaactgcggtggaggtcaatacagtacgccagccggggcgaaaggcatagcgcttataacgagtggaaaaaggcattgtttaaaccaggcgaggagatgctgcaaatgcgactgcacttcgtgaaatag

SEQ ID NO: 258580 - DNA, 279 bp, Artificial Sequence
  derived and/or modified sequence
atgaagatggccagcttcctggccttcctgctgctgaacttccgggtgtgcctcttgttgctgcagctccttatgccacattccgcacagttttctgtgttaggtccatccgggccaattctggctatggtgggagaagatgcagatcttccctgtcacctctttccaaccatgtccgcagaaaccatggaactcaagtgggtgtcttccagcttgcgtcaggtcgtcaatgtgtacgcagacggcaaggaggtcgaggacaggcagtcggccccctag

SEQ ID NO: 258581 - DNA, 132 bp, Artificial Sequence
  derived and/or modified sequence
atgaaaatggcctctttcctggcctttctgctgttgaacttccgggtatgcttgcttctgctgcagttacttatgccacattcagctcagttctcagtgctcgggccatccggccctatactggccatgtag

SEQ ID NO: 258582 - DNA, 360 bp, Artificial Sequence
  derived and/or modified sequence
atgaagatggccagtttcctggcctttttacttttgaactttcgggtgtgcttgctcctgctgcagcttcttatgccccattcagcccaattcagtgtgcttggtccatccggaccaatcctcgcgatggttggggaagacgcagacttgccctgccacttgttccctaccatgtctgcagagactatggaacttaagtgggtatcttcctccctgcgtcaggttgtgaacgtctatgctgatgggaaagaagtcgaggatcgccagtccgctccgtatagaggtcgtacttccattctgcgagatggcattacggctggcaaagcagccctccgaatccataacgtcaccgcctcctag

SEQ ID NO: 258583 - DNA, 1059 bp, Artificial Sequence
  derived and/or modified sequence
atgaagatggcttcattcctggcttttctgcttctgaattttagagtgtgtctgttgctgttgcagcttctgatgccccactctgcccagtttagcgtactagggcctagcgggccaatccttgcaatggttggggaggacgcagatctgccatgtcatctatttcctactatgagtgccgaaactatggagctgaagtgggtgagtagctcactccgacaagttgtaaacgtctatgccgacgggaaagaggtggaggatcggcagagcgcaccctaccgcggacgcacctccatcctccgagatggcatcactgctgggaaggctgccctgagaatccataacgtaaccgcttccgattcgggaaaatatttatgctatttccaggacggggacttttacgaaaaggccctggttgaactgaaagtggcggcattgggttcagacttgcacgtagacgtgaagggatacaaagacggaggcatccacctggaatgccgcagcacaggatggtatccccaacctcagatccagtggagcaataataagggggaaaatattccgacggtcgaggctccagtcgttgccgacggagtaggactgtatgccgtggctgctagtgtgataatgcgaggctcttccggagagggggtgagctgtaccattagaagctccttactggggctggaaaaaaccgcttctatcagtatagcagatccgttttttcgatctgcccagagatggattgcagctctggcgggtacattacccgtcttactgctgctactcggcggagctggttactttctgtggcagcagcaggaggagaagaagacccagtttcgaaagaagaaacgggagcaggagctgcgcgagatggcgtggagtacgatgaaacaggagcagtctacaagggtgaaactactagaagagctgcggtggagatccatacagtatgcctctcgtggagagcgccattcggcctataatgagtggaagaaggccctgtttaaacctggagaagaaatgttgcagatgagattgcattttgtgaaatag

SEQ ID NO: 258584 - DNA, 279 bp, Artificial Sequence
  derived and/or modified sequence
atgaagatggcatctttcttggcctttctcctgcttaacttccgggtgtgcctgcttttgctgcaattgttaatgccacactccgcacaattctccgtgcttggtccttcggggcctatcctagcaatggtgggagaagatgcagacttaccctgtcatctgttcccaaccatgagtgcagaaacaatggagttaaagtgggtgtcatctagcctacgtcaggtggtgaatgtttatgctgacggcaaggaagtggaggatagacaatccgccccatag

SEQ ID NO: 258585 - DNA, 570 bp, Artificial Sequence
  derived and/or modified sequence
aaagagagattgttattattcctcacgatgacccgacagtctctgctttctttttcctttcttccagaaggagatttaaccatagtagaaagaatggagaactattaactgcctttcttctgtgggctgtgattttcagaggggaatgctaagagatcttgttctcagaggccattcccagacccacagcaagagggattatggctgcaggcctcatgctcctttgttttggaagaaactgttgaggagtgattttcaatgttgggactcaaaggtgaagacactgaaggacagaatttttggcagaggaaagatcttcttcggtcaccatacttgagttagctctagggaagtggaggtttccatttggaattctatagcttcttccaggtcatagtgtctgccccccaccttccagtatctcctgatatgcagcatgaatgaaaatggcaagtttcctggccttccttctgctcaactttcgtgtctgcctccttttgcttcagctgctcatgcctcactcagctcagttttctgtgcttggaccctctgggcccatcctggccatgg

SEQ ID NO: 258586 - DNA, 580 bp, Artificial Sequence
  derived and/or modified sequence
attcttccaaagagagattgttattattcctcacgatgacccgacagtctctgctttctttttcctttcttccagaaggagatttaaccatagtagaaagaatggagaactattaactgcctttcttctgtgggctgtgattttcagaggggaatgctaagagcttcttccaggtcatagtgtctgccccccaccttccagtatctcctgatatgcagcatgaatgaaaatggcaagtttcctggccttccttctgctcaactttcgtgtctgcctccttttgcttcagctgctcatgcctcactcagctcagttttctgtgcttggaccctctgggcccatcctggccatggtgggtgaagacgctgatctgccctgtcacctgttcccgaccatgagtgcagagaccatggagctgaagtgggtgagttccagcctaaggcaggtggtgaacgtgtatgcagatggaaaggaagtggaagacaggcagagtgcaccgtatcgagggagaacttcgattctgcgggatggcatcactgcagggaaggctgctctccgaatacacaacgtcacagcctct

SEQ ID NO: 258587 - DNA, 1758 bp, Artificial Sequence
  derived and/or modified sequence
aatcaaaaaacttattcttccaaagagagattgttattattcctcacgatgacccgacagtctctgctttctttttcctttcttccagaaggagatttaaccatagtagaaagaatggagaactattaactgcctttcttctgtgggctgtgattttcagaggggaatgctaagagtatctcctgatatgcagcatgaatgaaaatggcaagtttcctggccttccttctgctcaactttcgtgtctgcctccttttgcttcagctgctcatgcctcactcagctcagttttctgtgcttggaccctctgggcccatcctggccatggtgggtgaagacgctgatctgccctgtcacctgttcccgaccatgagtgcagagaccatggagctgaagtgggtgagttccagcctaaggcaggtggtgaacgtgtatgcagatggaaaggaagtggaagacaggcagagtgcaccgtatcgagggagaacttcgattctgcgggatggcatcactgcagggaaggctgctctccgaatacacaacgtcacagcctctgacagtggaaagtacttgtgttatttccaagatggtgacttctatgaaaaagccctggtggagctgaaggttgcagcactgggttctgatcttcacgttgatgtgaagggttacaaggatggagggatccatctggagtgcaggtccactggctggtacccccaaccccaaatacagtggagcaacaacaagggagagaacatcccgactgtggaagcacctgtggttgcagacggagtgggcctgtatgcagtagcagcatctgtgatcatgagaggcagctctggggagggtgtatcctgtaccatcagaagttccctcctcggcctggaaaagacagccagcatttccatcgcagaccccttcttcaggagcgcccagaggtggatcgccgccctggcagggaccctgcctgtcttgctgctgcttcttgggggagccggttacttcctgtggcaacagcaggaggaaaaaaagactcagttcagaaagaaaaagagagagcaagagttgagagaaatggcatggagcacaatgaagcaagaacaaagcacaagagtgaagctcctggaggaactcagatggagaagtatccagtatgcatctcggggagagagacattcagcctataatgaatggaaaaaggccctcttcaagcctggtgaggaaatgcttcagatgaggctccactttgttaaataaattggatgtatggaaaaatagactgcagaaaaggggaactcatttagctcatgagtggtcgaatgaaggttgaaaattaacctctgagtataaagcattagtgggcagagtgaatatggggagggaaacaagaaaaacgtagaaaggatccttgctgcttcctgaggccgcgtcagggtattgggttaggcagagatgctgaggcaaccctcatttcaccctcctcttcccctctggacacaagatacctgatacctggggctttctctcctgacatcgatgagagagtcacatttagggcagactagggacaccaggctttggactcagacctcctcagcatggcccaggccttgcatgctgaggctctgaaatccaggaaaaatggttgacctcatggacacttcctcaaactctctgcagcggatgtgattctggatccaaaaacagcaaaccccatcctccttgtttctgaggaccagaggagtgtgcagcgtgcca

SEQ ID NO: 258588 - DNA, 619 bp, Artificial Sequence
  derived and/or modified sequence
attcctcacgatgacccgacagtctctgctttctttttcctttcttccagaaggagatttaaccatagtagaaagaatggagaactattaactgcctttcttctgtgggctgtgattttcagaggggaatgctaagagacatgtttttacaggtgattttcaatgttgggactcaaaggtgaagacactgaaggacagaatttttggcagaggaaagatcttcttcggtcaccatacttgagttagctctagggaagtggaggtttccatttggaattctatagcttcttccaggtcatagtgtctgccccccaccttccagtatctcctgatatgcagcatgaatgaaaatggcaagtttcctggccttccttctgctcaactttcgtgtctgcctccttttgcttcagctgctcatgcctcactcagctcagttttctgtgcttggaccctctgggcccatcctggccatggtgggtgaagacgctgatctgccctgtcacctgttcccgaccatgagtgcagagaccatggagctgaagtgggtgagttccagcctaaggcaggtggtgaacgtgtatgcagatggaaaggaagtggaagacaggcagagtgcacc

SEQ ID NO: 258589 - DNA, 132 bp, Artificial Sequence
  derived and/or modified sequence
atgaagatggccagcttcctggccttcctgctgctgaacttcagagtgtgcctgctgctgctgcagctgctgatgccccacagcgcccagttcagcgtgctgggccccagcggccccatcctggccatgtag

SEQ ID NO: 258590 - DNA, 360 bp, Artificial Sequence
  derived and/or modified sequence
atgaagatggccagcttcctggccttcctgctgctgaacttcagagtgtgcctgctgctgctgcagctgctgatgccccacagcgcccagttcagcgtgctgggccccagcggccccatcctggccatggtgggcgaggacgccgacctgccctgccacctgttccccaccatgagcgccgagaccatggagctgaagtgggtgagcagcagcctgagacaggtggtgaacgtgtacgccgacggcaaggaggtggaggacagacagagcgccccctacagaggcagaaccagcatcctgagagacggcatcaccgccggcaaggccgccctgagaatccacaacgtgaccgccagctag

SEQ ID NO: 258591 - DNA, 1059 bp, Artificial Sequence
  derived and/or modified sequence
atgaagatggccagcttcctggccttcctgctgctgaacttcagagtgtgcctgctgctgctgcagctgctgatgccccacagcgcccagttcagcgtgctgggccccagcggccccatcctggccatggtgggcgaggacgccgacctgccctgccacctgttccccaccatgagcgccgagaccatggagctgaagtgggtgagcagcagcctgagacaggtggtgaacgtgtacgccgacggcaaggaggtggaggacagacagagcgccccctacagaggcagaaccagcatcctgagagacggcatcaccgccggcaaggccgccctgagaatccacaacgtgaccgccagcgacagcggcaagtacctgtgctacttccaggacggcgacttctacgagaaggccctggtggagctgaaggtggccgccctgggcagcgacctgcacgtggacgtgaagggctacaaggacggcggcatccacctggagtgcagaagcaccggctggtacccccagccccagatccagtggagcaacaacaagggcgagaacatccccaccgtggaggcccccgtggtggccgacggcgtgggcctgtacgccgtggccgccagcgtgatcatgagaggcagcagcggcgagggcgtgagctgcaccatcagaagcagcctgctgggcctggagaagaccgccagcatcagcatcgccgaccccttcttcagaagcgcccagagatggatcgccgccctggccggcaccctgcccgtgctgctgctgctgctgggcggcgccggctacttcctgtggcagcagcaggaggagaagaagacccagttcagaaagaagaagagagagcaggagctgagagagatggcctggagcaccatgaagcaggagcagagcaccagagtgaagctgctggaggagctgagatggagaagcatccagtacgccagcagaggcgagagacacagcgcctacaacgagtggaagaaggccctgttcaagcccggcgaggagatgctgcagatgagactgcacttcgtgaagtag

SEQ ID NO: 258592 - DNA, 279 bp, Artificial Sequence
  derived and/or modified sequence
atgaagatggccagcttcctggccttcctgctgctgaacttcagagtgtgcctgctgctgctgcagctgctgatgccccacagcgcccagttcagcgtgctgggccccagcggccccatcctggccatggtgggcgaggacgccgacctgccctgccacctgttccccaccatgagcgccgagaccatggagctgaagtgggtgagcagcagcctgagacaggtggtgaacgtgtacgccgacggcaaggaggtggaggacagacagagcgccccctag

SEQ ID NO: 258593 - protein, 198 aa, Artificial Sequence
  derived and/or modified sequence
MTSEITYAEVRFKNEFKSSGINTASSAVFFQKYSQLLEKKTTKELVHTTLECVKKNMPVEETAWSCCPKNWKSFSSNCYFISTESASWQDSEKDCARMEAHLLVINTQEEQDFIFQNLQEESAYFVGLSDPEGQRHWQWVDQTPYNESSTFWHPREPSDPNERCVVLNFRKSPKRWGWNDVNCLGPQRSVCEMMKIHL

SEQ ID NO: 258594 - DNA, 597 bp, Artificial Sequence
  derived and/or modified sequence
atgacgagcgaaatcacatatgccgaggtgaggtttaagaacgaatttaagtcctcaggtattaacacggcttcatccgccgttttctttcagaagtacagccagctgctggaaaagaagacaactaaggaacttgtccatactactcttgagtgcgttaaaaagaatatgcccgtggaagagaccgcttggagctgctgccctaagaactggaagtctttcagcagcaactgctacttcatcagtactgagtccgcttcatggcaggactctgagaaagattgtgccagaatggaagcacatctgcttgtcattaatacacaggaggagcaggatttcatctttcagaatctgcaagaggagagtgcttacttcgtggggctatctgatcccgaaggccaacgccactggcagtgggtggaccagaccccctacaacgagtcgagcactttctggcaccctagagagccatctgacccgaacgagagatgtgttgtacttaactttcgtaagtcgcctaagaggtggggttggaatgatgtgaactgtctgggaccccaacgtagtgtctgtgagatgatgaagatccacctgtag

SEQ ID NO: 258595 - DNA, 597 bp, Artificial Sequence
  derived and/or modified sequence
atgaccagcgagatcacctacgccgaggtgcgcttcaagaatgagttcaagagcagcggcatcaacacagccagcagcgctgtgttcttccagaagtacagccagctgctggagaagaagaccaccaaggagctggtgcacaccaccctggagtgtgtgaagaagaacatgcctgtggaggagacagcctggagctgctgccccaagaactggaagagcttcagcagcaactgctacttcatcagcacagaaagtgcctcctggcaggacagcgagaaggactgtgccaggatggaggcccacctgctggtgatcaacacccaggaggagcaggacttcatcttccagaacctgcaggaggagagcgcctactttgtgggcctgagtgaccctgagggccagaggcactggcagtgggtggaccagaccccctacaatgaaagcagcaccttctggcacccccgggagcccagcgaccccaatgaaagatgtgtggtgctgaacttcaggaagagccccaagcgctggggctggaatgatgtgaactgcctgggcccccagaggtctgtgtgtgagatgatgaagatccacctgtag

SEQ ID NO: 258596 - DNA, 597 bp, Artificial Sequence
  derived and/or modified sequence
atgaccagcgagatcacctacgccgaggtgcggttcaagaacgagttcaagagctcagggatcaatacagctagctccgctgtatttttccagaaatactcccagctgctggagaagaagacaacgaaagaattggtacatactactctcgagtgtgtgaagaaaaatatgcccgtcgaagagacagcatggtcatgctgccccaagaattggaagagcttctcctccaattgttacttcatttccacagaatctgcatcatggcaagactccgagaaagattgtgccaggatggaggcccacctccttgtaatcaacacacaggaagagcaggactttatatttcagaaccttcaggaagaatcagcctatttcgttggcctgtctgaccccgagggccagaggcactggcagtgggtggatcaaaccccctacaatgagagctcaactttctggcaccctagagaacctagtgacccgaatgagcgctgtgtagtcctcaactttcgcaaatcgcctaagagatggggatggaatgacgttaactgtctgggtcctcagcggagtgtatgtgagatgatgaaaatccatctgtag

SEQ ID NO: 258597 - DNA, 597 bp, Artificial Sequence
  derived and/or modified sequence
atgacctccgaaatcacatacgctgaggtgcgattcaaaaacgaattcaagtcgtccggcatcaataccgcatcatctgcagttttttttcagaaatactctcagctgctggaaaaaaaaactaccaaagagcttgtgcatacaaccctcgaatgcgttaaaaagaatatgcccgtggaggaaaccgcttggagctgttgccccaagaactggaagtccttttccagcaactgctacttcatatctacagagagcgccagctggcaggactcggagaaagactgtgccaggatggaggcccacttacttgtgatcaacactcaagaggagcaggacttcattttccagaacctccaagaggaatcagcctatttcgttgggctgagtgatccagagggacagaggcactggcaatgggttgatcagactccctataatgaatcatctacattttggcaccccagagaaccatcagaccctaacgagaggtgtgttgtgctgaacttcaggaagtcaccaaagcggtgggggtggaacgacgtcaattgtctgggaccacagagatccgtgtgcgaaatgatgaaaattcacctttag

SEQ ID NO: 258598 - DNA, 597 bp, Artificial Sequence
  derived and/or modified sequence
atgacttcggaaatcacttatgctgaagtgaggttcaaaaatgaattcaagtcctcaggcatcaacacagcctcttctgcagttttctttcaaaaatattctcagcttcttgaaaaaaagactacaaaagagctggttcatacaacattggagtgtgtgaaaaaaaatatgcccgtggaagagacagcctggagctgttgcccaaagaattggaagtcatttagttccaactgctactttatttctactgaatcagcatcttggcaagacagtgagaaggactgtgctagaatggaggctcacctgctggtgataaacactcaagaagagcaggatttcatcttccagaatctgcaagaagaatctgcttattttgtggggctctcagatccagaaggtcagcgacattggcaatgggttgatcagacaccatacaatgaaagttccacattctggcatccacgtgagcccagtgatcccaatgagcgctgcgttgtgctaaattttcgtaaatcacccaaaagatggggctggaatgatgttaattgtcttggtcctcaaaggtcagtttgtgagatgatgaagatccacttatga

SEQ ID NO: 258599 - DNA, 597 bp, Artificial Sequence
  derived and/or modified sequence
atgaccagcgagatcacctacgccgaggtgagattcaagaacgagttcaagagcagcggcatcaacaccgccagcagcgccgtgttcttccagaagtacagccagctgctggagaagaagaccaccaaggagctggtgcacaccaccctggagtgcgtgaagaagaacatgcccgtggaggagaccgcctggagctgctgccccaagaactggaagagcttcagcagcaactgctacttcatcagcaccgagagcgccagctggcaggacagcgagaaggactgcgccagaatggaggcccacctgctggtgatcaacacccaggaggagcaggacttcatcttccagaacctgcaggaggagagcgcctacttcgtgggcctgagcgaccccgagggccagagacactggcagtgggtggaccagaccccctacaacgagagcagcaccttctggcaccccagagagcccagcgaccccaacgagagatgcgtggtgctgaacttcagaaagagccccaagagatggggctggaacgacgtgaactgcctgggcccccagagaagcgtgtgcgagatgatgaagatccacctgtag

SEQ ID NO: 258600 - protein, 165 aa, Artificial Sequence
  derived and/or modified sequence
MTSEITYAEVRFKNEFKSSGINTASSAETAWSCCPKNWKSFSSNCYFISTESASWQDSEKDCARMEAHLLVINTQEEQDFIFQNLQEESAYFVGLSDPEGQRHWQWVDQTPYNESSTFWHPREPSDPNERCVVLNFRKSPKRWGWNDVNCLGPQRSVCEMMKIHL

SEQ ID NO: 258601 - DNA, 498 bp, Artificial Sequence
  derived and/or modified sequence
atgactagtgaaattacgtatgctgaggtccggttcaaaaatgaattcaaaagctctggcattaacaccgcatcttctgccgagaccgcgtggtcctgctgccctaagaactggaagtcctttagctctaactgctatttcatatcaactgaaagcgcaagttggcaggactcggagaaggactgtgcacggatggaggctcatttgctggtgatcaacacccaggaagagcaagacttcatctttcagaatctgcaggaggagagcgcgtacttcgttggcctgtccgaccctgaggggcagcgacactggcaatgggtggaccagacgccctataatgaaagttcaacattttggcatcctcgtgagccctctgatcctaatgagcgctgtgtggtgctgaattttagaaaatcccccaaacgatgggggtggaacgacgtaaattgcctgggtcctcagcggtctgtgtgcgaaatgatgaagatccacctctag

SEQ ID NO: 258602 - DNA, 498 bp, Artificial Sequence
  derived and/or modified sequence
atgaccagcgagatcacctacgccgaggtgcgcttcaagaatgagttcaagagcagcggcatcaacacagccagcagcgctgagacagcctggagctgctgccccaagaactggaagagcttcagcagcaactgctacttcatcagcacagagagcgcctcctggcaggacagcgagaaggactgtgccaggatggaggcccacctgctggtgatcaacacccaggaggagcaggacttcatcttccagaacctgcaggaggagagcgcctactttgtgggcctgagtgaccctgagggccagaggcactggcagtgggtggaccagaccccctacaatgaaagcagcaccttctggcacccccgggagcccagcgaccccaatgaaagatgtgtggtgctgaacttcaggaagagccccaagcgctggggctggaatgatgtgaactgcctgggcccccagaggtctgtgtgtgagatgatgaagatccacctgtag

SEQ ID NO: 258603 - DNA, 498 bp, Artificial Sequence
  derived and/or modified sequence
atgaccagcgagatcacctacgccgaggtgcggttcaagaacgagtttaaaagcagcggcattaacaccgcaagcagcgcggagactgcctggtcatgctgtcccaagaactggaagtcgttctcgtctaattgttattttatcagcaccgagtccgcctcttggcaggattctgaaaaggactgcgcgaggatggaggcccacctgctggttattaatacacaggaggagcaagattttatttttcagaacctgcaggaggaatcggcctatttcgtgggactgagcgaccctgaagggcagagacactggcagtgggtcgatcaaactccctataatgagagcagtacattctggcacccccgagagccgagcgatcctaacgagcgctgcgtggtgctgaattttcggaagtcaccaaagcgctggggatggaacgatgtaaactgtctgggcccgcagcgtagtgtttgtgaaatgatgaaaatccatctctag

SEQ ID NO: 258604 - DNA, 498 bp, Artificial Sequence
  derived and/or modified sequence
atgacctccgagattacgtatgcagaggtgcgatttaagaatgaatttaagagtagcgggatcaatacggcttcttcggccgaaacagcctggagctgttgtccaaaaaattggaagtccttctcttcaaactgttacttcatctctaccgaatcagcatcttggcaagactctgaaaaggactgcgccaggatggaggcccacctgttggttatcaacactcaggaggaacaggatttcatattccagaatcttcaagaagagagcgcgtactttgtcggactgagcgacccagaagggcagcgccactggcagtgggtagatcagacaccgtataacgaatcatccaccttttggcacccacgggagccctcggaccccaatgagaggtgcgttgtgctgaattttagaaaatctcctaaacgttggggatggaatgatgtcaactgtctcggcccacagagatccgtatgcgagatgatgaagatccatttgtag

SEQ ID NO: 258605 - DNA, 841 bp, Artificial Sequence
  derived and/or modified sequence
aagaaagcagaagctctcttcccattatgacttcggaaatcacttatgctgaagtgaggttcaaaaatgaattcaagtcctcaggcatcaacacagcctcttctgcagagacagcctggagctgttgcccaaagaattggaagtcatttagttccaactgctactttatttctactgaatcagcatcttggcaagacagtgagaaggactgtgctagaatggaggctcacctgctggtgataaacactcaagaagagcaggatttcatcttccagaatctgcaagaagaatctgcttattttgtggggctctcagatccagaaggtcagcgacattggcaatgggttgatcagacaccatacaatgaaagttccacattctggcatccacgtgagcccagtgatcccaatgagcgctgcgttgtgctaaattttcgtaaatcacccaaaagatggggctggaatgatgttaattgtcttggtcctcaaaggtcagtttgtgagatgatgaagatccacttatgaactgaacattctccatgaacaggtggttggattggtatctgtcattgtagggatagataataagctcttcttattcatgtgtaagggaggtccatagaatttaggtggtctgtcaactattctacttatgagagaattggtctgtacattgactgattcactttttcataaagtgagcatttattgagcattttttcatgtgccagagcctgtactggaggcccccattgtgcacacatggagagaacatgagtctctcttaatttttatctggttgctaaagaattatttaccaataaaattatatgatgtggtgt

SEQ ID NO: 258606 - DNA, 498 bp, Artificial Sequence
  derived and/or modified sequence
atgaccagcgagatcacctacgccgaggtgagattcaagaacgagttcaagagcagcggcatcaacaccgccagcagcgccgagaccgcctggagctgctgccccaagaactggaagagcttcagcagcaactgctacttcatcagcaccgagagcgccagctggcaggacagcgagaaggactgcgccagaatggaggcccacctgctggtgatcaacacccaggaggagcaggacttcatcttccagaacctgcaggaggagagcgcctacttcgtgggcctgagcgaccccgagggccagagacactggcagtgggtggaccagaccccctacaacgagagcagcaccttctggcaccccagagagcccagcgaccccaacgagagatgcgtggtgctgaacttcagaaagagccccaagagatggggctggaacgacgtgaactgcctgggcccccagagaagcgtgtgcgagatgatgaagatccacctgtag

SEQ ID NO: 258607 - protein, 1717 aa, Artificial Sequence
  derived and/or modified sequence
MEPAAAATVQRLPELGREDRASAPAAAAAAAAAAAAAAAALAAAAGGGRSPEPALTPAAPSGGNGSGSGAREEAPGEAPPGPLPGRAGGAGRRRRRGAPQPIAGGAAPVPGAGGGANSLLLRRGRLKRNLSAAAAAASSSSSSSAAAASHSPGAAGLPASCSASASLCTRSLDRKTLLLKHRQTLQLQPSDRDWVRHQLQRGCVHVFDRHMASTYLRPVLCTLDTTAGEVAARLLQLGHKGGGVVKVLGQGPGAAAAREPAEPPPEAGPRLAPPEPRDSEVPPARSAPGAFGGPPRAPPADLPLPVGGPGGWSRRASPAPSDSSPGEPFVGGPVSSPRAPRPVVSDTESFSLSPSAESVSDRLDPYSSGGGSSSSSEELEADAASAPTGVPGQPRRPGHPAQPLPLPQTASSPQPQQKAPRAIDSPGGAVREGSCEEKAAAAVAPGGLQSTPGRSGVTAEKAPPPPPPPTLYVQLHGETTRRLEAEEKPLQIQNDYLFQLGFGELWRVQEEGMDSEIGCLIRFYAGKPHSTGSSERIQLSGMYNVRKGKMQLPVNRWTRRQVILCGTCLIVSSVKDSLTGKMHVLPLIGGKVEEVKKHQHCLAFSSSGPQSQTYYICFDTFTEYLRWLRQVSKVASQRISSVDLSCCSLEHLPANLFYSQDLTHLNLKQNFLRQNPSLPAARGLNELQRFTKLKSLNLSNNHLGDFPLAVCSIPTLAELNVSCNALRSVPAAVGVMHNLQTFLLDGNFLQSLPAELENMKQLSYLGLSFNEFTDIPEVLEKLTAVDKLCMSGNCVETLRLQALRKMPHIKHVDLRLNVIRKLIADEVDFLQHVTQLDLRDNKLGDLDAMIFNNIEVLHCERNQLVTLDICGYFLKALYASSNELVQLDVYPVPNYLSYMDVSRNRLENVPEWVCESRKLEVLDIGHNQICELPARLFCNSSLRKLLAGHNQLARLPERLERTSVEVLDVQHNQLLELPPNLLMKADSLRFLNASANKLESLPPATLSEETNSILQELYLTNNSLTDKCVPLLTGHPHLKILHMAYNRLQSFPASKMAKLEELEEIDLSGNKLKAIPTTIMNCRRMHTVIAHSNCIEVFPEVMQLPEIKCVDLSCNELSEVTLPENLPPKLQELDLTGNPRLVLDHKTLELLNNIRCFKIDQPSTGDASGAPAVWSHGYTEASGVKNKLCVAALSVNNFCDNREALYGVFDGDRNVEVPYLLQCTMSDILAEELQKTKNEEEYMVNTFIVMQRKLGTAGQKLGGAAVLCHIKHDPVDPGGSFTLTSANVGKCQTVLCRNGKPLPLSRSYIMSCEEELKRIKQHKAIITEDGKVNGVTESTRILGYTFLHPSVVPRPHVQSVLLTPQDEFFILGSKGLWDSLSVEEAVEAVRNVPDALAAAKKLCTLAQSYGCHDSISAVVVQLSVTEDSFCCCELSAGGAVPPPSPGIFPPSVNMVIKDRPSDGLGVPSSSSGMASEISSELSTSEMSSEVGSTASDEPPPGALSENSPAYPSEQRCMLHPICLSNSFQRQLSSATFSSAFSDNGLDSDDEEPIEGVFTNGSRVEVEVDIHCSRAKEKEKQQHLLQVPAEASDEGIVISANEDEPGLPRKADFSAVGTIGRRRANGSVAPQERSHNVIEVATDAPLRKPGGYFAAPAQPDPDDQFIIPPELEEEVKEIMKHHQEQQQQQQPPPPPQLQPQLPRHYQLDQLPDYYDTPL

SEQ ID NO: 258608 - protein, 1205 aa, Artificial Sequence
  derived and/or modified sequence
MDSEIGCLIRFYAGKPHSTGSSERIQLSGMYNVRKGKMQLPVNRWTRRQVILCGTCLIVSSVKDSLTGKMHVLPLIGGKVEEVKKHQHCLAFSSSGPQSQTYYICFDTFTEYLRWLRQVSKVASQRISSVDLSCCSLEHLPANLFYSQDLTHLNLKQNFLRQNPSLPAARGLNELQRFTKLKSLNLSNNHLGDFPLAVCSIPTLAELNVSCNALRSVPAAVGVMHNLQTFLLDGNFLQSLPAELENMKQLSYLGLSFNEFTDIPEVLEKLTAVDKLCMSGNCVETLRLQALRKMPHIKHVDLRLNVIRKLIADEVDFLQHVTQLDLRDNKLGDLDAMIFNNIEVLHCERNQLVTLDICGYFLKALYASSNELVQLDVYPVPNYLSYMDVSRNRLENVPEWVCESRKLEVLDIGHNQICELPARLFCNSSLRKLLAGHNQLARLPERLERTSVEVLDVQHNQLLELPPNLLMKADSLRFLNASANKLESLPPATLSEETNSILQELYLTNNSLTDKCVPLLTGHPHLKILHMAYNRLQSFPASKMAKLEELEEIDLSGNKLKAIPTTIMNCRRMHTVIAHSNCIEVFPEVMQLPEIKCVDLSCNELSEVTLPENLPPKLQELDLTGNPRLVLDHKTLELLNNIRCFKIDQPSTGDASGAPAVWSHGYTEASGVKNKLCVAALSVNNFCDNREALYGVFDGDRNVEVPYLLQCTMSDILAEELQKTKNEEEYMVNTFIVMQRKLGTAGQKLGGAAVLCHIKHDPVDPGGSFTLTSANVGKCQTVLCRNGKPLPLSRSYIMSCEEELKRIKQHKAIITEDGKVNGVTESTRILGYTFLHPSVVPRPHVQSVLLTPQDEFFILGSKGLWDSLSVEEAVEAVRNVPDALAAAKKLCTLAQSYGCHDSISAVVVQLSVTEDSFCCCELSAGGAVPPPSPGIFPPSVNMVIKDRPSDGLGVPSSSSGMASEISSELSTSEMSSEVGSTASDEPPPGALSENSPAYPSEQRCMLHPICLSNSFQRQLSSATFSSAFSDNGLDSDDEEPIEGVFTNGSRVEVEVDIHCSRAKEKEKQQHLLQVPAEASDEGIVISANEDEPGLPRKADFSAVGTIGRRRANGSVAPQERSHNVIEVATDAPLRKPGGYFAAPAQPDPDDQFIIPPELEEEVKEIMKHHQEQQQQQQPPPPPQLQPQLPRHYQLDQLPDYYDTPL

SEQ ID NO: 258609 - DNA, 5154 bp, Artificial Sequence
  derived and/or modified sequence
atggagcccgccgccgccgccaccgtgcagagactgcccgagctgggcagagaggacagagccagcgcccccgccgccgccgccgccgccgccgccgccgccgccgccgccgccgccgccctggccgccgccgccggcggcggcagaagccccgagcccgccctgacccccgccgcccccagcggcggcaacggcagcggcagcggcgccagagaggaggcccccggcgaggccccccccggccccctgcccggcagagccggcggcgccggcagaagaagaagaagaggcgccccccagcccatcgccggcggcgccgcccccgtgcccggcgccggcggcggcgccaacagcctgctgctgagaagaggcagactgaagagaaacctgagcgccgccgccgccgccgccagcagcagcagcagcagcagcgccgccgccgccagccacagccccggcgccgccggcctgcccgccagctgcagcgccagcgccagcctgtgcaccagaagcctggacagaaagaccctgctgctgaagcacagacagaccctgcagctgcagcccagcgacagagactgggtgagacaccagctgcagagaggctgcgtgcacgtgttcgacagacacatggccagcacctacctgagacccgtgctgtgcaccctggacaccaccgccggcgaggtggccgccagactgctgcagctgggccacaagggcggcggcgtggtgaaggtgctgggccagggccccggcgccgccgccgccagagagcccgccgagcccccccccgaggccggccccagactggccccccccgagcccagagacagcgaggtgccccccgccagaagcgcccccggcgccttcggcggcccccccagagccccccccgccgacctgcccctgcccgtgggcggccccggcggctggagcagaagagccagccccgcccccagcgacagcagccccggcgagcccttcgtgggcggccccgtgagcagccccagagcccccagacccgtggtgagcgacaccgagagcttcagcctgagccccagcgccgagagcgtgagcgacagactggacccctacagcagcggcggcggcagcagcagcagcagcgaggagctggaggccgacgccgccagcgcccccaccggcgtgcccggccagcccagaagacccggccaccccgcccagcccctgcccctgccccagaccgccagcagcccccagccccagcagaaggcccccagagccatcgacagccccggcggcgccgtgagagagggcagctgcgaggagaaggccgccgccgccgtggcccccggcggcctgcagagcacccccggcagaagcggcgtgaccgccgagaaggcccccccccccccccccccccccaccctgtacgtgcagctgcacggcgagaccaccagaagactggaggccgaggagaagcccctgcagatccagaacgactacctgttccagctgggcttcggcgagctgtggagagtgcaggaggagggcatggacagcgagatcggctgcctgatcagattctacgccggcaagccccacagcaccggcagcagcgagagaatccagctgagcggcatgtacaacgtgagaaagggcaagatgcagctgcccgtgaacagatggaccagaagacaggtgatcctgtgcggcacctgcctgatcgtgagcagcgtgaaggacagcctgaccggcaagatgcacgtgctgcccctgatcggcggcaaggtggaggaggtgaagaagcaccagcactgcctggccttcagcagcagcggcccccagagccagacctactacatctgcttcgacaccttcaccgagtacctgagatggctgagacaggtgagcaaggtggccagccagagaatcagcagcgtggacctgagctgctgcagcctggagcacctgcccgccaacctgttctacagccaggacctgacccacctgaacctgaagcagaacttcctgagacagaaccccagcctgcccgccgccagaggcctgaacgagctgcagagattcaccaagctgaagagcctgaacctgagcaacaaccacctgggcgacttccccctggccgtgtgcagcatccccaccctggccgagctgaacgtgagctgcaacgccctgagaagcgtgcccgccgccgtgggcgtgatgcacaacctgcagaccttcctgctggacggcaacttcctgcagagcctgcccgccgagctggagaacatgaagcagctgagctacctgggcctgagcttcaacgagttcaccgacatccccgaggtgctggagaagctgaccgccgtggacaagctgtgcatgagcggcaactgcgtggagaccctgagactgcaggccctgagaaagatgccccacatcaagcacgtggacctgagactgaacgtgatcagaaagctgatcgccgacgaggtggacttcctgcagcacgtgacccagctggacctgagagacaacaagctgggcgacctggacgccatgatcttcaacaacatcgaggtgctgcactgcgagagaaaccagctggtgaccctggacatctgcggctacttcctgaaggccctgtacgccagcagcaacgagctggtgcagctggacgtgtaccccgtgcccaactacctgagctacatggacgtgagcagaaacagactggagaacgtgcccgagtgggtgtgcgagagcagaaagctggaggtgctggacatcggccacaaccagatctgcgagctgcccgccagactgttctgcaacagcagcctgagaaagctgctggccggccacaaccagctggccagactgcccgagagactggagagaaccagcgtggaggtgctggacgtgcagcacaaccagctgctggagctgccccccaacctgctgatgaaggccgacagcctgagattcctgaacgccagcgccaacaagctggagagcctgccccccgccaccctgagcgaggagaccaacagcatcctgcaggagctgtacctgaccaacaacagcctgaccgacaagtgcgtgcccctgctgaccggccacccccacctgaagatcctgcacatggcctacaacagactgcagagcttccccgccagcaagatggccaagctggaggagctggaggagatcgacctgagcggcaacaagctgaaggccatccccaccaccatcatgaactgcagaagaatgcacaccgtgatcgcccacagcaactgcatcgaggtgttccccgaggtgatgcagctgcccgagatcaagtgcgtggacctgagctgcaacgagctgagcgaggtgaccctgcccgagaacctgccccccaagctgcaggagctggacctgaccggcaaccccagactggtgctggaccacaagaccctggagctgctgaacaacatcagatgcttcaagatcgaccagcccagcaccggcgacgccagcggcgcccccgccgtgtggagccacggctacaccgaggccagcggcgtgaagaacaagctgtgcgtggccgccctgagcgtgaacaacttctgcgacaacagagaggccctgtacggcgtgttcgacggcgacagaaacgtggaggtgccctacctgctgcagtgcaccatgagcgacatcctggccgaggagctgcagaagaccaagaacgaggaggagtacatggtgaacaccttcatcgtgatgcagagaaagctgggcaccgccggccagaagctgggcggcgccgccgtgctgtgccacatcaagcacgaccccgtggaccccggcggcagcttcaccctgaccagcgccaacgtgggcaagtgccagaccgtgctgtgcagaaacggcaagcccctgcccctgagcagaagctacatcatgagctgcgaggaggagctgaagagaatcaagcagcacaaggccatcatcaccgaggacggcaaggtgaacggcgtgaccgagagcaccagaatcctgggctacaccttcctgcaccccagcgtggtgcccagaccccacgtgcagagcgtgctgctgaccccccaggacgagttcttcatcctgggcagcaagggcctgtgggacagcctgagcgtggaggaggccgtggaggccgtgagaaacgtgcccgacgccctggccgccgccaagaagctgtgcaccctggcccagagctacggctgccacgacagcatcagcgccgtggtggtgcagctgagcgtgaccgaggacagcttctgctgctgcgagctgagcgccggcggcgccgtgcccccccccagccccggcatcttcccccccagcgtgaacatggtgatcaaggacagacccagcgacggcctgggcgtgcccagcagcagcagcggcatggccagcgagatcagcagcgagctgagcaccagcgagatgagcagcgaggtgggcagcaccgccagcgacgagcccccccccggcgccctgagcgagaacagccccgcctaccccagcgagcagagatgcatgctgcaccccatctgcctgagcaacagcttccagagacagctgagcagcgccaccttcagcagcgccttcagcgacaacggcctggacagcgacgacgaggagcccatcgagggcgtgttcaccaacggcagcagagtggaggtggaggtggacatccactgcagcagagccaaggagaaggagaagcagcagcacctgctgcaggtgcccgccgaggccagcgacgagggcatcgtgatcagcgccaacgaggacgagcccggcctgcccagaaaggccgacttcagcgccgtgggcaccatcggcagaagaagagccaacggcagcgtggccccccaggagagaagccacaacgtgatcgaggtggccaccgacgcccccctgagaaagcccggcggctacttcgccgcccccgcccagcccgaccccgacgaccagttcatcatcccccccgagctggaggaggaggtgaaggagatcatgaagcaccaccaggagcagcagcagcagcagcagccccccccccccccccagctgcagccccagctgcccagacactaccagctggaccagctgcccgactactacgacacccccctgtag

SEQ ID NO: 258610 - DNA, 3618 bp, Artificial Sequence
  derived and/or modified sequence
atggacagcgagatcggctgcctgatcagattctacgccggcaagccccacagcaccggcagcagcgagagaatccagctgagcggcatgtacaacgtgagaaagggcaagatgcagctgcccgtgaacagatggaccagaagacaggtgatcctgtgcggcacctgcctgatcgtgagcagcgtgaaggacagcctgaccggcaagatgcacgtgctgcccctgatcggcggcaaggtggaggaggtgaagaagcaccagcactgcctggccttcagcagcagcggcccccagagccagacctactacatctgcttcgacaccttcaccgagtacctgagatggctgagacaggtgagcaaggtggccagccagagaatcagcagcgtggacctgagctgctgcagcctggagcacctgcccgccaacctgttctacagccaggacctgacccacctgaacctgaagcagaacttcctgagacagaaccccagcctgcccgccgccagaggcctgaacgagctgcagagattcaccaagctgaagagcctgaacctgagcaacaaccacctgggcgacttccccctggccgtgtgcagcatccccaccctggccgagctgaacgtgagctgcaacgccctgagaagcgtgcccgccgccgtgggcgtgatgcacaacctgcagaccttcctgctggacggcaacttcctgcagagcctgcccgccgagctggagaacatgaagcagctgagctacctgggcctgagcttcaacgagttcaccgacatccccgaggtgctggagaagctgaccgccgtggacaagctgtgcatgagcggcaactgcgtggagaccctgagactgcaggccctgagaaagatgccccacatcaagcacgtggacctgagactgaacgtgatcagaaagctgatcgccgacgaggtggacttcctgcagcacgtgacccagctggacctgagagacaacaagctgggcgacctggacgccatgatcttcaacaacatcgaggtgctgcactgcgagagaaaccagctggtgaccctggacatctgcggctacttcctgaaggccctgtacgccagcagcaacgagctggtgcagctggacgtgtaccccgtgcccaactacctgagctacatggacgtgagcagaaacagactggagaacgtgcccgagtgggtgtgcgagagcagaaagctggaggtgctggacatcggccacaaccagatctgcgagctgcccgccagactgttctgcaacagcagcctgagaaagctgctggccggccacaaccagctggccagactgcccgagagactggagagaaccagcgtggaggtgctggacgtgcagcacaaccagctgctggagctgccccccaacctgctgatgaaggccgacagcctgagattcctgaacgccagcgccaacaagctggagagcctgccccccgccaccctgagcgaggagaccaacagcatcctgcaggagctgtacctgaccaacaacagcctgaccgacaagtgcgtgcccctgctgaccggccacccccacctgaagatcctgcacatggcctacaacagactgcagagcttccccgccagcaagatggccaagctggaggagctggaggagatcgacctgagcggcaacaagctgaaggccatccccaccaccatcatgaactgcagaagaatgcacaccgtgatcgcccacagcaactgcatcgaggtgttccccgaggtgatgcagctgcccgagatcaagtgcgtggacctgagctgcaacgagctgagcgaggtgaccctgcccgagaacctgccccccaagctgcaggagctggacctgaccggcaaccccagactggtgctggaccacaagaccctggagctgctgaacaacatcagatgcttcaagatcgaccagcccagcaccggcgacgccagcggcgcccccgccgtgtggagccacggctacaccgaggccagcggcgtgaagaacaagctgtgcgtggccgccctgagcgtgaacaacttctgcgacaacagagaggccctgtacggcgtgttcgacggcgacagaaacgtggaggtgccctacctgctgcagtgcaccatgagcgacatcctggccgaggagctgcagaagaccaagaacgaggaggagtacatggtgaacaccttcatcgtgatgcagagaaagctgggcaccgccggccagaagctgggcggcgccgccgtgctgtgccacatcaagcacgaccccgtggaccccggcggcagcttcaccctgaccagcgccaacgtgggcaagtgccagaccgtgctgtgcagaaacggcaagcccctgcccctgagcagaagctacatcatgagctgcgaggaggagctgaagagaatcaagcagcacaaggccatcatcaccgaggacggcaaggtgaacggcgtgaccgagagcaccagaatcctgggctacaccttcctgcaccccagcgtggtgcccagaccccacgtgcagagcgtgctgctgaccccccaggacgagttcttcatcctgggcagcaagggcctgtgggacagcctgagcgtggaggaggccgtggaggccgtgagaaacgtgcccgacgccctggccgccgccaagaagctgtgcaccctggcccagagctacggctgccacgacagcatcagcgccgtggtggtgcagctgagcgtgaccgaggacagcttctgctgctgcgagctgagcgccggcggcgccgtgcccccccccagccccggcatcttcccccccagcgtgaacatggtgatcaaggacagacccagcgacggcctgggcgtgcccagcagcagcagcggcatggccagcgagatcagcagcgagctgagcaccagcgagatgagcagcgaggtgggcagcaccgccagcgacgagcccccccccggcgccctgagcgagaacagccccgcctaccccagcgagcagagatgcatgctgcaccccatctgcctgagcaacagcttccagagacagctgagcagcgccaccttcagcagcgccttcagcgacaacggcctggacagcgacgacgaggagcccatcgagggcgtgttcaccaacggcagcagagtggaggtggaggtggacatccactgcagcagagccaaggagaaggagaagcagcagcacctgctgcaggtgcccgccgaggccagcgacgagggcatcgtgatcagcgccaacgaggacgagcccggcctgcccagaaaggccgacttcagcgccgtgggcaccatcggcagaagaagagccaacggcagcgtggccccccaggagagaagccacaacgtgatcgaggtggccaccgacgcccccctgagaaagcccggcggctacttcgccgcccccgcccagcccgaccccgacgaccagttcatcatcccccccgagctggaggaggaggtgaaggagatcatgaagcaccaccaggagcagcagcagcagcagcagccccccccccccccccagctgcagccccagctgcccagacactaccagctggaccagctgcccgactactacgacacccccctgtag

SEQ ID NO: 258611 - DNA, 5154 bp, Artificial Sequence
  derived and/or modified sequence
atggaacctgccgctgccgcaaccgtacagcggcttccagagttaggacgcgaagacagagcctctgcccctgcagccgccgccgccgcagcagctgctgcagccgcagctgccgcggcacttgccgcggcggcgggaggaggtcggtcccctgaacccgccctgacacctgccgccccatccggcggcaacggctcagggtctggggctcgcgaagaggcccctggagaggcacctcccggacccctcccagggagggccggaggcgcagggcgtaggaggcgacgcggcgcccctcagcccatcgccggcggagcagcaccagtgcccggtgcaggaggtggcgccaattcactgctcctcaggcgaggtcgcctgaagcgcaacctaagcgctgccgccgctgcagcttcctcctcttcttccagctctgccgccgccgcttcacactctcccggagcagccggccttcctgccagctgcagcgcatcagcctcactgtgtacgcggtctctggaccgtaagaccttgcttctgaaacataggcagactctacaacttcagccaagtgaccgtgactgggttcggcatcagctgcagaggggctgtgtgcacgtctttgatagacacatggccagtacttacctgcgaccggtgctgtgcactctggatactaccgctggagaagtggccgccagactactgcagctagggcacaaagggggtggcgtggtgaaggtccttgggcaggggcccggcgccgcagcggcgcgggaaccagctgagccaccgccggaagcgggcccaagactggcccccccagagcccagagatagtgaggtgcctcccgcgcgctctgcaccaggcgcatttggcgggcctcctcgcgccccgcccgctgatctccctctcccggtgggtgggcctgggggatggagtcgcagggcatcacccgctcctagtgatagcagccctggagaacccttcgtgggggggccagtctcaagcccaagagctcctaggcccgtggtttccgatacagagagctttagcctaagcccaagcgctgagagtgtgagtgatcggctggatccctattcctcaggtggcggatcgtctagctctagcgaagagctggaagcagacgccgcctccgcccctactggagtaccgggtcagcctcggcgcccaggtcacccggctcagcctctacctctcccacagaccgctagctcaccccagccccaacagaaagcgcccagagcaattgactctccaggcggggccgttcgagaagggtcatgcgaagaaaaagcggcggctgctgtcgcacctgggggtctgcagtccacaccaggacgctctggtgtaaccgccgagaaagcccccccgcctccaccacctccaacgctgtacgtgcagctgcacggggagactaccagaagactagaggcagaagaaaagccactccagattcagaatgactacctctttcagttaggatttggtgagctatggcgggtacaggaagaaggcatggatagcgagattggatgcctgattcgcttttacgccggcaagcctcactctacaggaagttccgagcgcatacaactttcgggaatgtataacgtccgtaagggtaaaatgcagctccccgtcaatcgctggactcgcagacaagttattctgtgcggaacctgtcttatagtaagctccgtgaaagattctctcaccggcaaaatgcatgtgctccctctcattggggggaaagtggaagaggtcaagaagcaccagcactgtttggcctttagctcttccgggcctcaaagtcagacatattatatctgctttgacacatttacagaatatttacgctggctgaggcaggtgagcaaggtggcttcccagagaatctctagcgtcgacctaagctgctgttcactggaacacctgccggcaaacctattctatagtcaggatttgacgcacctgaacctgaaacagaattttctgcgtcagaacccttccctccccgcagcaaggggactaaatgaactgcagcggtttaccaagttgaaatcactgaatttgagcaacaatcacttgggggacttccccttagcggtctgctccattccgacacttgcggaacttaatgtgagctgcaatgcactgcgtagtgtgcccgccgccgttggagtgatgcacaaccttcagacttttctgctcgacggtaattttttacagtctttgcctgctgagctcgagaacatgaaacaacttagctacctcgggttgtctttcaacgaatttaccgatattcctgaagtgttagagaagctcaccgccgtggacaagctgtgcatgtctggaaattgtgtcgaaacactgcgcctacaggccctcagaaaaatgcctcatatcaaacacgtcgacctccgtttgaatgtgatccggaaactgattgccgatgaagtggattttctgcagcacgtaactcaacttgacctccgagacaataaactaggtgatcttgacgccatgatttttaataacatcgaggtgctccactgcgagcgcaaccagctggtgacccttgatatttgcggttattttctgaaagcgctgtatgcatcatcaaacgaactggtgcagcttgacgtgtaccctgtgcccaattatctcagctatatggatgtcagtaggaaccgactggaaaatgtgccagagtgggtgtgcgaatccagaaagctggaagttcttgatattggccacaatcagatctgcgaacttccggcacggctgttctgtaattcctccttgaggaagcttttagctggtcataatcagctggctagactgccggagcgcttggagcggacttccgtcgaggtgcttgacgttcagcataaccaattgctagagctgcctcccaatttattgatgaaagcagacagcctccgtttcctcaacgcctctgcaaataaactggagtcactcccaccggctacactcagcgaggaaaccaattccatcctccaggagttatatttaaccaataactccttgaccgataaatgcgtgccgctgcttacagggcatccacacctgaaaatcctccatatggcctacaataggctgcagtcttttcctgcgtccaaaatggccaaactggaggagctggaggagattgacctctccggcaataagctcaaggctatcccgaccacgattatgaattgccgacgaatgcacaccgtaattgcgcactctaattgtattgaggtattcccagaggtcatgcagctccccgaaatcaaatgtgtagacctatcatgcaacgaactttctgaggtgactctgccagagaatctgccccctaaactgcaggaattagatctgaccggaaatccacgactagttcttgaccacaaaactctagaactactcaacaacattcgctgctttaaaatcgaccagcctagtacaggcgatgcctccggggcccccgcagtctggagtcatggctacaccgaggcttcaggggtcaaaaacaaactgtgcgtcgccgccctgagcgtgaataacttttgcgataatagagaggcgttgtacggagtgtttgacggtgatagaaatgtagaggtgccttacctgctccagtgtactatgagtgacatcctagctgaagagctccagaaaaccaagaacgaggaagagtacatggtgaatacatttatcgtcatgcagcggaaactaggcaccgcaggtcagaaactaggtggtgcagctgtcttatgtcatatcaagcacgatcctgttgatccaggcggttcatttaccctgacatccgccaacgtgggtaagtgtcaaacagtgttgtgccgaaatggaaagcccctgcccttgtctcgcagttatataatgtcctgtgaggaagaactgaaacgcatcaaacagcataaggccatcatcacagaggacgggaaggtaaacggcgttacagaaagcacccggatcctcggctataccttcctgcatccatctgtggtgcccagaccacacgtgcagtccgtgcttttaactccacaggacgaatttttcatcctgggttccaagggcctttgggacagcctgtccgtcgaggaagcagtggaggcagtccgcaacgtaccagatgcactggctgcagccaaaaaactgtgtaccctggcacagagctatggatgtcacgacagcatcagtgctgtggttgtccagctgtctgtgacggaagatagcttttgctgctgcgaactttctgccgggggcgcagtccctcccccatctcccgggattttcccaccaagcgttaatatggttattaaggacaggccaagcgacgggttgggtgttccaagctcatcaagtggaatggctagcgagatcagttctgagttaagtacctctgagatgtcgtccgaagtggggagcacagcatccgatgaacctcctcctggtgcactgagcgaaaacagccccgcctacccttccgaacagcgatgtatgctgcaccccatatgcctgagcaacagcttccagaggcagttaagctccgccactttttccagtgcgttctccgataatgggttggatagcgacgatgaagagcctattgagggggtctttacaaacggatctcgagtagaggtcgaagttgacattcactgtagtagggctaaggagaaggagaagcaacagcatctactgcaagttcccgccgaagcttcagacgaaggcattgtaatttccgccaacgaagacgagcccggactgcctcggaaggcagatttcagcgcggtcggcactattggcaggaggagagcgaatggcagtgtggccccccaggagaggtcccataatgtcatagaggtagccacggacgccccattgcgaaaacccggcggttactttgcggccccagcccagcccgacccagacgatcagttcatcatcccccctgaactcgaggaggaggtgaaagagataatgaagcaccatcaggagcagcagcagcagcaacagccaccaccacccccacagttacagcctcaattacctcgccactatcagctggatcagctgcctgactattacgacaccccactttag

SEQ ID NO: 258612 - DNA, 3618 bp, Artificial Sequence
  derived and/or modified sequence
atggattcagaaatcggctgtttaattagattttacgctggtaagccccactctacaggtagtagcgagcggatccaactttccggcatgtacaacgtacgaaagggcaaaatgcagttgccagttaataggtggacccgtaggcaggttatcttgtgcggcacgtgcttgatcgtgtcgtccgtgaaggactccctgactggaaaaatgcacgtgctgccactaatcggcgggaaggtggaggaagtgaaaaaacaccaacactgtctcgcgttctctagttcaggtccccagagccagacatattacatttgttttgacacatttacagagtatctacgctggctgaggcaggttagcaaagtagcctcacagaggattagcagcgtcgatctgtcctgttgcagcctagagcatctaccggctaatctgttttacagccaggaccttacccatttgaatctgaagcaaaacttcttaaggcagaacccttcccttcccgccgcgcgcgggttaaatgaactgcagcggttcactaaactgaaaagcctgaacttaagcaataatcacctgggggatttccctttagccgtatgtagcatccccactctggccgaactgaacgtgagctgcaatgctctaagatcagtgcccgcagcggtgggagtgatgcataacctgcagacattcttactggacgggaatttcttacagtcattgccggctgaattggagaatatgaaacaattgtcctacctcggcttgagctttaacgagtttacagacatcccagaggtgctggagaaactcaccgccgtagacaagctgtgcatgagcgggaattgcgttgagaccttgagactccaagcactcaggaagatgccccatatcaagcatgtcgatctccggctcaacgtcatacgcaaactaattgcagacgaagtggatttcttacagcacgttacacaactggacctgcgagataataagttgggcgacctggacgcaatgatcttcaacaatatcgaggtgctccactgtgagcgaaaccagttggtgactcttgatatatgcggatactttctaaaggcgctctatgcctcctctaatgagctagtccagctggatgtctacccagtaccaaattatttgtcctacatggacgtttcccggaaccggctggaaaacgtgcccgagtgggtgtgtgaatcccgcaagctggaggttttagatatcggacacaatcagatctgcgagctgccagcccggctgttttgcaactcatcactgagaaagctgctggccggacacaatcagctggcccggctgccagaaagattagagcgcacatcggtggaggtgttagacgtgcagcacaaccaactgctcgaactacctcccaatcttcttatgaaagccgattccctgcggttcttgaacgcaagcgctaataagctggagtccctcccccctgccacactgtccgaggaaacgaactcaattctgcaggaactttaccttaccaataactccctcactgataaatgcgtgccacttctgaccggacatccccacttaaaaatcctccacatggcctacaatagactccagtcgtttcccgcaagcaaaatggccaaactggaggagttagaggagattgacctgagcggaaacaaactgaaagccattccaacaaccattatgaactgcagaaggatgcatacagtgattgcgcactccaactgtatcgaggtcttcccagaggtaatgcagttgcctgagataaagtgcgtggacctgtcctgcaatgagttatctgaggtcacactgcctgaaaatttaccacctaaactgcaggagcttgacctgactggaaatcctagattagtgcttgaccataagacgctcgagctgttgaataacattcgttgcttcaagattgatcagccctcaacgggggacgcgagcggggcccccgctgtgtggtcccacggctacaccgaagctagcggtgtcaagaataaattgtgtgttgccgctctctccgttaataatttttgtgataatcgggaggcactgtacggtgtcttcgacggggaccgtaacgtggaagtcccatacctgctacaatgtaccatgagtgatatcctcgccgaggagcttcagaaaacgaagaatgaagaagagtacatggtcaatacctttattgtcatgcagcggaagcttggcaccgccggacagaagcttgggggcgctgctgtattatgtcacattaagcacgaccccgtagatccagggggttcattcacgctgacctctgcaaatgtcggcaaatgtcagacagttctgtgtcgtaatggcaaacccctgcccctgagccgcagttacatcatgagctgtgaagaggaactgaagcgaatcaagcaacacaaggctattatcacagaagacgggaaagtgaatggggttacagaaagtaccaggatacttggatacacatttttacatccaagcgtggtgcctaggccccatgtgcagtcggttctgctgacccctcaggatgagttcttcatactcggcagtaaaggcctctgggatagtctctccgtggaagaggccgtggaggcagtccggaatgttcccgatgcactcgctgcagccaaaaagctttgcactctggcgcaaagctatggctgtcatgactctatcagtgctgtggttgttcaactctcagtgactgaggacagcttttgttgctgcgaactatcggccggcggtgctgtacccccccccagtccagggatcttcccaccatcagtaaacatggttatcaaggatcggccctctgatggtctgggggtgccctcttcaagtagcggcatggcgagcgagatctcctctgagctgtcaacaagtgagatgtcctccgaagtgggatctaccgcaagcgatgagccgccacctggggccctttcagaaaattctcctgcatacccctcagaacagcgatgtatgctgcaccccatctgcctcagcaatagttttcaacgacagctttctagcgccacctttagttcagctttcagcgataacggactcgactctgacgatgaagagcctattgagggcgtgttcaccaacggctcgcgagtcgaggttgaggtggacatccattgcagtcgcgctaaggagaaggaaaagcaacaacatctcctccaggtacctgccgaggcatctgatgaaggcatagttatttccgctaatgaagacgagccaggcttgccacgcaaggccgattttagtgcagtgggcacaatcggacgccggcgggccaacggtagcgtagccccccaggaacggtcgcataatgtgattgaagtagcaaccgacgctcctctgagaaagcctggcggatactttgccgccccggcgcagcctgatccagatgaccagtttattattcctcccgaactggaggaggaagtgaaagagattatgaagcatcatcaggagcaacagcagcagcagcagcctccaccacctccgcaattgcaaccgcaactaccaagacactaccagttggaccagctaccagattactacgatacccccctatag

SEQ ID NO: 258613 - DNA, 5154 bp, Artificial Sequence
  derived and/or modified sequence
atggagcctgctgctgctgccaccgtgcagaggctgcctgagctgggccgggaggaccgggccagcgccccagctgctgctgctgctgctgctgctgctgctgctgctgctgctgctgccctggccgctgctgctgggggcggccgcagccctgagcccgccctgaccccagctgcccccagcggcggcaatggcagcggcagcggggcccgggaggaggcccctggagaggcccctcctggccccctgcccggccgggccggcggggccggcagaagaagaagaagaggagccccccagcccatcgccggcggggccgcccctgtgcctggggccggcggcggggccaacagcctgctgctgcggcggggccgcctgaagaggaacctgtctgctgctgctgctgctgccagcagcagcagcagcagcagcgctgctgctgccagccacagccctggagctgctggcctgcctgccagctgcagcgccagcgccagcctgtgcaccaggagcctggacaggaagaccctgctgctgaagcaccggcagaccctgcagctgcagcccagcgaccgggactgggtgcgccaccagctgcagaggggctgtgtgcacgtgtttgacagacacatggccagcacctacctgcggcctgtgctgtgcaccctggacaccacagctggggaggtggccgcccggctgctgcagctgggccacaagggcggcggcgtggtgaaggtgctgggccagggccctggagctgctgctgcccgggagcctgctgagcccccacctgaggccggcccccggctggcccctcctgagccccgggacagcgaggtgcccccagcccggagcgcccctggggcctttggaggccccccccgggcccccccagctgacctgcccctgcctgtgggcggccctgggggctggagccggcgggccagccctgcccccagcgacagcagccctggagagccctttgtgggcggccctgtgagcagcccccgggcccccaggcctgtggtgtctgacacagagagcttcagcctgagccccagcgctgagagcgtgtctgaccggctggacccctacagcagcggcggcggcagcagcagcagcagcgaggagctggaggctgatgctgccagcgcccccaccggggtgcccggccagcccaggaggcctggccacccagcccagcccctgcccctgccccagacagccagcagcccccagccccagcagaaggccccccgggccatcgacagccctgggggcgctgtgcgggagggcagctgtgaggagaaggctgctgctgctgtggcccctgggggcctgcagagcaccccaggccgctctggagtgacagctgagaaggcccctcctcctcctcctccacccaccctgtatgtgcagctgcacggggagaccacccggcggctggaggccgaggagaagcccctgcagatccagaatgactacctgttccagctgggctttggagagctgtggagggtgcaggaggagggcatggattctgaaattggctgcctgatccgcttctacgccggcaagccccacagcacaggcagcagcgagcgcatccagctgagcggcatgtacaacgtgaggaagggcaagatgcagctgcctgtgaaccgctggacccggcggcaggtgatcctgtgtggcacctgcctgattgtgtcctctgtgaaggacagcctgaccgggaagatgcacgtgctgcccctcatcggcggcaaggtggaggaggtgaagaagcaccagcactgcctggccttcagcagcagcggcccccagagccagacctactacatctgctttgacaccttcacagagtacctgcgctggctgcggcaggtgtccaaggtggccagccagaggatcagctctgtggacctgagctgctgcagcctggagcacctgcctgccaacctcttctacagccaggacctgacccacctgaacctgaagcagaacttcctgcggcagaaccccagcctgcctgctgcccggggcctgaatgagctgcagcgcttcaccaagctgaagagcctgaacctgagcaacaaccacctgggggacttccccctggccgtgtgcagcatccccaccctggccgagctgaatgtgtcctgcaatgccctgcggtctgtgcctgctgctgtgggcgtgatgcacaacctgcagaccttcctgctggatggcaacttcctgcagagcctgcctgctgagctggagaacatgaagcagctgagctacctgggcctgtccttcaatgagttcacagacatccctgaggtgctggagaagctgacagctgtggacaagctgtgcatgagcggcaactgtgtggagaccctgcggctgcaggccctgaggaagatgccccacatcaagcacgtggacctgcggctgaatgtcatcaggaagctgattgctgatgaggtggacttcctgcagcacgtgacccagctggacctgcgggacaacaagctgggggacctggatgccatgatcttcaacaacatcgaggtgctgcactgtgaaagaaaccagctggtgaccctggacatctgtggctacttcctgaaggccctgtatgccagcagcaatgagctggtgcagctggatgtgtaccctgtgcccaactacctgagctacatggatgtgtccaggaaccggctggagaatgtgcctgagtgggtgtgtgagagcaggaagctggaggtgctggacatcggccacaaccagatctgtgagctgcctgcccggctcttctgcaacagcagcctgaggaagctgctggccggccacaaccagctggcccggctgcctgagcggctggagaggacctctgtggaggtgctggatgtgcagcacaaccagctgctggagctgccccccaacctgctgatgaaggctgacagcctgcgcttcctgaatgccagcgccaacaagctggagagcctgcccccagccaccctgtctgaggagaccaacagcatcctgcaggagctgtacctgaccaacaacagcctgacagacaagtgtgtgcccctgctgaccggccacccccacctgaagatcctgcacatggcctacaaccggctgcagagcttccctgccagcaagatggccaagctggaggagctggaggagattgacctgagcggcaacaagctgaaggccatccccaccaccatcatgaactgcaggaggatgcacacagtgattgcccacagcaactgcatcgaggtgtttcctgaggtgatgcagctgcctgagatcaagtgtgtggacctgagctgcaatgagctgtctgaggtgaccctgcctgagaacctgccccccaagctgcaggagctggacctgaccggcaacccccggctggtgctggaccacaagaccctggagctgctgaacaacatccgctgcttcaagattgaccagcccagcactggagatgccagcggggccccagctgtgtggagccacggctacacagaggccagcggcgtgaagaacaagctgtgtgtggccgccctgtctgtgaacaacttctgtgacaaccgggaggccctgtatggagtgtttgatggagacagaaatgtggaggtgccctacctgctgcagtgcaccatgtctgacatcctggccgaggagctgcagaagaccaagaatgaggaggagtacatggtgaacaccttcatcgtgatgcagaggaagctgggcacagctggccagaagctgggcggcgctgctgtgctgtgccacatcaagcatgaccctgtggaccccggcggcagcttcaccctgaccagcgccaacgtgggcaagtgccagacagtgctgtgcagaaatggcaagcccctgcccctgagccgcagctacatcatgagctgtgaggaggagctgaagaggatcaagcagcacaaggccatcatcacagaagatggcaaggtgaatggagtgacagagagcacccgcatcctgggctacaccttcctgcaccccagcgtggtgccccggccccacgtgcagagcgtgctgctgaccccccaggatgagttcttcatcctgggcagcaagggcctgtgggacagcctgtctgtggaggaggccgtggaggccgtgagaaatgtgcctgatgccctggccgccgccaagaagctgtgcaccctggcccagagctatggctgccacgacagcatctctgctgtggtggtgcagctgtctgtgacagaggacagcttctgctgctgtgagctgtctgctgggggcgctgtgcccccacccagccctggcatcttccccccatctgtgaacatggtgatcaaggaccggcccagtgatggcctgggcgtgcccagcagcagcagcggcatggccagcgagatcagcagcgagctgagcaccagcgagatgagcagcgaggtgggcagcacagccagtgatgagcccccacctggggccctgtctgagaacagccctgcctaccccagcgagcagcgctgcatgctgcaccccatctgcctgagcaacagcttccagaggcagctgagcagcgccaccttcagcagcgccttcagtgacaatggcctggacagtgatgatgaggagcccattgaaggagtcttcaccaacggcagccgggtggaggtggaggtggacatccactgcagccgggccaaggagaaggagaagcagcagcacctgctgcaggtgcctgctgaggccagtgatgagggcatcgtcatcagcgccaatgaagatgagcccggcctgcccaggaaggctgacttctctgctgtgggcaccatcggcagaagaagagccaacggctctgtggccccccaggagaggagccacaacgtgattgaggtggccacagatgcccccctgaggaagccaggcggctactttgctgccccagcccagcctgaccctgatgaccagttcatcatccccccagagctggaggaggaggtgaaggagatcatgaagcaccaccaggagcagcagcagcagcagcagcccccacctccaccccagctgcagccccagctgcccaggcactaccagctggaccagctgcctgactactatgacacccccctgtag

SEQ ID NO: 258614 - DNA, 3618 bp, Artificial Sequence
  derived and/or modified sequence
atggattctgaaattggctgcctgatccgcttctacgccggcaagccccacagcacaggcagcagcgagcgcatccagctgagcggcatgtacaacgtgaggaagggcaagatgcagctgcctgtgaaccgctggacccggcggcaggtgatcctgtgtggcacctgcctgattgtgtcctctgtgaaggacagcctgaccgggaagatgcacgtgctgcccctcatcggcggcaaggtggaggaggtgaagaagcaccagcactgcctggccttcagcagcagcggcccccagagccagacctactacatctgctttgacaccttcacagagtacctgcgctggctgcggcaggtgtccaaggtggccagccagaggatcagctctgtggacctgagctgctgcagcctggagcacctgcctgccaacctcttctacagccaggacctgacccacctgaacctgaagcagaacttcctgcggcagaaccccagcctgcctgctgcccggggcctgaatgagctgcagcgcttcaccaagctgaagagcctgaacctgagcaacaaccacctgggggacttccccctggccgtgtgcagcatccccaccctggccgagctgaatgtgtcctgcaatgccctgcggtctgtgcctgctgctgtgggcgtgatgcacaacctgcagaccttcctgctggatggcaacttcctgcagagcctgcctgctgagctggagaacatgaagcagctgagctacctgggcctgtccttcaatgagttcacagacatccctgaggtgctggagaagctgacagctgtggacaagctgtgcatgagcggcaactgtgtggagaccctgcggctgcaggccctgaggaagatgccccacatcaagcacgtggacctgcggctgaatgtcatcaggaagctgattgctgatgaggtggacttcctgcagcacgtgacccagctggacctgcgggacaacaagctgggggacctggatgccatgatcttcaacaacatcgaggtgctgcactgtgaaagaaaccagctggtgaccctggacatctgtggctacttcctgaaggccctgtatgccagcagcaatgagctggtgcagctggatgtgtaccctgtgcccaactacctgagctacatggatgtgtccaggaaccggctggagaatgtgcctgagtgggtgtgtgagagcaggaagctggaggtgctggacatcggccacaaccagatctgtgagctgcctgcccggctcttctgcaacagcagcctgaggaagctgctggccggccacaaccagctggcccggctgcctgagcggctggagaggacctctgtggaggtgctggatgtgcagcacaaccagctgctggagctgccccccaacctgctgatgaaggctgacagcctgcgcttcctgaatgccagcgccaacaagctggagagcctgcccccagccaccctgtctgaggagaccaacagcatcctgcaggagctgtacctgaccaacaacagcctgacagacaagtgtgtgcccctgctgaccggccacccccacctgaagatcctgcacatggcctacaaccggctgcagagcttccctgccagcaagatggccaagctggaggagctggaggagattgacctgagcggcaacaagctgaaggccatccccaccaccatcatgaactgcaggaggatgcacacagtgattgcccacagcaactgcatcgaggtgtttcctgaggtgatgcagctgcctgagatcaagtgtgtggacctgagctgcaatgagctgtctgaggtgaccctgcctgagaacctgccccccaagctgcaggagctggacctgaccggcaacccccggctggtgctggaccacaagaccctggagctgctgaacaacatccgctgcttcaagattgaccagcccagcactggagatgccagcggggccccagctgtgtggagccacggctacacagaggccagcggcgtgaagaacaagctgtgtgtggccgccctgtctgtgaacaacttctgtgacaaccgggaggccctgtatggagtgtttgatggagacagaaatgtggaggtgccctacctgctgcagtgcaccatgtctgacatcctggccgaggagctgcagaagaccaagaatgaggaggagtacatggtgaacaccttcatcgtgatgcagaggaagctgggcacagctggccagaagctgggcggcgctgctgtgctgtgccacatcaagcatgaccctgtggaccccggcggcagcttcaccctgaccagcgccaacgtgggcaagtgccagacagtgctgtgcagaaatggcaagcccctgcccctgagccgcagctacatcatgagctgtgaggaggagctgaagaggatcaagcagcacaaggccatcatcacagaagatggcaaggtgaatggagtgacagagagcacccgcatcctgggctacaccttcctgcaccccagcgtggtgccccggccccacgtgcagagcgtgctgctgaccccccaggatgagttcttcatcctgggcagcaagggcctgtgggacagcctgtctgtggaggaggccgtggaggccgtgagaaatgtgcctgatgccctggccgccgccaagaagctgtgcaccctggcccagagctatggctgccacgacagcatctctgctgtggtggtgcagctgtctgtgacagaggacagcttctgctgctgtgagctgtctgctgggggcgctgtgcccccacccagccctggcatcttccccccatctgtgaacatggtgatcaaggaccggcccagtgatggcctgggcgtgcccagcagcagcagcggcatggccagcgagatcagcagcgagctgagcaccagcgagatgagcagcgaggtgggcagcacagccagtgatgagcccccacctggggccctgtctgagaacagccctgcctaccccagcgagcagcgctgcatgctgcaccccatctgcctgagcaacagcttccagaggcagctgagcagcgccaccttcagcagcgccttcagtgacaatggcctggacagtgatgatgaggagcccattgaaggagtcttcaccaacggcagccgggtggaggtggaggtggacatccactgcagccgggccaaggagaaggagaagcagcagcacctgctgcaggtgcctgctgaggccagtgatgagggcatcgtcatcagcgccaatgaagatgagcccggcctgcccaggaaggctgacttctctgctgtgggcaccatcggcagaagaagagccaacggctctgtggccccccaggagaggagccacaacgtgattgaggtggccacagatgcccccctgaggaagccaggcggctactttgctgccccagcccagcctgaccctgatgaccagttcatcatccccccagagctggaggaggaggtgaaggagatcatgaagcaccaccaggagcagcagcagcagcagcagcccccacctccaccccagctgcagccccagctgcccaggcactaccagctggaccagctgcctgactactatgacacccccctgtag

SEQ ID NO: 258615 - DNA, 5154 bp, Artificial Sequence
  derived and/or modified sequence
atggagcccgccgccgccgccaccgtgcagcggctgcccgagctggggagggaggacagggccagtgcccctgccgcagctgccgcagctgccgctgccgccgccgcggccgccgccgctctagctgctgccgcaggagggggccggtcaccggagcccgctttaacacccgccgcaccatctggtggaaatggatctggctcaggagctcgagaggaggccccgggcgaggctccccccggaccactccctggtcgcgcgggtggagctggcagacgtcgtcgccggggcgcaccccagcccatcgcagggggagcagctcccgtgcccggggccggggggggggctaattcgttactgctgagacgaggtcgactgaaacgcaacctgtcggccgcggctgctgctgcgagcagtagctcatccagttctgccgctgctgcctctcactccccaggagccgccggcttgcccgccagctgcagcgccagtgcaagcctgtgtacccgctcgcttgaccgcaaaacattgctgctgaagcatcggcagacattacagctacagcccagtgatcgagattgggtccgtcaccaactccagcggggatgtgtccacgtgtttgacaggcatatggcgtcaacctatttgaggccagtgctgtgcacactggatacaaccgcgggtgaggtggccgcaaggctcttgcagcttggtcacaaaggggggggcgtggttaaagtgctgggccagggccccggggcagctgccgcacgcgaacctgcagagcctccaccagaagcaggaccccggcttgctccacctgagccccgcgacagcgaggttccaccggccagaagcgcccccggggcctttgggggacctccaagagctcctcccgccgacttacccctgcctgtgggcggcccaggagggtggtcacgacgagcatcaccagctccctctgactcctccccaggagagcctttcgtaggtggcccagtttccagccctcgagcgcctagacccgtggttagcgataccgaatcttttagtctgtcgccgagcgcggagtctgtctccgatcgcctggacccctattcgtcaggcggcggcagtagcagttcctcggaggagctcgaggccgacgcagccagcgcacctactggagtgcctggacagccccgcagaccaggtcaccctgcgcagcccttgccactgccccagacagcaagttcaccgcagccacaacagaaggcaccccgcgctatcgactctccagggggcgccgtcagggagggaagttgcgaagaaaaggccgcagcagcggtcgcacctggtggactacagtcaacacccggaaggtctggggtgactgcagaaaaggcccctcctcccccacctccacctacgctatacgtgcagctgcacggcgagacaacacggcgcctcgaggccgaagagaaaccactccaaatccaaaatgactacctgtttcaactcggattcggcgagctgtggcgggtccaggaggaagggatggatagcgagattgggtgtctgattcgattctacgctgggaaaccccacagtacagggagttcagagcgaattcagctctcgggcatgtataacgtgagaaagggcaaaatgcagttgccagtgaatcgatggacacgacggcaggtcattctttgtggcacctgccttatagtaagttcggttaaggactctttgactggcaaaatgcacgtccttcccctgatagggggaaaggtggaggaagtgaaaaaacaccagcattgtctcgcctttagcagttcaggaccacagagccagacatactatatatgcttcgacacttttaccgaatacctgagatggctacggcaggtgtccaaggtggcctcccagcggatcagctccgtcgacctttcatgttgttctctggagcatctgccggcaaatctgttttattcccaggatttaacacacctgaacctgaagcagaactttctgcggcaaaatccctctctccctgctgccagaggactgaacgagctgcaacggttcacaaaactaaagagtctgaacctctcaaacaaccatctgggggacttcccactagccgtatgctccatccccactctggccgaactgaacgtgagctgcaatgccctacgatccgtgccggctgctgtgggagttatgcataatctgcagaccttccttttggacggcaattttctccagtccttacccgccgagctggagaacatgaaacagctatcctacttaggcctgtctttcaatgagttcactgatattccggaagtgctggagaaattaacagccgtggacaagctgtgtatgtctgggaactgtgttgagaccctgcggctgcaggctttgaggaagatgccccatatcaagcacgtggatctacggctgaacgtcatacgaaaacttattgccgatgaagtcgactttctgcagcatgtcactcagttggatctccgagacaacaaactgggggatctggatgccatgatctttaacaatattgaggttcttcattgtgaaagaaatcaactggtgactcttgacatatgtggatacttcttgaaggctctgtacgcctctagcaatgagttggttcagctggatgtgtaccccgtgccgaattacttatcctatatggatgtgtctcggaataggttagagaacgttcccgagtgggtgtgtgaatcgagaaaacttgaagtgctcgacataggccacaatcagatatgtgagttgcctgcccgtctattctgcaacagcagtttacgaaagctgcttgctgggcataaccagctggcaagactgcccgagcgtcttgaacgaacctcagtggaagttctggacgtacagcacaatcaattactggagctgcctccaaacctgttaatgaaggctgatagtctgaggttcttgaatgcgagtgcgaacaaacttgaatcccttcctcctgctaccctaagcgaggaaaccaattcgatcttacaagagttatacttgactaataacagcctaacagacaagtgtgtacccctcctgaccggccatccacatttgaagattctgcatatggcgtataataggttgcagtctttccccgccagcaagatggccaagctggaggaacttgaggagattgacctctccggtaataagctaaaggcaatccctaccactattatgaattgcaggcgcatgcacaccgttattgcccattccaattgtattgaagtcttccctgaggttatgcagttaccagaaataaaatgtgtggatcttagctgtaacgagctctccgaagtaacattgcccgagaacctgccccccaagttgcaggagttggacctcaccggaaacccacgcctggttcttgatcacaaaacactggagttgctgaataacatacggtgcttcaaaatcgaccagccgtccaccggagacgcaagtggtgcacctgcagtgtggagtcacggctatacggaggccagcggggttaagaacaaactgtgtgtggcagctctttctgtgaacaacttctgcgacaaccgcgaggccctttacggcgtgttcgatggcgatcggaacgtggaagtgccatacctcctgcagtgcactatgtccgacatcctggccgaggagttacagaagactaaaaacgaggaggagtacatggtcaacacattcatcgttatgcaacgcaagctgggaactgctggacagaagttgggcggtgccgccgtcctgtgccatataaaacacgatcctgtggatcctggtggtagtttcacactgacttctgccaatgtcgggaagtgccagacggtgctgtgtaggaatggcaaacctctacctctgtccagaagttacatcatgtcttgcgaggaagagctgaaaaggatcaaacagcacaaggcaatcattacggaggacggaaaggttaacggtgtgacagaatcgacaagaattctggggtatacttttctacacccttccgtggtgccccgcccgcacgtgcagtctgttctcttaacaccccaggacgaattcttcatcctgggatccaagggcctgtgggattctctgtccgtagaggaggccgtggaagctgtccggaatgtccccgacgccctggcagccgcgaagaagctctgcactttggctcagagctatggctgccacgattctatcagtgctgttgtcgtccagctgtccgtaaccgaggacagtttttgttgttgtgagctaagtgcaggtggggctgtgcccccaccttcccccgggatttttccaccatccgttaatatggtaatcaaggaccggccctccgacggcctgggagtgcccagcagcagcagcggcatggccagcgagattagttcagaacttagcacctctgagatgtcatccgaggtgggctcaaccgctagcgatgagccccctccgggagccctctcagaaaactctcccgcttatccgtctgagcaacgctgcatgcttcatcccatctgcttgtctaactcgttccaacgacagctttcatcggcaacgttcagctcggcttttagtgacaatggtcttgattccgacgacgaagagccgatagagggggtatttacgaatggctctcgggtggaagtggaagttgacatccattgctcaagagccaaggagaaggagaagcagcagcacctgttgcaggttccggccgaggcgtccgacgagggaattgtcatttctgccaatgaagacgagcccggactgccccgaaaggctgacttttctgctgtggggacaataggacgccgccgtgctaatggttctgtcgccccgcaggagcgctcccacaatgtcattgaagtagctactgacgccccactgcgtaagcccggcgggtacttcgccgcaccagctcagcctgatcccgatgatcagtttatcatccctcccgaattagaggaggaggttaaagaaatcatgaagcaccaccaggagcaacagcagcaacaacagccccccccgccacctcagttgcagcctcagctgcctcgacactatcagttggaccagcttcctgactactacgacactccgctgtag

SEQ ID NO: 258616 - DNA, 3618 bp, Artificial Sequence
  derived and/or modified sequence
atggacagcgagatcggctgcctgatccggttctacgccggcaagccccatagcaccggcagctctgagagaattcagttgtccggaatgtataacgtgcgcaagggaaaaatgcagttgccagtgaaccgatggacccgccggcaagtgatcttgtgcggcacatgcttgatcgtgtcttcagtgaaagatagtctcacagggaaaatgcacgtgctgccactcattggtgggaaagtcgaggaagtgaaaaagcaccagcattgcttggccttttcgtcctctggaccccagagccagacctattatatttgtttcgacactttcactgagtatctaagatggcttcggcaggtgtcaaaagtcgcttcacagagaatttcctccgtggacctgagctgctgttcgttggaacacctgccagccaacctgttctattcccaggaccttacgcacctgaacttgaaacagaatttcctgagacaaaacccgtccctgcctgccgcccggggacttaatgagctccagagattcaccaaactcaagtccctgaatttgtccaacaaccaccttggcgactttcctctggccgtttgcagcatccctaccctggccgaactaaacgttagttgcaacgctcttcgatctgtgccagctgccgttggagttatgcacaacctccagaccttcctgcttgatgggaatttcctccagtccctgcccgccgaactggaaaacatgaaacaactctcctatctgggactatcctttaacgagttcacagatatccccgaggtcctggagaagctgaccgctgtcgacaagctatgcatgtccggcaattgcgtggagactcttagactgcaggcccttcggaagatgcctcacatcaagcacgtagatctgaggctgaatgttatccgcaagcttattgctgacgaggtagatttcttgcagcatgttactcagctcgacctacgagataataagctgggtgacctggatgccatgattttcaataacatcgaagtactgcactgcgaaagaaatcaactcgttacgttggacatctgcggctacttcctgaaggcgctgtacgcatcatctaatgaacttgttcagttggatgtttacccagttcctaattacttgagctacatggacgtgtcacggaataggctggagaacgtccctgagtgggtttgtgagagccggaaactcgaagtccttgatatcggacacaatcagatttgcgagcttccggccaggctcttctgcaatagctccttacggaaactgctggccggccataaccagttagccagactaccagagcgactggaacgcacttccgtggaagttctcgacgtccaacacaaccagctcctagagttgccgcccaacctccttatgaaagccgactcccttcggttcctaaacgcctccgccaacaagcttgagtcactccccccagctacactgtcagaagagaccaactctattttgcaggagctttatttaaccaataactcactgacggataagtgcgtaccgctgttgacgggccacccacacttgaaaatcctccacatggcttacaacaggctccaatcctttcccgcgtctaagatggccaaacttgaggagctggaagaaatcgatctatctggaaacaaattgaaagccattccaacaacgattatgaattgtcggagaatgcacactgtgatagcacattctaattgcattgaagtgtttccagaagtcatgcagctccccgaaatcaagtgcgtcgacctgtcctgcaatgaactcagtgaggtgacactccccgaaaacctgcctcctaaactccaggaactggatctgacagggaatcctaggctcgtgcttgatcacaagaccctggagttgctcaataacatcagatgctttaagattgatcagccgtcaacaggcgacgcaagcggcgccccggctgtatggtcccacggctatactgaagcatcaggcgtgaagaacaaactctgcgtggcagccttaagcgtgaataacttttgcgataaccgcgaggctctctacggggtgttcgatggagatcggaatgttgaggtgccctaccttcttcagtgcactatgtctgacatccttgccgaggaattacagaagacgaagaacgaggaagagtacatggttaataccttcatcgtcatgcagcgcaagctcggtacggccggacagaaactggggggcgctgctgtgttgtgtcacatcaagcatgatcctgttgaccctggtggctcatttaccctcacttcagcgaatgtgggaaagtgccaaacagtgttatgtcgcaacgggaaacccctgccattatccaggtcttacatcatgtcttgcgaggaggagctgaagcgtattaagcagcataaggctattatcacagaggacgggaaggtgaacggcgtgaccgaatcgacgcgcatcttgggctacactttcctgcatccaagtgttgtgccccgaccccatgtccagtccgtcctgctgaccccccaggacgagttttttatcctggggagcaagggattgtgggacagtctgtcagtggaagaggcggtggaagctgttcggaacgtgcccgatgccctcgccgcagcaaaaaaactgtgcacactggcacagagctacggatgccacgacagtattagcgcggtagttgtccagctgagtgtaaccgaagacagtttttgctgctgcgaactgtcagccgggggggcggtgccccctccttcccctggcatattcccaccaagcgttaacatggtgatcaaagacagaccctctgatgggctcggagtgccctccagctcatccggcatggcatctgagatcagttccgagctaagcacttcagagatgtcctctgaagtgggaagcaccgcaagtgacgaacctcctcctggagccctgagtgaaaatagccctgcttatccctccgaacagcggtgcatgctacatcccatttgtctttccaacagctttcaacggcaactgagcagcgcaaccttttcctctgcgttttccgataatggcctagattcagacgacgaagaacccatagaaggggtgtttacgaacggatctagagtcgaggtggaggttgatatccactgctcccgtgcaaaggaaaaggaaaagcagcagcaccttctccaagtgccggcagaagcaagcgatgaggggatcgttatctccgctaacgaagacgagccaggcctccccagaaaggccgactttagcgccgtcggtacgatcgggcgtcgccgtgccaacggcagcgtagctccccaggagcgttcgcataatgtgattgaggttgctacggatgctcccctgcggaaacctggagggtactttgctgctcctgctcagccagatcccgacgatcaatttataatcccgcctgaactggaggaggaagtcaaagagataatgaaacaccatcaggaacagcaacagcaacagcagcctcccccaccaccacagttgcagccacaactgccgaggcactaccagttagaccaacttcctgactattacgacactccactgtag

SEQ ID NO: 258617 - DNA, 5154 bp, Artificial Sequence
  derived and/or modified sequence
atggagccagccgctgcagccactgtccagcgtttacccgaactgggaagagaggatcgtgcatccgcccctgcagcagccgctgctgctgcggcagctgctgctgctgcggctgcagcacttgcggctgccgctgggggtggcaggagtccggagcccgcactgactcctgctgcgcctagtggcggaaacggttccggctctggcgcaagggaagaagcccctggcgaagcacccccaggaccactccctggcagagccggtggagccggacgtagaagaagacggggagcccctcagccaatcgcgggtggagcagcccctgtgcccggagcagggggaggcgctaattctctgttgcttcgtagggggcgacttaagagaaatttgtctgcagctgccgctgccgcatcctcttccagcagctcatccgcagctgcggcttctcactctcctggggctgcagggctcccagcatcctgctcagccagcgcgtcactgtgtacgagatctctggacaggaagacccttttactcaaacacagacagacactgcagttgcagccttctgaccgggactgggtgcggcaccaactgcaacgtggatgtgttcacgtcttcgataggcacatggcaagcacatacctgcgccctgtcctctgtaccctcgatactactgccggtgaagttgcagcccgactgcttcagctgggacacaagggaggaggcgtggttaaagttctcggacagggaccaggcgctgccgctgcccgagagcccgctgagcctccccctgaagccggtcccagactcgccccacctgagcctcgagacagcgaggtgcctccagctcgcagtgcgcctggggcattcggcggtccccctcgagcccctcccgctgaccttcccctccccgtggggggaccaggtggatggagccgacgggcttctccagctccatcggactcttcccccggtgaaccgttcgtggggggacccgtttcctccccaagagcaccgagaccagttgtttctgacacagaatcttttagtctgagcccctcggctgaaagcgtgtctgatcgccttgatccttattcttcagggggaggatcctcgtctagctcggaagagcttgaagctgatgctgcaagtgcacccacaggcgtgcctggccagcctcggaggcctggccatccagcacagccactgccactaccacagacagcctccagcccacagccacagcagaaggcaccaagagcgatcgacagcccaggaggagcagtccgggagggctcatgtgaggaaaaagccgcagccgctgttgcaccaggcggtctccaaagcactcccggtcgctctggggttactgctgagaaggccccacctcccccacctccacccactctctacgtgcagctgcacggtgagacaactaggcggctggaggccgaggagaaaccactacagattcagaatgactacctgtttcagctgggttttggcgagctgtggagagttcaggaggagggcatggactcggagattggatgcctaatccggttttacgcgggaaagccacatagtacaggatctagcgaaaggatacaactgagtgggatgtataacgtgcgtaaggggaagatgcagttgcctgtcaacaggtggactagacgtcaagtgattctctgtggcacatgtcttatcgtttccagcgtgaaggacagtctgacgggcaaaatgcatgtcctgccacttataggcggaaaagtagaagaggttaagaaacaccagcactgtctggcgttctcttccagcggcccacaaagtcaaacttattacatctgcttcgacacatttactgaatatttaaggtggctaagacaggttagtaaagttgcctctcagcggataagtagtgttgacctcagctgttgtagccttgagcacctgccggctaatctcttctattctcaggatctgactcatttgaatttaaagcagaatttcctgagacagaatccaagtcttccagccgcacgaggtttgaacgagctacagcgatttacgaagttgaagagccttaatctgtccaacaaccatctcggtgatttccccctggctgtatgctccatcccaacattggccgagctgaatgtatcgtgtaacgcgcttaggagtgtcccggcagctgttggtgtgatgcacaacttgcaaacatttttgctggacgggaactttctccagagcttgcctgcagaactggaaaacatgaagcaactaagctacctgggtttaagcttcaacgagtttacagatattcctgaagtgcttgagaagctcacagccgtggacaaactgtgcatgagtgggaactgtgttgagactctgcgacttcaggctctacggaagatgcctcacattaagcacgtcgaccttcgcctgaacgtgattcgaaagctaattgctgacgaagttgactttttgcagcatgttacacagctagatctgcgcgacaataagcttggggacctcgacgccatgatttttaacaatatcgaagtgctccactgcgagcggaaccagctcgtcaccctagatatttgtgggtactttctgaaagcactgtacgccagtagtaatgagcttgtgcagctggatgtctaccctgtcccaaattacttatcttatatggacgtaagcagaaaccgactggagaacgtaccagaatgggtgtgcgagtctaggaagttggaagttctcgacattggtcataatcagatatgcgagctgccggctagactgttttgtaatagcagcttgcgtaaactgttagctggccataatcagttggccaggctgcctgagcgcctcgaaagaaccagcgtagaggtcctcgatgtgcaacataaccagctgctggagcttcctccgaacctactgatgaaagctgatagtttaagattcctcaacgcgagcgccaataagctggagtcgctccccccagctacactgagtgaggagaccaattctatcctgcaggagctatacttgactaataatagcctgaccgacaagtgcgtgcctcttctcacaggccaccctcacctgaaaatcttgcacatggcctataatagactgcaaagtttcccagcatcaaaaatggccaagctcgaggaactggaggagatcgatctgtctggaaataaactgaaagctattccgaccaccattatgaactgtcgcaggatgcatacagtgattgctcactctaactgtatcgaagtgttccctgaggttatgcaactgcctgagatcaagtgcgtggatctgtcatgtaatgaactatccgaagtgacccttcccgagaatctcccacctaagctccaagagttggacctcaccggtaacccacgcttagtcctggatcacaagactctcgaactgttgaacaacatccgatgctttaaaattgatcaaccctctacaggcgatgcctccggtgcccctgctgtttggtcgcacgggtacactgaggcttcgggagtgaaaaataagttatgtgtcgccgcactgagcgttaacaacttctgcgataatagggaggccttatatggagtgtttgacggagaccggaacgtggaggtgccgtacctgctgcaatgtaccatgtccgacatcctcgccgaggaactgcagaaaactaaaaacgaggaggaatacatggtgaacacttttatcgtcatgcaaaggaaactcggcactgccggacaaaagctgggaggggcagccgttctctgtcatatcaagcatgatcccgtggatcccggaggatcattcacgctcacttccgccaacgtgggcaagtgtcaaacagtgctctgcaggaacgggaaacccctgcccctcagtcggtcctatatcatgagctgtgaggaggagttaaaaagaattaaacaacacaaggctatcattactgaagacggcaaagttaatggcgtgactgagtctacaaggattctgggctatacgttcctgcacccaagcgtggtcccacgtcctcatgtgcagtctgtgctcctgaccccgcaggacgagttctttatccttgggtcaaaagggctctgggattcactatccgtcgaggaggcagtggaagctgtcaggaacgtccccgatgctctagccgcagctaagaagctttgtaccctggcccagtcctatggctgtcatgacagcatttctgccgtggtggtgcagctgtccgtcacagaggattcattctgctgctgcgagttgagcgccggtggcgctgtgccccctccttctcccggaatctttcccccttcagtcaacatggtgatcaaggatcgccctagcgacggactgggggtgccatcctcatcatcaggcatggccagcgaaatcagctcggagctctcaaccagcgaaatgagctcggaagttggttccactgcaagcgacgagcctccccctggggctctgtctgagaactctcccgcatatccctccgagcagagatgtatgctgcaccctatctgtcttagtaattcctttcagcggcaactgagttcagccaccttctcctctgccttcagcgataacggacttgactcggatgatgaagagcccatagaaggcgtgtttactaacggctccagagtggaggtagaagtggatatacattgtagccgagctaaggagaaagagaagcagcagcaccttctccaagtacctgccgaagcttctgacgaaggcattgtgatctccgcgaacgaggatgagcctggtctgccacggaaagccgatttttccgcggtggggaccataggacgcagacgagcgaatgggtcagtcgcacctcaggaaagatcacataatgtgatcgaggtggcgacagacgctccgctgagaaaacccggaggatactttgccgcacctgcccaaccagacccagatgaccaatttatcatcccgccagaactggaagaggaggtgaaagaaatcatgaagcaccatcaggagcaacaacaacagcagcagccgccaccaccccctcagctgcagccacagttgccacgccattatcagttagaccagctgcctgactattatgataccccgttatat

SEQ ID NO: 258618 - DNA, 3618 bp, Artificial Sequence
  derived and/or modified sequence
atggatagcgaaatcggctgtctcatccgcttttacgccggaaagcctcactctaccggaagcagcgaaagaatccagctgtcggggatgtataacgtgagaaagggaaaaatgcagttgccagttaatcggtggactagacgccaagtgatcctgtgtgggacttgcctgatcgtttcatccgtgaaggactctctgacaggcaagatgcacgtcttgccactgataggtggaaaagtcgaggaggtaaagaagcatcagcactgcctggccttctcttccagcgggccacagtcccagacttattacatctgttttgatacgtttaccgagtatcttagatggttgcggcaggtgtccaaagtagccagccagcggatctcatccgtggatctgagctgctgctcgctcgagcacctgcccgcaaatctgttttactcacaggatttaacccatctaaacctcaagcagaactttctaagacagaacccttctctccccgcagccagggggcttaacgagctgcagcgtttcactaagctcaaatccctcaacctcagcaataatcatctgggggacttcccactggctgtctgctccatcccaaccttggcggagctcaacgtcagttgtaatgctctgagaagcgtgccggctgctgtcggggtgatgcataacttacagacatttcttcttgatggtaacttcttacagtctttacctgcggagctagagaatatgaagcaattatcctatctgggcctgagctttaacgagtttactgacattccagaggtcctcgaaaagctgacagccgtcgataaattatgcatgagcggcaattgtgtcgagaccttgaggctgcaggccctgcggaagatgcctcacatcaagcatgtggatctacggctgaacgtgatcagaaagcttattgccgatgaggttgacttcctccagcacgtcacacaactcgacttacgggataacaagctaggtgacctggatgccatgatcttcaacaatattgaggtgctccattgtgaaaggaatcaactcgtgacgttagatatctgtgggtacttcctcaaggccctgtatgcgtcatccaatgagctggtgcagctggacgtctatccagttccaaactatctgtcatacatggatgtgagccgaaacaggctcgaaaatgtccctgagtgggtgtgcgaaagcaggaagctggaggttctcgatattggtcataaccagatctgcgagctgccagcaagactgttctgcaactctagcctgagaaaactgctggctgggcacaaccagctggcaaggctgcccgaacgacttgagcgcacgtcggttgaggtcctggatgtgcaacacaatcagcttctggagctgccgccaaatttgctgatgaaggcagacagtttgagatttctcaacgccagcgctaacaaacttgagtcccttccaccagctacgttgagcgaggagactaactccatcctgcaggagctgtatctgactaataactctttgaccgacaagtgtgtcccactgctgaccggccacccccatctgaagatcttacacatggcgtacaaccgcttacaaagttttccagcttcaaagatggccaagcttgaggagttggaggaaatcgaccttagtggcaacaagcttaaggcgatccccacaaccataatgaattgtcgtaggatgcatacggtgatagctcacagcaattgtatcgaagtttttccggaggtcatgcagttaccagagattaagtgtgtcgacctgagctgtaacgagctttccgaggtgaccctgccggaaaatctcccccctaagctgcaggagcttgacctcacagggaatccccgactggtccttgatcacaagacactcgagctccttaataacattcgatgctttaaaattgatcagccatctacaggcgacgccagtggagcacccgctgtgtggtcccatgggtataccgaagccagcggggtgaagaacaaactgtgcgttgcggcactgtctgtgaacaacttctgcgataatagggaagccctctatggagttttcgatggggatcgaaacgtagaagttccttatttgctgcagtgcaccatgagtgacatactcgcagaagaactgcaaaaaacaaaaaatgaagaagagtacatggtgaacacatttattgtcatgcagcggaaactggggactgccggacaaaaacttggaggagctgcggtgctgtgtcacattaaacacgatcctgtggatccgggaggcagttttacccttacttcagccaacgtcggaaagtgccagaccgttctctgtaggaacggaaagcctcttccactttccagatcctacatcatgtcttgtgaagaggagcttaaacgcattaagcagcacaaggcgatcatcacagaagacggaaaagtaaatggagtcactgagtccactaggatcctcggttatactttcctccatccttctgtagtgccaagaccgcacgttcagagtgtgctcctgacaccgcaggacgagtttttcatccttgggtccaaaggcctgtgggactccttgagcgtggaggaagcagtggaggctgtgaggaatgtccccgatgcacttgcggctgccaaaaaattatgtacattggcccagagttatgggtgtcacgactcgattagcgctgtggtcgtccaactgagcgttactgaagatagtttttgttgctgtgaactgtcagctggtggtgccgtgccgccaccttctcctgggatatttcctccgtccgtgaacatggttatcaaagataggccctccgatgggctcggggtgcctagcagctcatctggaatggcttccgagataagttccgagctctctaccagtgagatgtctagcgaggttggatccactgctagtgatgaaccaccccctggcgcattgtctgagaactcgccagcctatccctccgaacagaggtgtatgctccaccctatttgcctgtccaactcttttcaacggcaactgagctcagccacgttttcctcagcttttagtgataatggcctcgatagcgatgacgaagagccaatagagggggtgtttaccaacggcagcagggttgaagtagaagtggacatccattgtagcagggctaaggagaaggaaaagcaacaacaccttttacaggttcctgccgaggcttcggatgagggcattgtgatctccgccaatgaagacgagcctggccttccgaggaaagcggacttttctgccgtgggcactattggtcggcgtcgggcaaacgggagcgtggcaccgcaagagcgcagccacaacgtcattgaggttgcaaccgacgcgcctctgagaaagcctgggggatacttcgccgcacccgcacagcctgaccccgatgatcagttcattatccctcctgagcttgaggaagaagtcaaggaaattatgaagcatcatcaggagcagcagcagcaacaacagcccccaccgccaccccagctgcaaccgcagctgccgagacattaccagttggatcagcttcctgactattacgacaccccactctag

SEQ ID NO: 258619 - DNA, 6156 bp, Artificial Sequence
  derived and/or modified sequence
atggagcccgccgccgcggccacggtacagcgactccccgagctcggcagggaggaccgagcttcggctccggcggccgccgctgcggcagcagcagcagcagcggcggccgcggcggctctggcggcggcggccgggggcggccggagtccggagcccgcgctgaccccggcggccccgagcggcgggaacggcagcggcagcggggcgcgggaagaggccccaggcgaggcgccgccggggccgctgccgggcagagcggggggtgccgggcgcaggaggcggcgcggggcgccccagcccattgccggcggggctgcccccgtacccggggccggcggcggcgccaactccctcctgctgaggagagggcggctgaagaggaatctgtccgcggccgccgcggccgcctcctcgtcgtcgtcgtcctcggccgctgctgcctcgcactcccccggcgctgccggcctccccgcctcctgctcggcctcggcgtcgctgtgcacccggagcctggacaggaagacgctgcttctgaagcaccggcagacgctgcagctgcagccgtcggaccgggactgggtgaggcaccagctccagcgcggctgcgtgcacgtcttcgaccgccacatggcctcgacctacctgcgcccggtgctctgcacactggacaccacggccggcgaggtggccgcccgcctgctgcagctgggccacaaaggcggcggcgtggtgaaggtgctgggccaggggcccggagccgccgccgcccgggagcccgctgaaccgccccccgaggccggcccccggctggcgcccccggagccgcgggactcggaggtaccgcccgcgaggagcgcgccgggtgccttcggggggcctccgcgcgcgccccccgccgacctacccctgcccgtcggcggcccgggcgggtggtcgcgccgcgccagcccagcgccctcggactccagccccggcgagccgttcgttgggggccctgtctcttcgccccgcgccccacggcctgtggtctccgacaccgagagcttcagtctgagtcccagcgccgagagcgtgtctgaccggttggacccctacagcagcggcggcggctcctcgtcgtcgtcggaagagctcgaggccgacgcagcctcggccccgacgggggtcccgggccagccccgccgtcccggccaccccgcgcagcccctcccgcttccccagacggcttcctcgcctcagccgcagcagaaagccccgagggccattgacagcccgggcggggccgtccgcgaggggtcgtgcgaggagaaggcagcggcagccgtggccccgggaggcctccagtctacccccgggaggagcggggtgaccgcggagaaggcgcctccgccgcccccgccgcccaccctgtacgtgcagctccacggagagaccacccggcgcttggaggcggaggagaagccattgcagatccaaaatgactacctcttccaactgggatttggggagctgtggagggtgcaggaggaaggcatggactcggagattggctgcctcatccgcttctatgcaggaaaacctcacagcacgggtagctctgaacggattcagctctcaggaatgtataatgtccgtaaaggcaagatgcagttgccagtgaaccgatggacaagacgccaagtcatcctatgtgggacctgcctgatagtatcatctgtgaaagacagcttgaccggaaagatgcatgttctgccactaattggtggaaaagtagaagaagtgaaaaagcaccaacactgtttagcatttagctcctctggaccccaaagccagacttactacatttgctttgatactttcacagaatacttaaggtggctgcgacaagtctccaaggttgcatcccagcgcattagctcagtggacctctcgtgttgtagcctggaacatctgcctgccaacctcttctacagccaagacctcactcatctcaatttaaaacaaaacttcctaaggcagaaccctagccttccagctgccagggggcttaatgaactgcaaaggttcaccaagttgaagagtcttaacctttccaataatcatttaggggacttcccactggcagtctgcagtattccaaccctggcagagctgaacgtgtcctgcaatgccctgcgatcagtcccggcagccgttggagtgatgcacaacttacagacatttttgttggatggaaactttctccaatcccttcctgctgagttggagaacatgaagcagcttagttatctgggtctttctttcaatgaatttactgacattcccgaagtattggagaaattgactgctgtggataaactttgtatgtctggaaactgtgtggagacccttaggctacaggctttaagaaaaatgcctcacattaaacatgtggatctaaggttgaacgtaattaggaagctgatagcagatgaagtggactttctacagcatgttactcagcttgacctacgagacaataagcttggtgatctagatgctatgattttcaacaacattgaagttttacactgtgaaaggaatcaactggtcacattagacatctgtggctatttcctaaaagcgctctatgcctcttctaatgaacttgttcaacttgatgtttacccagttccaaattatctgtcctacatggatgtttcaaggaaccgcttagaaaatgtgcctgagtgggtatgtgaaagccgaaagctagaagttttggatattggccataatcaaatatgtgaacttcctgcccgcttattttgtaatagcagtctccggaaactactggcaggacacaaccagttggcaaggctgcctgaaaggctagaaagaacctcggtggaggtcttggatgtgcaacacaaccagctccttgagctcccacctaaccttctgatgaaggctgacagcctgagattcctgaacgcctctgcgaacaaactggaaagccttcctccagccacgctttccgaagagacaaacagtatcttacaagagttgtatttgacaaataacagcctcacagacaaatgtgtgcccttgttaacgggacacccccatttgaagatccttcacatggcctataaccgacttcagagttttccagcaagtaaaatggcgaaactggaggaacttgaagaaattgatctcagtgggaataagctgaaagccatcccaacaacgatcatgaattgcaggcgcatgcacaccgtgattgctcactccaactgcatcgaggtctttcccgaagttatgcagctcccagagatcaagtgtgtggacctgagctgtaatgagctaagtgaagtcacattaccagaaaacctgcctcccaaactgcaggagctagacctgactggaaacccgcgccttgtccttgatcacaaaaccctggaactactgaataatatccgctgtttcaagattgatcagccttctacaggagacgcttccggagccccagctgtatggagtcatggttacactgaagcttcgggggtaaaaaacaagttgtgtgtcgcagccctgtcggtgaataacttctgtgacaaccgcgaagccctgtatggtgtgtttgacggagaccggaatgtggaggtgccctaccttctccagtgcactatgagtgacattttggctgaagagctgcaaaaaacaaaaaacgaagaagaatacatggtcaatacattcattgtcatgcaaaggaaacttggaactgctgggcagaagcttggtggtgccgctgtcctttgtcatatcaagcatgaccctgtggatccaggaggatccttcaccttgacctctgctaatgtgggcaagtgccaaacagttctctgtcgaaatggaaagccgctgcctctgtccagatcttacatcatgagctgtgaagaagagctgaagaggattaaacagcacaaggccattatcactgaggatggcaaggtgaacggagtgactgagtccacgcgcatcctgggctacaccttcctccatcccagtgtggtgcctcgcccccacgtgcagtccgtgctcctgactccccaggatgagttcttcatcctaggcagtaaggggttgtgggacagcctgtccgtcgaggaggccgtggaagccgtgcgcaacgtgcccgatgccctggctgctgccaagaagctgtgtaccctggcccagagctacggctgccacgacagcatcagcgctgtggtggtgcagctcagtgtcactgaggacagcttctgctgctgcgagctcagcgccggtggggctgtgccaccacccagtcctggcatctttcctccctcagtgaacatggtgatcaaggatcggccctcagatgggctgggcgtgccgtcctccagcagcggcatggcttccgagattagcagtgagctctccacttctgagatgagcagcgaggtggggtcaacagcctccgatgagcccccgcccggagccctaagcgagaacagccctgcctaccccagtgagcagcgctgcatgctccaccccatctgtctgtccaactccttccagcgccagctatccagcgccacgttctctagcgccttctccgacaacggccttgacagtgacgatgaggagcccatcgagggcgtcttcaccaacggcagccgggtggaggtggaggtggacatccactgcagccgggccaaggagaaggagaaacagcagcacctgcttcaggtgccagcagaggccagtgatgagggcattgtcatcagcgccaacgaggatgagccaggtctgcccaggaaggcagacttctctgccgttgggaccattgggcgccggagggccaatggctctgttgcgccccaggaaaggagccacaatgtgatagaggtggctacagacgcacctcttcgaaagcctggaggctattttgctgccccggctcagccggatcctgatgatcagtttatcatacccccggagctggaagaggaggtcaaagaaatcatgaagcatcaccaggagcaacagcagcagcagcagccgccaccaccccctcagctccagccgcagctgccgcggcactaccagctggaccagctgccagattattacgacacgccactatgacccagccgagctgtttaacaaataaactaaccacaaaagactgagttgcaagagtctcccaggctcacattaaaccaggggttttactccacatccttcccccagacactgttcccaacctgtcatcgcagctaatctgtaggttctctttctttgggttatttttttaagtaatcaccactttcttctagtgatgctttaccaatatgatttacatttgttaacttctccccctaacatatcagatatgtaaagacaaagaacaaaaggtttaatatattacagagaaacagttaatgataatgtaatattttttaaaatggctttttgttgtttgtttggaaggcagggcaggctgccgttgctaaatgatttaataatattgtaattctgtatttctttggggggaaaaggcttttgttttgttttgttttgttttgttttgtttttgtcttgaaaataatagacatttgtagaatatggagactaactcctaggagttgctttactctgtcaggtgacttaagtcactgggattcactaattttctctgagagaacagctgattgagaatttccattgtaaatagctcagtgttgtatagtgaggcttacgatgttttgtagtcttggcgtaaggacacagcccaagtaactgacgtttcccctccccctcccctctgaggagcctgcctgcctcacaactcaccctcacttcactgaatgaggaggctgagcagctgcagtgtttctgtccggaggaaatggatcttaggccactggacaagaacctgcacccaagggccctgaacccattttcctcccctgtcccagccttcccactttgacagacacttttaactgtgttccttactgctgccacaatcagcatggttgtatagtgccccattaggccatttacatacccagagttatactcaagcagaatgcacaaatggacatgtcataatttttgttacaataaatatgaaatttacaagta

SEQ ID NO: 258620 - DNA, 6401 bp, Artificial Sequence
  derived and/or modified sequence
ccgcgacccgggcggggagggcgtgtgtcgggggggcggtggcggcgaggcgggcgcgcgggatggaacactgagacaccgacggaatgctccgaatcgccacataatcccctggaacggccgcgcacaacgccattggcttctcccttctccgcgcgccgccgccgtctcccacctccgcctcatcgcctccctctccgcccgctgcctccggagctgggggggaaacgcgaagccccactgcaatggagcccgccgccgcggccacggtacagcgactccccgagctcggcagggaggaccgagcttcggctccggcggccgccgctgcggcagcagcagcagcagcggcggccgcggcggctctggcggcggcggccgggggcggccggagtccggagcccgcgctgaccccggcggccccgagcggcgggaacggcagcggcagcggggcgcgggaagaggccccaggcgaggcgccgccggggccgctgccgggcagagcggggggtgccgggcgcaggaggcggcgcggggcgccccagcccattgccggcggggctgcccccgtacccggggccggcggcggcgccaactccctcctgctgaggagagggcggctgaagaggaatctgtccgcggccgccgcggccgcctcctcgtcgtcgtcgtcctcggccgctgctgcctcgcactcccccggcgctgccggcctccccgcctcctgctcggcctcggcgtcgctgtgcacccggagcctggacaggaagacgctgcttctgaagcaccggcagacgctgcagctgcagccgtcggaccgggactgggtgaggcaccagctccagcgcggctgcgtgcacgtcttcgaccgccacatggcctcgacctacctgcgcccggtgctctgcacactggacaccacggccggcgaggtggccgcccgcctgctgcagctgggccacaaaggcggcggcgtggtgaaggtgctgggccaggggcccggagccgccgccgcccgggagcccgctgaaccgccccccgaggccggcccccggctggcgcccccggagccgcgggactcggaggtaccgcccgcgaggagcgcgccgggtgccttcggggggcctccgcgcgcgccccccgccgacctacccctgcccgtcggcggcccgggcgggtggtcgcgccgcgccagcccagcgccctcggactccagccccggcgagccgttcgttgggggccctgtctcttcgccccgcgccccacggcctgtggtctccgacaccgagagcttcagtctgagtcccagcgccgagagcgtgtctgaccggttggacccctacagcagcggcggcggctcctcgtcgtcgtcggaagagctcgaggccgacgcagcctcggccccgacgggggtcccgggccagccccgccgtcccggccaccccgcgcagcccctcccgcttccccagacggcttcctcgcctcagccgcagcagaaagccccgagggccattgacagcccgggcggggccgtccgcgaggggtcgtgcgaggagaaggcagcggcagccgtggccccgggaggcctccagtctacccccgggaggagcggggtgaccgcggagaaggcgcctccgccgcccccgccgcccaccctgtacgtgcagctccacggagagaccacccggcgcttggaggcggaggagaagccattgcagatccaaaatgactacctcttccaactgggatttggggagctgtggagggtgcaggaggaaggcatggactcggagattggctgcctcatccgcttctatgcaggaaaacctcacagcacgggtagctctgaacggattcagctctcaggaatgtataatgtccgtaaaggcaagatgcagttgccagtgaaccgatggacaagacgccaagtcatcctatgtgggacctgcctgatagtatcatctgtgaaagacagcttgaccggaaagatgcatgttctgccactaattggtggaaaagtagaagaagtgaaaaagcaccaacactgtttagcatttagctcctctggaccccaaagccagacttactacatttgctttgatactttcacagaatacttaaggtggctgcgacaagtctccaaggttgcatcccagcgcattagctcagtggacctctcgtgttgtagcctggaacatctgcctgccaacctcttctacagccaagacctcactcatctcaatttaaaacaaaacttcctaaggcagaaccctagccttccagctgccagggggcttaatgaactgcaaaggttcaccaagttgaagagtcttaacctttccaataatcatttaggggacttcccactggcagtctgcagtattccaaccctggcagagctgaacgtgtcctgcaatgccctgcgatcagtcccggcagccgttggagtgatgcacaacttacagacatttttgttggatggaaactttctccaatcccttcctgctgagttggagaacatgaagcagcttagttatctgggtctttctttcaatgaatttactgacattcccgaagtattggagaaattgactgctgtggataaactttgtatgtctggaaactgtgtggagacccttaggctacaggctttaagaaaaatgcctcacattaaacatgtggatctaaggttgaacgtaattaggaagctgatagcagatgaagtggactttctacagcatgttactcagcttgacctacgagacaataagcttggtgatctagatgctatgattttcaacaacattgaagttttacactgtgaaaggaatcaactggtcacattagacatctgtggctatttcctaaaagcgctctatgcctcttctaatgaacttgttcaacttgatgtttacccagttccaaattatctgtcctacatggatgtttcaaggaaccgcttagaaaatgtgcctgagtgggtatgtgaaagccgaaagctagaagttttggatattggccataatcaaatatgtgaacttcctgcccgcttattttgtaatagcagtctccggaaactactggcaggacacaaccagttggcaaggctgcctgaaaggctagaaagaacctcggtggaggtcttggatgtgcaacacaaccagctccttgagctcccacctaaccttctgatgaaggctgacagcctgagattcctgaacgcctctgcgaacaaactggaaagccttcctccagccacgctttccgaagagacaaacagtatcttacaagagttgtatttgacaaataacagcctcacagacaaatgtgtgcccttgttaacgggacacccccatttgaagatccttcacatggcctataaccgacttcagagttttccagcaagtaaaatggcgaaactggaggaacttgaagaaattgatctcagtgggaataagctgaaagccatcccaacaacgatcatgaattgcaggcgcatgcacaccgtgattgctcactccaactgcatcgaggtctttcccgaagttatgcagctcccagagatcaagtgtgtggacctgagctgtaatgagctaagtgaagtcacattaccagaaaacctgcctcccaaactgcaggagctagacctgactggaaacccgcgccttgtccttgatcacaaaaccctggaactactgaataatatccgctgtttcaagattgatcagccttctacaggagacgcttccggagccccagctgtatggagtcatggttacactgaagcttcgggggtaaaaaacaagttgtgtgtcgcagccctgtcggtgaataacttctgtgacaaccgcgaagccctgtatggtgtgtttgacggagaccggaatgtggaggtgccctaccttctccagtgcactatgagtgacattttggctgaagagctgcaaaaaacaaaaaacgaagaagaatacatggtcaatacattcattgtcatgcaaaggaaacttggaactgctgggcagaagcttggtggtgccgctgtcctttgtcatatcaagcatgaccctgtggatccaggaggatccttcaccttgacctctgctaatgtgggcaagtgccaaacagttctctgtcgaaatggaaagccgctgcctctgtccagatcttacatcatgagctgtgaagaagagctgaagaggattaaacagcacaaggccattatcactgaggatggcaaggtgaacggagtgactgagtccacgcgcatcctgggctacaccttcctccatcccagtgtggtgcctcgcccccacgtgcagtccgtgctcctgactccccaggatgagttcttcatcctaggcagtaaggggttgtgggacagcctgtccgtcgaggaggccgtggaagccgtgcgcaacgtgcccgatgccctggctgctgccaagaagctgtgtaccctggcccagagctacggctgccacgacagcatcagcgctgtggtggtgcagctcagtgtcactgaggacagcttctgctgctgcgagctcagcgccggtggggctgtgccaccacccagtcctggcatctttcctccctcagtgaacatggtgatcaaggatcggccctcagatgggctgggcgtgccgtcctccagcagcggcatggcttccgagattagcagtgagctctccacttctgagatgagcagcgaggtggggtcaacagcctccgatgagcccccgcccggagccctaagcgagaacagccctgcctaccccagtgagcagcgctgcatgctccaccccatctgtctgtccaactccttccagcgccagctatccagcgccacgttctctagcgccttctccgacaacggccttgacagtgacgatgaggagcccatcgagggcgtcttcaccaacggcagccgggtggaggtggaggtggacatccactgcagccgggccaaggagaaggagaaacagcagcacctgcttcaggtgccagcagaggccagtgatgagggcattgtcatcagcgccaacgaggatgagccaggtctgcccaggaaggcagacttctctgccgttgggaccattgggcgccggagggccaatggctctgttgcgccccaggaaaggagccacaatgtgatagaggtggctacagacgcacctcttcgaaagcctggaggctattttgctgccccggctcagccggatcctgatgatcagtttatcatacccccggagctggaagaggaggtcaaagaaatcatgaagcatcaccaggagcaacagcagcagcagcagccgccaccaccccctcagctccagccgcagctgccgcggcactaccagctggaccagctgccagattattacgacacgccactatgacccagccgagctgtttaacaaataaactaaccacaaaagactgagttgcaagagtctcccaggctcacattaaaccaggggttttactccacatccttcccccagacactgttcccaacctgtcatcgcagctaatctgtaggttctctttctttgggttatttttttaagtaatcaccactttcttctagtgatgctttaccaatatgatttacatttgttaacttctccccctaacatatcagatatgtaaagacaaagaacaaaaggtttaatatattacagagaaacagttaatgataatgtaatattttttaaaatggctttttgttgtttgtttggaaggcagggcaggctgccgttgctaaatgatttaataatattgtaattctgtatttctttggggggaaaaggcttttgttttgttttgttttgttttgttttgtttttgtcttgaaaataatagacatttgtagaatatggagactaactcctaggagttgctttactctgtcaggtgacttaagtcactgggattcactaattttctctgagagaacagctgattgagaatttccattgtaaatagctcagtgttgtatagtgaggcttacgatgttttgtagtcttggcgtaaggacacagcccaagtaactgacgtttcccctccccctcccctctgaggagcctgcctgcctcacaactcaccctcacttcactgaatgaggaggctgagcagctgcagtgtttctgtccggaggaaatggatcttaggccactggacaagaacctgcacccaagggccctgaacccattttcctcccctgtcccagccttcccactttgacagacacttttaactgtgttccttactgctgccacaatcagcatggttgtatagtgccccattaggccatttacatacccagagttatactcaagcagaatgcacaaatggacatgtcataatttttgttacaataaatatgaaatttacaagta

SEQ ID NO: 258621 - protein, 204 aa, Artificial Sequence
  derived and/or modified sequence
MTSEITYAEVRFKNEFKSSGINTASSAASKERTAPHKSNTGFPKLLCASLLIFFLLLAISFFIAFVKTAWSCCPKNWKSFSSNCYFISTESASWQDSEKDCARMEAHLLVINTQEEQDFIFQNLQEESAYFVGLSDPEGQRHWQWVDQTPYNESSTFWHPREPSDPNERCVVLNFRKSPKRWGWNDVNCLGPQRSVCEMMKIHL

SEQ ID NO: 258622 - DNA, 615 bp, Artificial Sequence
  derived and/or modified sequence
atgacctctgaaatcacttatgcggaggtaaggtttaagaacgaattcaaaagctcagggattaacacggcatcttctgctgcctctaaagaaagaacagcaccccacaagtcaaacacaggtttccccaagcttctttgtgcctcgctcctcatcttcttcctgctgctggcaatttcttttttcattgcatttgtgaagacggcttggtcatgctgtcccaaaaattggaagagcttttcttctaattgttactttatatcaacagaatctgcaagctggcaggacagcgaaaaggattgtgctcgcatggaagcccacttgctcgtgatcaacacacaagaggagcaggactttatctttcagaatctgcaggaagagagcgcttattttgttggcctaagtgatcctgagggacaacggcactggcagtgggtggaccagaccccctacaatgagtcctcaactttttggcaccctcgggagccgtctgacccaaatgagcgatgtgtcgtcctcaattttagaaagtccccaaagaggtggggatggaatgacgtgaattgtctcgggccgcagcgctccgtgtgcgagatgatgaagatccatctctag

SEQ ID NO: 258623 - DNA, 615 bp, Artificial Sequence
  derived and/or modified sequence
atgaccagcgagatcacctacgccgaggtgcgcttcaagaatgagttcaagagcagcggcatcaacacagccagcagcgctgccagcaaggagaggacagccccccacaagagcaacacaggcttccccaagctgctgtgtgccagcctgctgatcttcttcctgctgctggccatctccttcttcatcgcctttgtgaagacagcctggagctgctgccccaagaactggaagagcttcagcagcaactgctacttcatcagcacagaaagtgcctcctggcaggacagcgagaaggactgtgccaggatggaggcccacctgctggtgatcaacacccaggaggagcaggacttcatcttccagaacctgcaggaggagagcgcctactttgtgggcctgagtgaccctgagggccagaggcactggcagtgggtggaccagaccccctacaatgaaagcagcaccttctggcacccccgggagcccagcgaccccaatgaaagatgtgtggtgctgaacttcaggaagagccccaagcgctggggctggaatgatgtgaactgcctgggcccccagaggtctgtgtgtgagatgatgaagatccacctgtag

SEQ ID NO: 258624 - DNA, 615 bp, Artificial Sequence
  derived and/or modified sequence
atgaccagcgagatcacctacgccgaggtgcggttcaagaacgagtttaagagcagtggcatcaatactgcgagttccgccgcatctaaagaacgtaccgcccctcataaaagtaacacaggtttcccaaaactattgtgcgcctctctgcttattttttttctcttgcttgccatcagcttcttcatcgcctttgttaaaacagcgtggtcttgttgcccgaagaattggaagagtttctctagcaactgctactttatcagcaccgaatctgccagttggcaggacagtgagaaagactgcgctcgtatggaagcgcatctgctagtcattaacacacaggaagaacaggacttcatattccagaaccttcaagaggaatccgcctattttgtggggctgtctgacccagaaggacagcgtcattggcagtgggtggaccaaaccccatataatgagagttctacattctggcaccctcgagagccttcagaccccaatgagaggtgtgttgtactcaactttcgaaaatcccccaaacggtggggctggaacgatgtaaattgtttgggcccacagcggtctgtctgtgagatgatgaagattcacctatag

SEQ ID NO: 258625 - DNA, 615 bp, Artificial Sequence
  derived and/or modified sequence
atgacaagcgagattacttacgctgaggtgcgatttaaaaatgaattcaagtccagtggcataaacacggcctcatccgctgccagcaaagaacgcaccgcccctcataagtctaatactggttttcctaaactcctctgcgctagtctgctcatattttttcttctccttgctatcagcttctttatcgcattcgtgaagacagcctggtcctgctgccctaaaaactggaagtctttcagttccaactgttacttcattagcacagagtcggctagctggcaagattcagaaaaagactgtgctagaatggaagcacacctactagtgattaacacccaagaggaacaagactttatttttcagaacctgcaggaagagtccgcctactttgtcggcctaagcgaccctgaggggcaacgccactggcagtgggtggaccagaccccatacaacgagtcttccaccttttggcatccacgcgagcccagcgatcccaacgaaaggtgcgtggtgttaaatttcagaaagtctccaaagcggtggggttggaacgacgtgaactgtctgggaccacagcgtagtgtctgtgagatgatgaagattcacctgtag

SEQ ID NO: 258626 - DNA, 615 bp, Artificial Sequence
  derived and/or modified sequence
atgacttcggaaatcacttatgctgaagtgaggttcaaaaatgaattcaagtcctcaggcatcaacacagcctcttctgcagcttccaaggagaggactgcccctcacaaaagtaataccggattccccaagctgctttgtgcctcactgttgatatttttcctgctattggcaatctcattctttattgcttttgtcaagacagcctggagctgttgcccaaagaattggaagtcatttagttccaactgctactttatttctactgaatcagcatcttggcaagacagtgagaaggactgtgctagaatggaggctcacctgctggtgataaacactcaagaagagcaggatttcatcttccagaatctgcaagaagaatctgcttattttgtggggctctcagatccagaaggtcagcgacattggcaatgggttgatcagacaccatacaatgaaagttccacattctggcatccacgtgagcccagtgatcccaatgagcgctgcgttgtgctaaattttcgtaaatcacccaaaagatggggctggaatgatgttaattgtcttggtcctcaaaggtcagtttgtgagatgatgaagatccacttatga

SEQ ID NO: 258627 - DNA, 615 bp, Artificial Sequence
  derived and/or modified sequence
atgaccagcgagatcacctacgccgaggtgagattcaagaacgagttcaagagcagcggcatcaacaccgccagcagcgccgccagcaaggagagaaccgccccccacaagagcaacaccggcttccccaagctgctgtgcgccagcctgctgatcttcttcctgctgctggccatcagcttcttcatcgccttcgtgaagaccgcctggagctgctgccccaagaactggaagagcttcagcagcaactgctacttcatcagcaccgagagcgccagctggcaggacagcgagaaggactgcgccagaatggaggcccacctgctggtgatcaacacccaggaggagcaggacttcatcttccagaacctgcaggaggagagcgcctacttcgtgggcctgagcgaccccgagggccagagacactggcagtgggtggaccagaccccctacaacgagagcagcaccttctggcaccccagagagcccagcgaccccaacgagagatgcgtggtgctgaacttcagaaagagccccaagagatggggctggaacgacgtgaactgcctgggcccccagagaagcgtgtgcgagatgatgaagatccacctgtag

SEQ ID NO: 258628 - protein, 322 aa, Artificial Sequence
  derived and/or modified sequence
MSLRCGDAARTLGPRVFGRYFCSPVRPLSSLPDKKKELLQNGPDLQDFVSGDLADRSTWDEYKGNLKRQKGERLRLPPWLKTEIPMGKNYNKLKNTLRNLNLHTVCEEARCPNIGECWGGGEYATATATIMLMGDTCTRGCRFCSVKTARNPPPLDASEPYNTAKAIAEWGLDYVVLTSVDRDDMPDGGAEHIAKTVSYLKERNPKILVECLTPDFRGDLKAIEKVALSGLDVYAHNVETVPELQSKVRDPRANFDQSLRVLKHAKKVQPDVISKTSIMLGLGENDEQVYATMKALREADVDCLTLGQYMQPTRRHLKVNFS

SEQ ID NO: 258629 - DNA, 969 bp, Artificial Sequence
  derived and/or modified sequence
atgagcctgaggtgtggcgatgccgcccggaccttaggacctagggtgtttggcaggtacttctgttcaccagtaaggccgctgtccagtctgcccgacaagaagaaggagctgctgcagaacggcccagatctccaggatttcgtgtctggagatttagctgacagatccacctgggatgagtataagggcaacttgaaacggcagaaaggggagcgtctgcggttgccaccgtggctcaaaactgagatcccaatggggaaaaattataacaaactgaaaaacacactgcggaacctgaacctgcatacggtctgcgaggaggcccgatgcccaaacatcggggaatgttggggtggcggagaatatgccaccgcgacggcaacgatcatgttaatgggtgatacatgtacccgtggatgccggttctgctccgtgaaaacagcacggaaccccccccctttggacgccagtgaaccttacaatacagccaaagctattgccgaatggggcttggattacgtcgtgctgacaagtgtggatcgcgacgatatgccagatggcggcgctgagcacatagccaaaacagtctcttaccttaaggagcggaatcccaaaattttggtcgagtgtctcactccggactttcggggagatctgaaagctatcgagaaagtagccctgtctggtctggatgtttacgcacacaatgtcgagactgtccctgagctgcagagcaaggttcgagaccccagagcaaacttcgatcagtccctgagggtgctgaagcacgctaaaaaggttcagcctgacgtaatcagcaaaacctctatcatgctcggcctgggcgagaacgatgaacaggtctacgcgaccatgaaggctttgagggaggctgacgtggattgtctcactctcggtcaatacatgcagcccacccgcaggcacctgaaggtgaacttctcctag

SEQ ID NO: 258630 - DNA, 969 bp, Artificial Sequence
  derived and/or modified sequence
atgagcctgcgctgtggagatgctgcccggaccctgggcccccgggtgtttggccgctacttctgcagccctgtgcggcccctgagcagcctgcctgacaagaagaaggagctgctgcagaatggaccagacctgcaggactttgtgtctggggacctggccgacaggagcacctgggatgagtacaagggcaacctgaagaggcagaagggggagcggctgcggctgcccccctggctgaagacagagatccccatgggcaagaactacaacaagctgaagaacaccctgaggaacctgaacctgcacacagtgtgtgaggaggcccgctgccccaacatcggggagtgctggggcggcggggagtatgccacagccacagccaccatcatgctgatgggagacacctgcacccggggctgccgcttctgcagcgtgaagacagccaggaaccccccacccctggatgccagcgagccctacaacacagccaaggccatcgccgagtggggcctggactatgtggtgctgacctctgtggacagagatgacatgccagatggaggagctgagcacatcgccaagacagtgtcctacctgaaggagaggaaccccaagatcctggtggagtgcctgaccccagacttccggggggacctgaaggccatcgagaaggtggccctgagcggcctggatgtgtatgcccacaacgtggagaccgtgcctgagctgcagagcaaggtgcgggacccccgggccaactttgaccagagcctgcgggtgctgaagcacgccaagaaggtgcagccagatgtgatcagcaagaccagcatcatgctgggcctgggggagaatgatgagcaggtgtatgccaccatgaaggccctgcgggaggctgatgtggactgcctgaccctgggccagtacatgcagcccacccggcggcacctgaaggtgaacttctcctag

SEQ ID NO: 258631 - DNA, 1594 bp, Artificial Sequence
  derived and/or modified sequence
agccaatcgtggagcagcttggctgcttgtcataaatggagcgacgtaatttcgacctgtcctttcccgggagttagcgatccctcaacccctgcactgcgctagtcctaaagaggaaatgtctctacgctgcggggatgcagcccgcaccctggggccccgggtatttgggagatatttttgcagcccagtcagaccgttaagctccttgccagataaaaaaaaggaactcctacagaatggaccagaccttcaagattttgtatctggtgatcttgcagacaggagcacctgggatgaatataaaggaaacctaaaacgccagaaaggagaaaggttaagactacctccatggctaaagacagagattcccatggggaaaaattacaataaactgaaaaatactttgcggaatttaaatctccatacagtatgtgaggaagctcgatgtcccaatattggagagtgttggggaggtggagaatatgccaccgccacagccacgatcatgttgatgggtgacacatgtacaagaggttgcagattttgttctgttaagactgcaagaaatcctcctccactggatgccagtgagccctacaatactgcaaaggcaattgcagaatggggtctggattatgttgtcctgacatctgtggatcgagatgatatgcctgatgggggagctgaacacattgcaaagaccgtatcatatttaaaggaaaggaatccaaaaatccttgtggagtgtcttactcctgattttcgaggtgatctcaaagcaatagaaaaagttgctctgtcaggattagatgtgtatgcacataatgtagaaacagtcccggaattacagagtaaggttcgtgatcctcgggccaattttgatcagtccctacgtgtactgaaacatgccaagaaggttcagcctgatgttatttctaaaacatctataatgttgggtttaggcgagaatgatgagcaagtatatgcaacaatgaaagcacttcgtgaggcagatgtagactgcttgactttaggacaatatatgcagccaacaaggcgtcaccttaaggtgaatttttcctgaaaaatctagtggctaaaagaaaaacaaaagacctctaaaacttcaacaagaccttcaagatcacagaaatttttaaaatttgattccagttaataacagaggtggtgccagaatgcctggactgcagtggatgtgccccacctctttgcttaaaaaaaaaaatgtcaatagccaggcatagtggctcacgcctgtaatcccagcactttaggaggccaaggcgggtggatcacctgaggtcaggagttcgagaccagcctggccaacatggtgaaatcctgtctccactaaaaacacaaaaattagtcaggcgtggtagtgggtgcctgtaatcccagctactcgggaggctaaggcaggagaatcacttgaacctgggagggggaggttgcagtgagccaagatcgctccattgccctccagcctgggtgacaagagcaaaactccatctcaaataaataaaaaggaaaaaaaagtcaataaactgtacaaatttaattacagtaa

SEQ ID NO: 258632 - DNA, 969 bp, Artificial Sequence
  derived and/or modified sequence
atgagcctgcggtgcggcgacgccgcccggaccctgggcccccgggtcttcggccggtatttttgttctcccgtgcggccgctgtcctctctgccagataagaagaaagaactcctgcagaacggccccgatctgcaggattttgtctctggggacttggcagatagatctacatgggatgaatacaagggcaacctgaagaggcagaagggagaaagactgaggttaccaccttggctgaagacagagattcccatgggcaagaactataacaagctgaagaataccctacggaatttgaacctccatactgtctgcgaagaggcccgctgtccaaatatcggtgagtgttggggtggcggtgagtacgctaccgcaactgctaccatcatgctgatgggcgatacttgtacaaggggctgtagattttgcagtgtgaaaacggcacgcaacccgcccccattggacgccagtgagccctacaacacagctaaagcaattgcagagtggggactggattatgtcgtgctgactagcgtcgaccgggacgatatgcctgacggcggagccgaacacattgcaaagaccgtgtcctacttaaaggaaagaaatcccaaaatcctagtggaatgtctcacacccgattttaggggggacctaaaagccatcgaaaaggtggctctgtctgggctggatgtttacgcccacaacgtcgagactgtgcctgaactgcagagtaaagtgcgggatcccagggccaacttcgaccaatccctccgggtgcttaagcacgctaaaaaagttcaaccagacgtcatatccaaaaccagcatcatgctgggcttgggcgagaatgatgaacaggtatacgccaccatgaaggcgctcagagaagccgatgtggattgcctgactttagggcagtatatgcagcccacccgccgccacctgaaagtgaatttctcctag

SEQ ID NO: 258633 - DNA, 969 bp, Artificial Sequence
  derived and/or modified sequence
atgtccctcagatgtggggatgctgccaggactctgggcccacgcgtcttcggcaggtacttctgctcacctgtacgcccactaagttctctacctgataaaaaaaaggagttgttacagaacggtcctgatctccaggacttcgtttctggtgacctcgcggatagatctacttgggacgagtataaagggaatcttaaacggcagaaaggcgagaggctaaggctcccgccatggttgaagaccgaaattccaatgggaaagaactacaacaaactgaagaataccctacgcaacctgaacctgcacaccgtctgcgaggaggcccgttgcccgaatatcggagagtgttggggcggtggcgaatacgccaccgcaactgccacaatcatgctgatgggtgatacctgtactcgaggctgtaggttctgctctgtgaaaacggcaagaaatcccccacccttggatgcctcagaaccgtacaacacggccaaagcgatcgcggagtggggcctggactacgtggtgctgacttccgtggaccgtgacgatatgcccgatgggggtgccgagcacatcgccaaaactgtgtcctatctgaaggaaagaaacccaaaaattctggtggagtgtttgaccccagacttccgcggagatctgaaggccatcgaaaaagtggctctgagcgggctggacgtctacgcgcacaacgtggaaactgtgcccgaactccagtccaaggtacgagatccccgagcgaattttgaccagagcctgagggttctcaaacacgccaagaaggtccaacctgacgtaatctccaagacctcaattatgctcggcctgggggaaaatgatgagcaggtgtatgctacaatgaaggccctcagggaggcagatgtggactgcctgaccctcggacagtacatgcagccaacaagacgacatttgaaggtgaatttcagctag

SEQ ID NO: 258634 - DNA, 969 bp, Artificial Sequence
  derived and/or modified sequence
atgagcctgagatgcggcgacgccgccagaaccctgggccccagagtgttcggcagatacttctgcagccccgtgagacccctgagcagcctgcccgacaagaagaaggagctgctgcagaacggccccgacctgcaggacttcgtgagcggcgacctggccgacagaagcacctgggacgagtacaagggcaacctgaagagacagaagggcgagagactgagactgcccccctggctgaagaccgagatccccatgggcaagaactacaacaagctgaagaacaccctgagaaacctgaacctgcacaccgtgtgcgaggaggccagatgccccaacatcggcgagtgctggggcggcggcgagtacgccaccgccaccgccaccatcatgctgatgggcgacacctgcaccagaggctgcagattctgcagcgtgaagaccgccagaaaccccccccccctggacgccagcgagccctacaacaccgccaaggccatcgccgagtggggcctggactacgtggtgctgaccagcgtggacagagacgacatgcccgacggcggcgccgagcacatcgccaagaccgtgagctacctgaaggagagaaaccccaagatcctggtggagtgcctgacccccgacttcagaggcgacctgaaggccatcgagaaggtggccctgagcggcctggacgtgtacgcccacaacgtggagaccgtgcccgagctgcagagcaaggtgagagaccccagagccaacttcgaccagagcctgagagtgctgaagcacgccaagaaggtgcagcccgacgtgatcagcaagaccagcatcatgctgggcctgggcgagaacgacgagcaggtgtacgccaccatgaaggccctgagagaggccgacgtggactgcctgaccctgggccagtacatgcagcccaccagaagacacctgaaggtgaacttcagctag

SEQ ID NO: 258635 - protein, 428 aa, Artificial Sequence
  derived and/or modified sequence
MGPPPGAGVSCRGGCGFSRLLAWCFLLALSPQAPGSRGAEAVWTAYLNVSWRVPHTGVNRTVWELSEEGVYGQDSPLEPVAGVLVPPDGPGALNACNPHTNFTVPTVWGSTVQVSWLALIQRGGGCTFADKIHLAYERGASGAVIFNFPGTRNEVIPMSHPGAVDIVAIMIGNLKGTKILQSIQRGIQVTMVIEVGKKHGPWVNHYSIFFVSVSFFIITAATVGYFIFYSARRLRNARAQSRKQRQLKADAKKAIGRLQLRTLKQGDKEIGPDGDSCAVCIELYKPNDLVRILTCNHIFHKTCVDPWLLEHRTCPMCKCDILKALGIEVDVEDGSVSLQVPVSNEISNSASSHEEDNRSETASSGYASVQGTDEPPLEEHVQSTNESLQLVNHEANSVAVDVIPHVDNPTFEEDETPNQETAVREIKS

SEQ ID NO: 258636 - DNA, 1287 bp, Artificial Sequence
  derived and/or modified sequence
atggggcccccacccggcgctggcgtctcttgccgaggtggatgtggatttagccggctcctggcctggtgttttttgctggcgttgtcccctcaagccccaggctcacgtggtgcggaggccgtatggacagcctacctgaatgtgagttggagggtcccgcacacaggcgtcaacagaacggtgtgggagctgtccgaggagggagtgtacgggcaagattcccccctggagcccgtggccggcgttttagtcccaccagatggtcccggcgccctgaacgcatgtaaccctcataccaacttcacagtccccaccgtctggggtagtacagttcaggtaagttggctggccttaattcagagggggggcggctgtacgtttgcggacaaaatccatttggcatatgagcgaggagcctccggcgccgtcatatttaatttccctggcacacggaacgaagtaattcctatgagtcacccgggggcggtggatatcgtggctatcatgattggtaaccttaaggggactaagatcctgcagtctatacaacgtggcattcaggtgacgatggtgattgaggtcgggaagaaacacgggccttgggtgaatcattactcaattttcttcgtcagtgtttccttcttcataattactgccgctaccgttggatattttatcttctactccgcccggcggcttagaaacgctagggcccagtcgagaaagcagcggcagctgaaagcagatgctaagaaggccattggtagactccagttacggaccctgaagcagggcgacaaggagataggtcccgatggtgattcctgtgccgtgtgcatagaactgtacaaacccaacgacctggtaaggatcttgacatgcaaccatatttttcataagacatgtgtagatccttggctcctggagcacaggacctgccccatgtgtaaatgcgacatcctcaaggctcttggcatcgaagtggacgtggaggacggtagcgtttcactccaggtgcctgtgtccaacgagattagtaacagcgcctcttcgcacgaggaagataatcgcagtgaaacagcttcatcgggttacgcgtctgtccaaggcacggacgaacccccactggaagaacacgtgcaatcaacaaacgaatcccttcagctggtgaaccacgaggcaaattccgttgctgtagacgtaattccacatgtcgataatccgacttttgaagaggacgaaacacccaaccaggaaaccgccgtacgggaaatcaaatcgtag

SEQ ID NO: 258637 - DNA, 1287 bp, Artificial Sequence
  derived and/or modified sequence
atgggccccccacctggagctggggtgtcctgccggggcggctgcggcttcagccggctgctggcctggtgcttcctgctggccctgagcccccaggcccctggcagcagaggagctgaggccgtgtggacagcctacctgaatgtgtcctggagggtgccccacactggagtgaacagaacagtgtgggagctgtctgaggagggcgtgtatggccaggacagccccctggagcctgtggccggcgtgctggtgcccccagatggccctggggccctgaatgcctgcaacccccacaccaacttcaccgtgcccaccgtgtggggcagcacagtgcaggtgtcctggctggccctgatccagagaggaggcggctgcacctttgctgacaagatccacctggcctatgaaagaggagccagcggggctgtgatcttcaacttccctggcaccagaaatgaagtcatccccatgagccaccctggagctgtggacatcgtggccatcatgattggcaacctgaagggcaccaagatcctgcagagcatccagaggggcatccaggtgaccatggtgattgaggtgggcaagaagcacggcccctgggtgaaccactacagcatcttctttgtgtctgtgtccttcttcatcatcacagctgccaccgtgggctacttcatcttctacagcgcccggcggctgagaaatgcccgggcccagagcaggaagcagaggcagctgaaggcagatgccaagaaggccatcggccgcctgcagctgcggaccctgaagcagggcgacaaggagatcggcccagatggagacagctgtgctgtgtgcatcgagctgtacaagcccaatgacctggtgcgcatcctgacctgcaaccacatcttccacaagacctgtgtggacccctggctgctggagcacaggacctgccccatgtgcaagtgtgacatcctgaaggccctgggcatcgaggtggatgtggaggatggctctgtgtccctgcaggtgcctgtgtccaatgagatcagcaacagcgccagcagccatgaggaggacaacagaagtgaaacagccagcagcggctacgcctctgtgcagggcacagatgagccccccctggaggagcacgtgcagagcaccaatgaaagcctgcagctggtgaaccacgaggccaacagcgtggccgtggatgtgatcccccacgtggacaaccccacctttgaagaagatgagacccccaaccaggagacagctgtgcgggagatcaagagctag

SEQ ID NO: 258638 - DNA, 1287 bp, Artificial Sequence
  derived and/or modified sequence
atgggccccccccccggcgccggcgtgagctgccggggcggctgcgggttcagcagactgcttgcctggtgttttctgcttgcgttaagcccacaggcacccgggagtcggggcgccgaggctgtgtggaccgcctacctgaatgtgtcttggcgcgtgccccatacgggggtaaacagaaccgtctgggagttgagtgaagagggcgtgtacggacaagacagccccttggaacctgtggccggggtattagtgcctcctgatgggccgggcgccctaaacgcctgtaatccccacactaactttaccgtgccgactgtgtggggcagcacagtgcaagtttcgtggttggctctaatccagaggggaggcggctgcaccttcgccgataagattcatcttgcgtacgagcggggggcctctggcgcagtgatctttaatttccctggcacaaggaatgaggtgatccctatgtcacatccaggagctgtggatatcgtcgccatcatgatcggcaatctgaaggggacgaaaattctgcagtctatccagcgcggtattcaggtgacaatggtcatagaagtcggaaagaagcatggaccctgggtgaatcactactccatttttttcgtaagcgtttcctttttcatcattacggccgccactgtggggtacttcattttctatagcgccaggcgattacggaatgcgcgggcacagtcgaggaagcaacggcagttgaaagccgacgcgaagaaagcaataggacgtctacagctgcgtaccctgaagcagggcgataaggaaataggaccagatggcgacagctgcgctgtctgcattgagctttacaaacctaacgatctggtaagaatcctgacctgcaatcatatttttcataaaacctgcgtggatccttggctgctcgaacaccgaacgtgtcccatgtgcaaatgtgacattctgaaagccctgggcatcgaggttgatgtggaggatggctccgttagtctccaagtgccagttagtaatgagatcagcaacagtgcctctagccatgaagaggacaaccgctctgaaaccgcctcatcagggtacgcctccgtgcagggaaccgatgagcctccgctggaggagcatgtgcaaagcaccaatgagtctttgcagctggttaaccatgaagcgaacagtgtagccgtggacgtcattcctcatgtggataatcctacgtttgaagaggatgaaacgccaaaccaagaaacagctgtgcgtgaaattaaatcctag

SEQ ID NO: 258639 - DNA, 1287 bp, Artificial Sequence
  derived and/or modified sequence
atgggacccccacccggagcgggagtgtcctgtagagggggttgtggattctccagactccttgcatggtgtttcctactcgccctctccccccaggccccaggcagccgcggagccgaggccgtgtggaccgcctacttaaatgtatcctggcgcgtgccccacacaggggttaaccgaaccgtatgggaactgtccgaagaaggagtctatggacaggactctcccctagaacccgttgctggggttctagtgccccctgatggcccaggagccttaaacgcctgtaaccctcatacaaactttacagtgccaactgtgtgggggagcaccgtgcaggtctcatggctggcccttatccaacggggagggggttgcactttcgctgacaagatccatctagcctacgagcgaggcgcaagtggcgcagtgatcttcaactttcccggtacccgaaacgaagtaatcccaatgagccaccctggcgcagtagacatcgtggctataatgatcgggaatctgaaagggacaaaaatcctccaaagcatccagagaggaattcaggtaactatggtgattgaggtggggaaaaagcatggcccttgggtcaatcattattcaatattctttgtttctgtgtcattcttcatcatcaccgctgctaccgtaggatacttcattttctacagcgctagaaggctgcggaatgcacgcgctcagtcgagaaagcagcggcagctgaaggctgacgctaagaaggccatcgggcgtctgcagctccgcacattgaagcagggagacaaagagattggcccagacggagactcctgcgccgtctgcatcgagctgtacaagcccaacgatctggttcggatactcacatgtaaccacattttccacaagacatgcgtggatccctggctgctcgaacataggacgtgtccaatgtgcaagtgtgatattcttaaagctttgggtatagaggttgacgtagaggatggtagcgtatccctgcaggttccggtgagtaacgagatcagtaactctgcttcttctcacgaagaggacaatcgatccgagaccgcctcttccgggtatgcttccgtgcaggggacagacgagccacctttggaagagcacgttcaatccaccaacgagtctctgcagcttgtgaaccacgaagctaattccgttgcggtggacgtcatcccccacgtcgacaacccaacattcgaagaggatgagacgccaaatcaggagaccgcggttcgagagattaagagttag

SEQ ID NO: 258640 - DNA, 2817 bp, Artificial Sequence
  derived and/or modified sequence
gcttcacgctaaagccccagagcccgacgcggcagccgcggtagcggagaagactggagctccgaggagctgcatctgcggcaacctgtgtgctgacgctacgtgcctcctggctccgacgtagctcgcagctccccagtctcactccattccttccccacctggcgcgcacctgctcaagaccagggtcctgccaagcgctaggagggcgcgtgccaggggcgctagggaactgcggagcgcgcgcgccatggggccgccgcctggggccggggtctcctgccgcggtggctgcggcttttccagattgctggcatggtgcttcctgctggccctgagtccgcaggcacccggttcccggggggctgaagcagtgtggaccgcgtacctcaacgtgtcctggcgggttccgcacacgggagtgaaccgtacggtgtgggagctgagcgaggagggcgtgtacggccaggactcgccgctggagcctgtggctggggtcctggtaccgcccgacgggcccggggcgcttaacgcctgtaacccgcacacgaatttcacggtgcccacggtttggggaagcaccgtgcaagtctcttggttggccctcatccaacgcggcgggggctgcaccttcgcagacaagatccatctggcttatgagagaggggcgtctggagccgtcatctttaacttccccgggacccgcaatgaggtcatccccatgtctcacccgggtgcagtagacattgttgcaatcatgatcggcaatctgaaaggcacaaaaattctgcaatctattcaaagaggcatacaagtgacaatggtcatagaagtagggaaaaaacatggcccttgggtgaatcactattcaatttttttcgtttctgtgtccttttttattattacggcggcaactgtgggctattttatcttttattctgctcgaaggctacggaatgcaagagctcaaagcaggaagcagaggcaattaaaggcagatgctaaaaaagctattggaaggcttcaactacgcacactgaaacaaggagacaaggaaattggccctgatggagatagttgtgctgtgtgcattgaattgtataaaccaaatgatttggtacgcatcttaacgtgcaaccatattttccataagacatgtgttgacccatggctgttagaacacaggacttgccccatgtgcaaatgtgacatactcaaagctttgggaattgaggtggatgttgaagatggatcagtgtctttacaagtccctgtatccaatgaaatatctaatagtgcctcctcccatgaagaggataatcgcagcgagaccgcatcatctggatatgcttcagtacagggaacagatgaaccgcctctggaggaacacgtgcagtcaacaaatgaaagtctacagctggtaaaccatgaagcaaattctgtggcagtggatgttattcctcatgttgacaacccaacctttgaagaagacgaaactcctaatcaagagactgctgttcgagaaattaaatcttaaaatctgtgtaaatagaaaacttgaaccattagtaataacagaactgccaatcagggcctagtttctattaataaattggataaatttaataaaataagagtgatactgaaagtgctcagatgactaatattatgctatagttaaatggcttaaaatatttaacctgttaacttttttccacaaactcattataatatttttcataggcaagtttcctctcagtagtgataacaacatttttagacattcaaaactgtcttcaagaagtcacgtttttcatttataacaattttcttataaaaacatgttgcttttaaaatgtggagtagctgtaatcactttattttatgatagtatcttaatgaaaaatactacttctttagcttgggctacatgtgtcagggtttttctccaggtgcttatattgatctggaattgtaatgtaaaaagcaatgcaaacttaggcgagtacttcttgaaatgtctatttaagctgctttaagttaatagaaaagattaaagcaaaatattcatttttactttttcttatttttaaaattaggctgaatgtacttcatgtgatttgtcaaccatagtttatcagagattatggacttaattgattggtatattagtgacatcaacttgacacaagattagacaaaaaattccttacaaaaatactgtgtaactatttctcaaacttgtgggatttttcaaaagctcagtatatgaatcatcatactgtttgaaattgctaatgacagagtaagtaacactaatattggtcattgatcttcgttcatgaattagtctacagaaaaaaaatgttctgtaaaattagtctgttgaaaatgttttccaaacaatgttactttgaaaattgagtttatgtttgacctaaatgggctaaaattacattagataaactaaaattctgtccgtgtaactataaattttgtgaatgcattttcctggtgtttgaaaaagaagggggggagaattccaggtgccttaatataaagtttgaagcttcatccaccaaagttaaatagagctatttaaaaatgcactttatttgtactctgtgtggcttttgttttagaattttgttcaaattatagcagaatttaggcaaaaataaaacagacatgtatttttgtttgctgaatggatgaaaccattgcattcttgtacactgatttgaaatgctgtaaatatgtcccaatttgtattgattctctttaaatataaaatgtaaataaaatattccaataaaa

SEQ ID NO: 258641 - DNA, 1287 bp, Artificial Sequence
  derived and/or modified sequence
atgggccccccccccggcgccggcgtgagctgcagaggcggctgcggcttcagcagactgctggcctggtgcttcctgctggccctgagcccccaggcccccggcagcagaggcgccgaggccgtgtggaccgcctacctgaacgtgagctggagagtgccccacaccggcgtgaacagaaccgtgtgggagctgagcgaggagggcgtgtacggccaggacagccccctggagcccgtggccggcgtgctggtgccccccgacggccccggcgccctgaacgcctgcaacccccacaccaacttcaccgtgcccaccgtgtggggcagcaccgtgcaggtgagctggctggccctgatccagagaggcggcggctgcaccttcgccgacaagatccacctggcctacgagagaggcgccagcggcgccgtgatcttcaacttccccggcaccagaaacgaggtgatccccatgagccaccccggcgccgtggacatcgtggccatcatgatcggcaacctgaagggcaccaagatcctgcagagcatccagagaggcatccaggtgaccatggtgatcgaggtgggcaagaagcacggcccctgggtgaaccactacagcatcttcttcgtgagcgtgagcttcttcatcatcaccgccgccaccgtgggctacttcatcttctacagcgccagaagactgagaaacgccagagcccagagcagaaagcagagacagctgaaggccgacgccaagaaggccatcggcagactgcagctgagaaccctgaagcagggcgacaaggagatcggccccgacggcgacagctgcgccgtgtgcatcgagctgtacaagcccaacgacctggtgagaatcctgacctgcaaccacatcttccacaagacctgcgtggacccctggctgctggagcacagaacctgccccatgtgcaagtgcgacatcctgaaggccctgggcatcgaggtggacgtggaggacggcagcgtgagcctgcaggtgcccgtgagcaacgagatcagcaacagcgccagcagccacgaggaggacaacagaagcgagaccgccagcagcggctacgccagcgtgcagggcaccgacgagccccccctggaggagcacgtgcagagcaccaacgagagcctgcagctggtgaaccacgaggccaacagcgtggccgtggacgtgatcccccacgtggacaaccccaccttcgaggaggacgagacccccaaccaggagaccgccgtgagagagatcaagagctag

SEQ ID NO: 258642 - protein, 210 aa, Artificial Sequence
  derived and/or modified sequence
MAGLGLGSAVPVWLAEDDLGCIICQGLLDWPATLPCGHSFCRHCLEALWGARDARRWACPTCRQGAAQQPHLRKNTLLQDLADKYRRAAREIQAGSDPAHCPCPGSSSLSSAAARPRRRPELQRVAVEKSITEVAQELTELVEHLVDIVRSLQNQRPLSESGPDNELSILGKENSWKPRLPPHAHCLTRATLHSGELLGLLSGPSIQPLT

SEQ ID NO: 258643 - protein, 96 aa, Artificial Sequence
  derived and/or modified sequence
AQQPHLRKNTLLQDLADKYRRAAREIQAGSDPAHCPCPGSSSLSSAAARPRRRPELQRENSWKPRLPPHAHCLTRATLHSGELLGLLSGPSIQPLT

SEQ ID NO: 258644 - DNA, 633 bp, Artificial Sequence
  derived and/or modified sequence
atggctgggctgggcctgggctcagctgtcccggtatggcttgcagaagatgatctcggttgcataatctgtcaagggctgctggactggccagcaacgttaccctgtggacatagcttctgtagacactgcttggaggcactgtggggtgcgcgcgatgcccggagatgggcctgtcccacttgcagacaaggcgctgcccagcagccccacctgcgtaaaaacaccctgctgcaagacctagctgataagtacaggagggccgctcgggaaattcaagccgggagcgaccccgctcattgtccgtgtccaggctccagtagcttgagcagcgccgcagcccgcccccgaaggcgcccagagctccagcgtgttgctgtagagaagtcaatcaccgaagtcgcccaggagctcactgagttagttgagcatttggttgatatcgtgagaagcctccagaatcagcgacctttatctgaaagcggacctgacaacgaactcagcatcctaggtaaagagaattcatggaagcccaggctgccaccccatgcccactgcttaacccgggccaccttacactcaggggagcttctcggactgctaagtggaccctccatccagccactgacttag

SEQ ID NO: 258645 - DNA, 291 bp, Artificial Sequence
  derived and/or modified sequence
gctcagcagcctcatttgcggaagaacaccctgctgcaggacctggcagacaaatatcgtcgagcggcccgcgaaatacaggccggaagcgaccctgcccattgcccctgccctggcagctccagcctatcgagcgctgccgctagaccgcgtagaaggccagagctgcagcgggagaacagttggaagccccggctgcctcctcacgctcattgtctcacgagagcaacactgcattctggggagttattgggtctcttatccggcccatctatccagcccctgacctag

SEQ ID NO: 258646 - DNA, 633 bp, Artificial Sequence
  derived and/or modified sequence
atggccggcctgggcctgggcagcgctgtgcctgtgtggctggccgaggatgacctgggctgcatcatctgccagggcctgctggactggccagccaccctgccctgtggccacagcttctgccgccactgcctggaggccctgtggggcgccagagatgcccggcgctgggcctgccccacctgccggcagggcgccgcccagcagccccacctgaggaagaacaccctgctgcaggacctggccgacaagtaccgccgggccgcccgggagatccaggccggcagtgaccctgcccactgcccctgccccggcagcagcagcctgagcagcgctgctgcccggccccggcggcggcctgagctgcagagggtggccgtggagaagagcatcacagaggtggcccaggagctgacagagctggtggagcacctggtggacatcgtgcgcagcctgcagaaccagaggcccctgtctgagagcggccctgacaatgagctgagcatcctgggcaaggaaaattcctggaagccccggctgccccctcatgcccactgcctgacccgggccaccctgcacagcggggagctgctgggcctgctgagcggccccagcatccagcccctgacctag

SEQ ID NO: 258647 - DNA, 291 bp, Artificial Sequence
  derived and/or modified sequence
gcccagcagccccacctgaggaagaacaccctgctgcaggacctggccgacaagtaccgccgggccgcccgggagatccaggccggcagtgaccctgcccactgcccctgccccggcagcagcagcctgagcagcgctgctgcccggccccggcggcggcctgagctgcagagagaaaattcctggaagccccggctgccccctcatgcccactgcctgacccgggccaccctgcacagcggggagctgctgggcctgctgagcggccccagcatccagcccctgacctag

SEQ ID NO: 258648 - DNA, 633 bp, Artificial Sequence
  derived and/or modified sequence
atggccggcctgggcctgggcagcgccgtgcccgtgtggctggccgaagatgaccttggctgtatcatttgccaaggattgctagactggccagccacattaccctgtggacacagcttctgtaggcattgcctggaggctctgtggggagcgcgcgatgcgagacgctgggcctgccctacttgccgccagggagctgcccaacagccccatctgcgcaagaacacgctactacaggacctggccgataagtatcggagggccgctagggaaatccaggccgggtccgacccagcccactgcccatgcccaggcagtagctccctctcgtctgcggctgctcggccccgacggcggcctgagttacaacgggtagccgtagagaaaagtataaccgaggtcgctcaagagttgaccgagctagtggaacaccttgtagatattgtaagatccctgcaaaaccaaagaccactcagcgagtcaggacctgataacgagttgtccatcctgggcaaggagaattcatggaaaccgcgactgcccccccacgcgcactgtctgacacgagctactctgcatagtggagagttactcggactcctgagcgggcctagcatccagccattaacttag

SEQ ID NO: 258649 - DNA, 291 bp, Artificial Sequence
  derived and/or modified sequence
gcccagcagccccacctgcggaagaacaccctgctgcaggacctggccgataagtaccgacgtgctgcgcgagaaattcaggccggatctgacccagcgcattgtccttgcccagggtcaagctccctgtcaagcgctgctgctagaccacgcaggcgacccgaactgcagcgagaaaattcgtggaagcctcgactcccccctcatgcccactgcctaacccgggccacactccactccggcgagttgctcggtctcttgtctggcccatcaatccagccactcacatag

SEQ ID NO: 258650 - DNA, 633 bp, Artificial Sequence
  derived and/or modified sequence
atggcgggactgggattgggcagcgccgtgccagtgtggttggccgaggatgatctggggtgtattatctgtcagggtctcttggactggcccgctactttgccatgcggtcactctttttgccgacactgtctggaggctctttggggagcaagagatgccagaagatgggcttgcccaacttgtcgtcagggtgccgctcagcaaccacacttgcgcaaaaacacactcctgcaagacctggccgacaaatatcgcagggccgcacgggaaattcaggctggatccgaccctgcccattgcccttgccctggatcttcttcccttagcagtgccgctgctagacctcgaagacgtccggagttacagcgcgtcgcggtggagaagagcattactgaagtcgcacaggagcttacagagttagtggaacacttggtcgacattgtgagatcccttcagaatcagcggcctctcagcgagagtggtcccgacaatgaactctctatcctcgggaaggaaaattcgtggaaacctagactcccccctcatgcccattgcctgacacgcgcaacattgcactcaggagaacttctcggattattaagtgggccaagcatccagccactgacttag

SEQ ID NO: 258651 - DNA, 291 bp, Artificial Sequence
  derived and/or modified sequence
gcacagcagccacatctgcgcaagaacaccctgctacaggatctcgctgacaaataccgcagggctgctagggagatccaggccggttccgaccccgctcattgcccatgtcctggaagtagctcactgtcatctgctgctgctcgccctagacgaaggccagaacttcagagagaaaactcatggaagccccgtctccccccacacgctcattgccttacccgagccacactgcatagtggcgagttgttgggcctgctttcgggaccaagcattcaacctctgacctag

SEQ ID NO: 258652 - DNA, 633 bp, Artificial Sequence
  derived and/or modified sequence
atggccggcctgggcctgggcagcgccgtgcccgtgtggctggccgaggacgacctgggctgcatcatctgccagggcctgctggactggcccgccaccctgccctgcggccacagcttctgcagacactgcctggaggccctgtggggcgccagagacgccagaagatgggcctgccccacctgcagacagggcgccgcccagcagccccacctgagaaagaacaccctgctgcaggacctggccgacaagtacagaagagccgccagagagatccaggccggcagcgaccccgcccactgcccctgccccggcagcagcagcctgagcagcgccgccgccagacccagaagaagacccgagctgcagagagtggccgtggagaagagcatcaccgaggtggcccaggagctgaccgagctggtggagcacctggtggacatcgtgagaagcctgcagaaccagagacccctgagcgagagcggccccgacaacgagctgagcatcctgggcaaggagaacagctggaagcccagactgcccccccacgcccactgcctgaccagagccaccctgcacagcggcgagctgctgggcctgctgagcggccccagcatccagcccctgacctag

SEQ ID NO: 258653 - DNA, 291 bp, Artificial Sequence
  derived and/or modified sequence
gcccagcagccccacctgagaaagaacaccctgctgcaggacctggccgacaagtacagaagagccgccagagagatccaggccggcagcgaccccgcccactgcccctgccccggcagcagcagcctgagcagcgccgccgccagacccagaagaagacccgagctgcagagagagaacagctggaagcccagactgcccccccacgcccactgcctgaccagagccaccctgcacagcggcgagctgctgggcctgctgagcggccccagcatccagcccctgacctag

SEQ ID NO: 258654 - protein, 1117 aa, Artificial Sequence
  derived and/or modified sequence
MEILWKTLTWILSLIMASSEFHSDHRLSYSSQEEFLTYLEHYQLTIPIRVDQNGAFLSFTVKNDKHSRRRRSMDPIDPQQAVSKLFFKLSAYGKHFHLNLTLNTDFVSKHFTVEYWGKDGPQWKHDFLDNCHYTGYLQDQRSTTKVALSNCVGLHGVIATEDEEYFIEPLKNTTEDSKHFSYENGHPHVIYKKSALQQRHLYDHSHCGVSDFTRSGKPWWLNDTSTVSYSLPINNTHIHHRQKRSVSIERFVETLVVADKMMVGYHGRKDIEHYILSVMNIVAKLYRDSSLGNVVNIIVARLIVLTEDQPNLEINHHADKSLDSFCKWQKSILSHQSDGNTIPENGIAHHDNAVLITRYDICTYKNKPCGTLGLASVAGMCEPERSCSINEDIGLGSAFTIAHEIGHNFGMNHDGIGNSCGTKGHEAAKLMAAHITANTNPFSWSACSRDYITSFLDSGRGTCLDNEPPKRDFLYPAVAPGQVYDADEQCRFQYGATSRQCKYGEVCRELWCLSKSNRCVTNSIPAAEGTLCQTGNIEKGWCYQGDCVPFGTWPQSIDGGWGPWSLWGECSRTCGGGVSSSLRHCDSPAPSGGGKYCLGERKRYRSCNTDPCPLGSRDFREKQCADFDNMPFRGKYYNWKPYTGGGVKPCALNCLAEGYNFYTERAPAVIDGTQCNADSLDICINGECKHVGCDNILGSDAREDRCRVCGGDGSTCDAIEGFFNDSLPRGGYMEVVQIPRGSVHIEVREVAMSKNYIALKSEGDDYYINGAWTIDWPRKFDVAGTAFHYKRPTDEPESLEALGPTSENLIVMVLLQEQNLGIRYKFNVPITRTGSGDNEVGFTWNHQPWSECSATCAGGVQRQEVVCKRLDDNSIVQNNYCDPDSKPPENQRACNTEPCPPEWFIGDWLECSKTCDGGMRTRAVLCIRKIGPSEEETLDYSGCLTHRPVEKEPCNNQSCPPQWVALDWSECTPKCGPGFKHRIVLCKSSDLSKTFPAAQCPEESKPPVRIRCSLGRCPPPRWVTGDWGQCSAQCGLGQQMRTVQCLSYTGQASSDCLETVRPPSMQQCESKCDSTPISNTEECKDVNKVAYCPLVLKFKFCSRAYFRQMCCKTCQGH

SEQ ID NO: 258655 - DNA, 70 bp, Artificial Sequence
  derived and/or modified sequence
aatgcaatcatcaactggcttcgaatggaatcatcaagaatggaatcgaatggaatcatcgaatggactc

SEQ ID NO: 258656 - DNA, 3391 bp, Artificial Sequence
  derived and/or modified sequence
gctgcaattcaagttggctgggggccggtagtgagatctagggctacttcaacaaaactttgctgcccttcctgctcctcttgtcttcttttctcctgataccttttgatgctctgcacatgttatttgcatagcaaaggcactaagctttccaggaagagagggcaccacttccacccccaataagtcttttttcccgtcttttctttcttttcctttccttttttggggggtggggagggagagaaagggggtttgcaaaggcagcatctcagagtgatagcctagatgtattgaaggcatctcttattctgccaaatcggaaagtcagttctctaaagcccgggttagccagaccatagggttttattctggctgcagaataactggctggtgtggctttgcaaaggggggcaaaaaataaaaaaataaaaaaaattaaaaaaagttagagaggagagggagtacgtgagtcgtccagtgcaatctctattgtctgaaacttactttttatcagaatttgaagatgaaaacggttaaaaaatggccatactttagtaactaatcagcctaatgctttgcttatgaaaacttttaccatcattatttttttcattttggattgagaaaatgaatccagatatagaagaaagtgcaggatgttggataaaagtggctcttaaacagtggaacatccaataactaatttgcaagaagttttaaagaaataaaattgttatgcttcgattttggtatggtattgactctttagcacataggtagccctcaaaaaaatcatccagttttctaaattatggaaattttgtggaagacgttgacctggattttgagcctcatcatggcttcatcggaatttcatagtgaccacaggctttcatacagttctcaagaggaattcctgacttatcttgaacactaccagctaactattccaataagggttgatcaaaatggagcatttctcagctttactgtgaaaaatgataaacactcaaggagaagacggagtatggaccctattgatccacagcaggcagtatctaagttattttttaaactttcagcctatggcaagcactttcatctaaacttgactctcaacacagattttgtgtccaaacattttacagtagaatattgggggaaagatggaccccagtggaaacatgattttttagacaactgtcattacacaggatatttgcaagatcaacgtagtacaactaaagtggctttaagcaactgtgttgggttgcatggtgttattgctacagaagatgaagagtattttatcgaacctttaaagaataccacagaggattccaagcattttagttatgaaaatggccaccctcatgttatttacaaaaagtctgcccttcaacaacgacatctgtatgatcactctcattgtggggtttcggatttcacaagaagtggcaaaccttggtggctgaatgacacatccactgtttcttattcactaccaattaacaacacacatatccaccacagacagaagagatcagtgagcattgaacggtttgtggagacattggtagtggcagacaaaatgatggtgggctaccatggccgcaaagacattgaacattacattttgagtgtgatgaatattgttgccaaactttaccgtgattccagcctaggaaacgttgtgaatattatagtggcccgcttaattgttctcacagaagatcagccaaacttggagataaaccaccatgcagacaagtccctcgatagcttctgtaaatggcagaaatccattctctcccaccaaagtgatggaaacaccattccagaaaatgggattgcccaccacgataatgcagttcttattactagatatgatatctgcacttataaaaataagccctgtggaacactgggcttggcctctgtggctggaatgtgtgagcctgaaaggagctgcagcattaatgaagacattggcctgggttcagcttttaccattgcacatgagattggtcacaattttggtatgaaccatgatggaattggaaattcttgtcgaaaggtcatgaagcagcaatatggcagctcacattactgcgaataccaatcctttttcctggtctgcttgcagtcgagactacatcaccagctttctagagaagtgtgtagagagctctggtgtctcagcaaaagcaaccgctgtgtcaccaacagtattccagcagctgaggggacactgtgtcaaactgggaatattgaaaaagggtggtgttatcagggagattgtgttccttttggcacttggccccagagcatagatgggggctggggtccctggtcactatggggagagtgcagcaggacctgcgggggaggcgtctcctcatccctaagacactgtgacagtccagcaccttcaggaggtggaaaatattgccttggggaaaggaaacggtatcgctcctgtaacacagatccatgccctttgggttcccgagattttcgagagaaacagtgtgcagactttgacaatatgcctttccgaggaaagtattataactggaaaccctatactggaggtggggtaaaaccttgtgcattaaactgcttggctgaaggttataatttctacactgaacgtgctcctgcggtgatcgatgggacccagtgcaatgcggattcactggatatctgcatcaatggagaatgcaagcacgtaggctgtgataatattttgggatctgatgctagggaagatagatgtcgagtctgtggaggggacggaagcacatgtgatgccattgaagggttcttcaatgattcactgcccaggggaggctacatggaagtggtgcagataccaagaggctctgttcacattgaagttagagaagttgccatgtcaaagaactatattgctttaaaatctgaaggagatgattactatattaatggtgcctggactattgactggcctaggaaatttgatgttgctgggacagcttttcattacaagagaccaactgatgaaccagaatccttggaagctctaggtcctacctcagaaaatctcatcgtcatggttctgcttcaagaacagaatttgggaattaggtataagttcaatgttcccatcactcgaactggcagtggagataatgaagttggctttacatggaatcatcagccttggtcagaatgctcagctacttgtgctggaggtaagatgcccactaggcagcccacccagagggcaagatggagaacaaaacacattctgagctatgctttgtgtttgttaaaaaagctaattggaaacatttcttgcaggtttgcttcaagctgtaatttagcaaaagaaactttgctttaa

SEQ ID NO: 258657 - DNA, 7311 bp, Artificial Sequence
  derived and/or modified sequence
agtgtgctctgcctccgaggaaaagctgccaaaattttctcctgctgcaattcaagttggctgggggccggtagtgagatctagggctacttcaacaaaactttgctgcccttcctgctcctcttgtcttcttttctcctgataccttttgatgctctgcacatgttatttgcatagcaaaggcactaagctttccaggaagagagggcaccacttccacccccaataagtcttttttcccgtcttttctttcttttcctttccttttttggggggtggggagggagagaaagggggtttgcaaaggcagcatctcagagtgatagcctagatgtattgaaggcatctcttattctgccaaatcggaaagtcagttctctaaagcccgggttagccagaccatagggttttattctggctgcagaataactggctggtgtggctttgcaaaggggggcaaaaaataaaaaaataaaaaaaattaaaaaaagttagagaggagagggagtacgtgagtcgtccagtgcaatctctattgtctgaaacttactttttatcagaatttgaagatgaaaacggttaaaaaatggccatactttagtaactaatcagcctaatgctttgcttatgaaaacttttaccatcattatttttttcattttggattgagaaaatgaatccagatatagaagaaagtgcaggatgttggataaaagtggctcttaaacagtggaacatccaataactaatttgcaagaagttttaaagaaataaaattgttatgcttcgattttggtatggtattgactctttagcacataggtagccctcaaaaaaatcatccagttttctaaattatggaaattttgtggaagacgttgacctggattttgagcctcatcatggcttcatcggaatttcatagtgaccacaggctttcatacagttctcaagaggaattcctgacttatcttgaacactaccagctaactattccaataagggttgatcaaaatggagcatttctcagctttactgtgaaaaatgataaacactcaaggagaagacggagtatggaccctattgatccacagcaggcagtatctaagttattttttaaactttcagcctatggcaagcactttcatctaaacttgactctcaacacagattttgtgtccaaacattttacagtagaatattgggggaaagatggaccccagtggaaacatgattttttagacaactgtcattacacaggatatttgcaagatcaacgtagtacaactaaagtggctttaagcaactgtgttgggttgcatggtgttattgctacagaagatgaagagtattttatcgaacctttaaagaataccacagaggattccaagcattttagttatgaaaatggccaccctcatgttatttacaaaaagtctgcccttcaacaacgacatctgtatgatcactctcattgtggggtttcggatttcacaagaagtggcaaaccttggtggctgaatgacacatccactgtttcttattcactaccaattaacaacacacatatccaccacagacagaagagatcagtgagcattgaacggtttgtggagacattggtagtggcagacaaaatgatggtgggctaccatggccgcaaagacattgaacattacattttgagtgtgatgaatattgttgccaaactttaccgtgattccagcctaggaaacgttgtgaatattatagtggcccgcttaattgttctcacagaagatcagccaaacttggagataaaccaccatgcagacaagtccctcgatagcttctgtaaatggcagaaatccattctctcccaccaaagtgatggaaacaccattccagaaaatgggattgcccaccacgataatgcagttcttattactagatatgatatctgcacttataaaaataagccctgtggaacactgggcttggcctctgtggctggaatgtgtgagcctgaaaggagctgcagcattaatgaagacattggcctgggttcagcttttaccattgcacatgagattggtcacaattttggtatgaaccatgatggaattggaaattcttgtgggacgaaaggtcatgaagcagcaaaacttatggcagctcacattactgcgaataccaatcctttttcctggtctgcttgcagtcgagactacatcaccagctttctagattcaggccgtggtacttgccttgataatgagcctcccaagcgtgactttctttatccagctgtggccccaggtcaggtgtatgatgctgatgagcaatgtcgtttccagtatggagcaacctcccgccaatgtaaatatggggaagtgtgtagagagctctggtgtctcagcaaaagcaaccgctgtgtcaccaacagtattccagcagctgaggggacactgtgtcaaactgggaatattgaaaaagggtggtgttatcagggagattgtgttccttttggcacttggccccagagcatagatgggggctggggtccctggtcactatggggagagtgcagcaggacctgcgggggaggcgtctcctcatccctaagacactgtgacagtccagcaccttcaggaggtggaaaatattgccttggggaaaggaaacggtatcgctcctgtaacacagatccatgccctttgggttcccgagattttcgagagaaacagtgtgcagactttgacaatatgcctttccgaggaaagtattataactggaaaccctatactggaggtggggtaaaaccttgtgcattaaactgcttggctgaaggttataatttctacactgaacgtgctcctgcggtgatcgatgggacccagtgcaatgcggattcactggatatctgcatcaatggagaatgcaagcacgtaggctgtgataatattttgggatctgatgctagggaagatagatgtcgagtctgtggaggggacggaagcacatgtgatgccattgaagggttcttcaatgattcactgcccaggggaggctacatggaagtggtgcagataccaagaggctctgttcacattgaagttagagaagttgccatgtcaaagaactatattgctttaaaatctgaaggagatgattactatattaatggtgcctggactattgactggcctaggaaatttgatgttgctgggacagcttttcattacaagagaccaactgatgaaccagaatccttggaagctctaggtcctacctcagaaaatctcatcgtcatggttctgcttcaagaacagaatttgggaattaggtataagttcaatgttcccatcactcgaactggcagtggagataatgaagttggctttacatggaatcatcagccttggtcagaatgctcagctacttgtgctggaggtgtccaaagacaggaggtggtctgtaaaaggttggatgacaactccattgtccagaacaattactgtgatcctgacagtaagccacctgaaaatcaaagagcctgcaacactgagccctgcccacctgagtggttcattggggattggttggaatgcagcaagacttgtgatggtgggatgcgcacaagggcagtgctctgcatcaggaagatcggaccttctgaggaggagacgctggactacagtggttgtttaacacaccggcctgtcgaaaaagagccctgcaacaaccagtcatgtccaccacagtgggtggctttggactggtctgagtgtactccaaaatgtggtccaggattcaagcatcggattgttctgtgcaagagcagtgacctttctaagacattcccagctgcacaatgtccagaggaaagcaaacctcctgtccgcatccgctgcagtttgggccgctgccctcctcctcgctgggtcacaggagactggggccagtgttctgctcagtgtggccttggacagcagatgagaactgtgcagtgtctctcctacaccggacaggcatctagtgactgtctagaaactgttcggcctccatcaatgcagcagtgtgaaagcaaatgtgacagtacccccatttctaatactgaagagtgcaaagatgtgaataaagtggcttattgcccactggtgctgaagttcaagttctgcagtcgagcatacttcagacagatgtgttgtaagacctgccaaggacactgacccacagaaagccagagagagtgccttgtcatttcatcatggaaatgcatccatcaaagagagccacccagaggaagaggattgatgtccttgcaaatgcattaccctgtggaaaacgtaaccactggtcagccctagctgacaaaatttcaatattattttagcttctgtgaagtgggatttattgatccaaagtgctggacacggtattaggagggaatgccagattggagagatccaaacaacacagggagacttgcttactgtggagcgtttgtgttctttcgagtaaatccaatagcctgtttacctccttggaccattaagataatttttattatggacttagcaatgacactgaatccatttgtatttaaaactgtttaaaatgtagctgttatgacttggtcaactatggaagtgaagaaggttcagaattcttaagtcatagcttaaaaatatttactgtactttatctcactacaacagcaccacaatttaaattataaaacgggctttgaactataatttaaggagcaattataaatcaaaagtaatgaaagtttgtattatttttcttcattccacttaatttccttaggaataatcccctggttctgaacactgctgtgagccatatataaaactatattaaactgaacaataatgaggggcatagtttaaagcagtgcatcagttactgcagctgtgcaagtctataaactcagtgctgaaagactgtggccaacttgccattgtgcaagtaaagctgagatttccattaaaactttaagagaaaaacatttcaatttcatgcagaaaccagacctggggtatggtacagaccaaaggaccaggccctttgctgccaccacacaggatgccttagttcttatttgagtccctccaactcacttgtgtttacatcctccccagccacagcacggcttctgccctttggattgctgcacgtgtgttgagcttactgagatgataccatgcaaaagatagactggctcggtaaccaggcagacccttttgcagtttgttgacaattacgatgagttccagatgtcccttctttgatatggtagaagggcatttatttatatgagagcaaatgtgtgtgtgtgtttgcgggcgcttttaagtgtgtggatagatgagtgtgcttgcacataatgtgctatttctgtgagttttaaagtaggcaagggataataaccaaagaagaaaatttcatgaagactagacatcataaagcataattttaatagtcactcaaccaagtattttttattttttatggatactctgaatggcaattaaatgtgaaacccagtttcttgggcaagtcaaattctggaatcacatccacctaaattaaaatgactagctcgtattttccccatcttcaagtttcacatcctggtcatcaaaagactcgacagcaagacttagaatgaaaaagggtacttgtttatattaatattttttacttgaacacgtgtagcttgcagcaggttcttgatgaatgtgctttgtgtccaaaatgcctccccattgtacacaggtgtacaccatgcatgcaccaacacctaaaactcaaaactaaatggctattttgtaaggttaatactttcagttaaacagcatgtttgacttgattccatcatggtgctcttaaattacatgtcagtgcatcacatatatcatgatctaatgcagatgactaggctttttccaaaaggaagacagaccctcagacaccaaaagccaatctaaacaactcccaggtttgctgtggacaatcagcatggaatgttttctgcactctcagtcatgaccatctgtatcttgttacctgctttctctctcaacaccacagttctcaaccctgagccttccagagagagctattgatgatacaagaggaatcaccagggcccggatctaagatgcccttagaagaccagcccaagtgccgtcttagccattcagtgaagggcaaacagcccatgggtagtatggcccgagcactgaattcccttgcgccttttcaaagaacagttaacttggtgctaatgtgccctggtgaaataaataaaagatgggcagtttctgtggcattttaggcataggtttgcaatccagatctgattttctccaacataaatatcagctcatgttcttatttcaaaaagatttcttattaccgactaaaagctattttttacctcacctggaaactaccattgtgagggccatcccccaggcactgcacagcaccttggctgatgctggaagaggagggcagtcagtgtcacttctgggatgtgccccagcactgagaacaaaatgcaggcatcccccggggcagcatcagagtgcctttctagagggagccacgcacagaatgtaacaggatgaaacagtttcaagtaagccttgaattgaaacctgagtaggttaaaacaattctatttcatagcacatcacaatactgctgctactctgtagccacccccatggctacatgatgccctattcctaaataataacaatagcattgtcagtggaggctgggccaccatggcagaccttccaaaagtagtgagctacatagactacttagggaaccccagggaaactggtaccctacacctgggagcagtatctgccactgggataaagtcctactaaaaaaggaacggtaaatgtaccctaatgattaaaccccgtgagatacatatgatttccaaatagtccatttcattaggaacttttttgtttgaatgaatgtcacataggtatcctcagtaacacagaacgaaattacctttgtattattgtgattagttgttgcttattattttatactcagtaataatgtggtacactgttaatttttttgcttttgtaaattatattctaatttattgccatgtttcctaacacttgtcctacattcattctcctgcttgtaatgaaaatgaaaaaatcattgtaacacttgatggagtgaaattccacgccaggcacagaatttttttgacatagataatttagtaaaataaaaattcagcttataataatgata

SEQ ID NO: 258658 - DNA, 2577 bp, Artificial Sequence
  derived and/or modified sequence
atggaaatcctgtggaaaacgttgacctggattttgtcactcataatggcatcttccgaatttcactcggatcaccggctctcttatagtagccaagaggaattcctgacttaccttgaacactaccaactcacaataccaatccgcgtggaccagaatggtgcatttctatccttcactgtaaagaacgacaagcattcccggaggcggcgatctatggatcccattgatccccagcaggccgtgagcaagctcttcttcaaactttctgcttatgggaagcactttcacctcaaccttactctcaatacagacttcgtctccaagcatttcactgtggagtactggggcaaggatggaccgcagtggaaacacgactttctcgacaattgccattatactggctacctccaggatcaaagaagtactaccaaggtggctctcagcaactgcgtgggcctgcacggtgttatagccacagaggatgaggaatatttcatcgagccactaaagaatacaacggaagattcgaagcacttctcctacgagaacggccatccccacgtgatttacaagaagagtgcattacagcagaggcacctgtacgatcattcacactgtggggtcagtgactttacaaggagtgggaagccctggtggttgaacgatacatctaccgtgtcttattctctcccaatcaacaatacacacatacatcataggcaaaagaggtcagtgagcatagagcgcttcgtagaaaccttagtggtcgctgataagatgatggtgggataccacgggcgaaaagacattgagcattatatcctttcagtaatgaacatcgtggccaaattgtatcgtgatagttcgctgggcaatgtggtgaacatcattgtggcgcgtctgatcgtactgacggaagaccagccaaatttagaaatcaatcatcatgctgacaagtctcttgactcattctgcaagtggcagaagtccattctgtcacaccaaagtgacgggaacacgattcccgagaacgggattgcacaccatgacaacgctgtgctgattactagatatgacatttgtacctacaaaaacaaaccttgcggtaccctgggccttgcgtctgtcgctggaatgtgtgaaccagaaaggtcttgctcgatcaacgaggacattggtcttgggagcgcctttacaattgctcatgagatcggacacaactttggcatgaaccatgacgggataggaaattcttgcagaaaggtgatgaagcagcaatacggatcctcacactattgcgaatatcagagctttttcctggtctgcctgcagtcaagattacatcatcagctgtctcgtgaagtgtgtcgagaactctggtgtttatctaaaagcaacagatgcgtcacaaattcaatcccagccgccgagggaacactatgtcagactgggaacatcgaaaaggggtggtgctatcaaggggactgtgtgccattcggaacatggcctcagtcaatcgacggagggtggggcccctggtccctgtggggggagtgctctaggacttgtggaggcggagtctcttctagcctgagacactgtgattcgccggccccgagcggcggaggaaagtattgtctcggggagcggaaaagatatcggtcttgtaatactgacccatgcccccttggcagtagagatttccgcgaaaaacagtgcgccgacttcgacaatatgccattccggggaaagtattacaactggaaaccttacactggagggggagtgaagccttgtgctcttaattgtctagctgaaggttataatttttataccgaacgcgctccagcagtgatcgacggcacgcaatgcaatgccgactccctggatatatgcataaacggcgaatgcaagcacgttggctgtgataacattttaggcagcgatgcaagagaggatcgttgccgggtgtgtggcggagacggttccacatgcgatgctatagaagggttctttaacgactccctccccagaggcggatatatggaggtcgtccaaatcccaagagggtccgtgcacatcgaggtacgggaggtggccatgtccaagaactacatcgcactgaaatcagaaggtgatgactactacattaacggtgcctggaccatagactggccccgtaagttcgatgtggccgggaccgcatttcattacaagcggccaaccgacgagccagaatcattagaagccctgggccctacaagcgagaatctgattgtgatggtgctgcttcaggaacagaatctcggcattagatataagtttaatgtgcctattacacgcaccggatccggagataacgaggtaggatttacttggaaccaccagccctggtctgagtgttccgccacgtgcgccggcggcaaaatgccaacccgtcagcctacacagcgggccagatggcgcaccaaacacatcctctcgtacgcactttgcctgctaaagaaactcattggaaacatatcctgtcggttcgccagtagctgcaacctagctaaagagacccttctctag

SEQ ID NO: 258659 - DNA, 3354 bp, Artificial Sequence
  derived and/or modified sequence
atggagatcctctggaaaaccctcacttggatcctctccctgattatggcttctagcgaattccactctgatcaccggctgtcctacagctcccaagaagagttcctgacttatctggagcactaccaacttacgatccccatcagggtcgatcagaacggagcatttctcagctttactgtcaagaacgacaaacactcccgccggaggcgatcgatggatcctatcgatcctcagcaggccgtctctaaacttttttttaaactcagtgcctatggcaaacacttccaccttaatctcactcttaataccgattttgtgagcaagcactttactgtggagtattggggcaaggacggacctcagtggaaacacgatttcctcgacaattgccactatactggttacctccaggatcaaaggtccactaccaaagtggctctgagcaattgcgtcggccttcacggcgtcattgctactgaggatgaggagtatttcattgagcctctcaagaacacaacagaagattctaaacacttcagctatgagaatggacaccctcacgtcatctataagaagagcgctctacagcagcggcatctgtacgaccatagccactgtggcgtgagtgattttacaaggagcggcaagccttggtggctaaacgatacctctacagtgagctactcattgcctataaacaacacccacattcaccatcgccagaaacggagcgtctctattgaaagattcgtggagaccctcgtggttgccgataaaatgatggtcgggtatcacggtcgcaaggacattgaacactatatcctttccgtcatgaacatcgtggcgaagctctatcgggatagcagcctaggcaatgtggtcaacattatcgtggcccgccttattgtcttgactgaggaccaacccaatctagagataaaccaccatgccgataaatctttagattctttctgtaaatggcaaaaaagcatcctgtctcatcaatccgatggcaacacgatcccggaaaatggcatcgcgcaccatgacaacgccgtattgattactcgttacgacatttgcacctacaaaaataagccttgcggtacactcgggctggcctcagtggcaggcatgtgcgaaccagaaaggagttgctccatcaacgaggacattggtctgggttcagcttttactattgcccatgagataggacataacttcgggatgaatcacgatggcataggcaacagctgtggtaccaaaggacacgaagcagcgaagctcatggccgcccatatcacagcaaacactaaccctttttcctggtccgcatgctcccgagattacatcacctcattcttggactcagggaggggtacatgtctggataatgagccccccaaaagggactttctctaccctgcagtagcaccaggacaagtgtacgacgcagacgaacagtgtcggttccagtatggcgcaacgtcacgtcagtgtaagtacggagaggtatgccgggagttgtggtgcctgagtaagtccaataggtgcgtcactaactctataccagctgctgagggcactttatgtcagacaggaaatatcgaaaaggggtggtgctaccagggggactgcgtgcccttcggaacctggccacagagcatcgacggtggttggggcccctggtcactgtggggcgagtgtagtcgcacttgcgggggtggcgtgagctccagcttgcgccattgtgattcgcctgccccaagcggtgggggaaagtactgccttggcgaacgaaagcggtatcgcagctgcaatacggatccttgcccactgggctcgcgagattttagggagaagcagtgcgctgacttcgacaacatgccattcaggggcaagtattataactggaaaccctatactggaggaggagtaaagccctgcgctctgaactgtctggccgagggttacaacttctatactgagcgcgcaccagccgttatcgacggcacacagtgtaatgcggacagtctcgatatttgtattaacggcgaatgcaagcacgttggttgcgataacatcttagggagcgacgcccgcgaggaccgttgtcgcgtgtgtggcggcgatggcagtacctgcgatgcaatcgaaggtttcttcaacgattcattgcctaggggcggttatatggaagtggtccagatcccaagaggatctgtacatatcgaggtccgggaagtcgccatgtcaaagaactatattgcgctgaaaagcgaaggggatgactactacatcaacggggcctggacaatcgattggcctcgaaagtttgacgtcgctggtacggcattccactataagcggcccactgacgaacccgagagtctggaagcattgggccccactagtgagaatttaattgtcatggtgctattgcaggagcagaatctggggataaggtacaagtttaacgtaccaatcacaaggactggttcaggcgataacgaggtcggcttcacttggaaccaccagccttggtccgagtgctcagcgacatgcgctgggggcgttcagcggcaggaggtggtatgcaagagattagatgataacagtatcgtccagaataattactgcgaccctgactccaagcccccggaaaatcaacgggcctgcaataccgagccctgtccaccggaatggtttatcggcgattggctagagtgtagcaaaacctgcgatggcggaatgagaacccgcgcagtcctgtgtattagaaagattggccctagcgaggaagagaccctcgactatagtggctgcttgacgcataggccagtcgagaaagaaccttgcaacaatcaatcctgccctccccagtgggttgcccttgactggtccgagtgtacacctaagtgcggtccggggtttaaacatcgcattgtcctttgcaagtcttccgatctcagcaagactttccccgccgcccagtgccctgaagagtctaaacctccggtccgcattaggtgcagcttaggccgctgtccccctccgcgttgggtcacaggggattgggggcagtgctctgctcaatgcggcttgggccagcaaatgaggactgtccagtgcctttcctatacgggtcaggctagctctgactgtctcgagacagtccgacctcccagcatgcagcagtgtgaatctaaatgtgattcaactccgatcagcaatactgaggagtgtaaggacgtcaacaaggtggcctactgtccactggttctgaagttcaagttttgttctagggcatatttccgacagatgtgctgtaaaacttgtcagggccattag

SEQ ID NO: 258660 - DNA, 2577 bp, Artificial Sequence
  derived and/or modified sequence
atggagatcctgtggaagaccctgacctggatcctgagcctcatcatggccagcagcgagttccacagcgaccaccggctgagctacagcagccaggaggagttcctgacctacctggagcactaccagctgaccatccccatccgggtggaccagaatggagccttcctgtccttcaccgtgaagaatgacaagcacagcagaagaagaagatccatggaccccatcgacccccagcaggccgtgtccaagctgttcttcaagctgagcgcctacggcaagcacttccacctgaacctgaccctgaacacagactttgtgtccaagcacttcaccgtggagtactggggcaaggatggcccccagtggaagcatgacttcctggacaactgccactacacaggctacctgcaggaccagaggagcaccaccaaggtggccctgagcaactgtgtgggcctgcatggagtcatcgccacagaagatgaggagtacttcatcgagcccctgaagaacaccacagaggacagcaagcacttctcctatgaaaatggccacccccacgtgatctacaagaagagcgccctgcagcagaggcacctgtatgaccacagccactgcggcgtgtctgacttcaccaggtctgggaagccctggtggctgaatgacaccagcacagtgtcctacagcctgcccatcaacaacacccacatccaccaccggcagaagaggtctgtgtccattgaaagatttgtggagaccctggtggtggccgacaagatgatggtgggctaccacggcaggaaggacatcgagcactacatcctgtctgtgatgaacatcgtggccaagctgtacagagacagcagcctgggcaatgtggtgaacatcatcgtggcccggctgattgtgctgacagaggaccagcccaacctggagatcaaccaccacgccgacaagagcctggacagcttctgcaagtggcagaagagcatcctgagccaccagagtgatggcaacaccatcccagaaaatggaattgcccaccacgacaatgctgtgctgatcaccaggtatgacatctgcacctacaagaacaagccctgtggcaccctgggcctggcctctgtggccggcatgtgtgagcctgagaggagctgcagcatcaatgaagatattggcctgggcagcgccttcaccatcgcccatgaaattggccacaactttggcatgaaccatgatggcatcggcaacagctgcaggaaggtgatgaagcagcagtatggcagcagccactactgtgagtaccagagcttcttcctggtgtgcctgcagagccggctgcaccaccagctgagccgggaggtgtgccgggagctgtggtgcctgagcaagagcaacagatgtgtgaccaacagcatcccagctgctgagggcaccctgtgccagacaggcaacatcgagaagggctggtgctaccagggcgactgtgtgcccttcggcacctggccccagagcattgatggcggctggggcccctggagcctgtggggagaatgttccaggacctgtggcggcggcgtgagcagcagcctgcggcactgtgacagccctgcccccagcggcggcggcaagtactgcctgggggagaggaagcgctaccgcagctgcaacacagacccctgccccctgggcagccgggacttccgggagaagcagtgtgccgactttgacaacatgcccttccggggcaagtactacaactggaagccctacacaggaggcggcgtgaagccctgtgccctgaactgcctggccgagggctacaacttctacacagagcgggccccagctgtgattgatggcacccagtgcaatgctgacagcctggacatctgcatcaatggagagtgcaagcacgtgggctgtgacaacatcctgggcagtgatgccagagaagatcgctgccgggtgtgtggaggagatggcagcacctgtgatgccatcgagggcttcttcaatgacagcctgccccggggcggctacatggaggtggtgcagatcccccggggctctgtgcacatcgaggtgcgggaggtggccatgagcaagaactacatcgccctgaagtcagaaggagatgactactacatcaatggagcctggaccatcgactggcccaggaagtttgatgtggccggcacagccttccactacaagaggcccacagatgagcctgagagcctggaggccctgggccccaccagtgaaaatctcatcgtgatggtgctgctgcaggagcagaacctgggcatccgctacaagttcaacgtgcccatcaccaggactggaagtggggacaatgaggtgggcttcacctggaaccaccagccctggagcgaatgttctgccacctgtgccggcggcaagatgcccacccggcagcccacccagagggcccgctggaggaccaagcacatcctgtcctatgccctgtgcctgctgaagaagctgattggcaacatcagctgccgctttgccagcagctgcaacctggccaaggagaccctgctgtag

SEQ ID NO: 258661 - DNA, 3354 bp, Artificial Sequence
  derived and/or modified sequence
atggagatcctgtggaagaccctgacctggatcctgagcctcatcatggccagcagcgagttccacagcgaccaccggctgagctacagcagccaggaggagttcctgacctacctggagcactaccagctgaccatccccatccgggtggaccagaatggagccttcctgtccttcaccgtgaagaatgacaagcacagcagaagaagaagatccatggaccccatcgacccccagcaggccgtgtccaagctgttcttcaagctgagcgcctacggcaagcacttccacctgaacctgaccctgaacacagactttgtgtccaagcacttcaccgtggagtactggggcaaggatggcccccagtggaagcatgacttcctggacaactgccactacacaggctacctgcaggaccagaggagcaccaccaaggtggccctgagcaactgtgtgggcctgcatggagtcatcgccacagaagatgaggagtacttcatcgagcccctgaagaacaccacagaggacagcaagcacttctcctatgaaaatggccacccccacgtgatctacaagaagagcgccctgcagcagaggcacctgtatgaccacagccactgcggcgtgtctgacttcaccaggtctgggaagccctggtggctgaatgacaccagcacagtgtcctacagcctgcccatcaacaacacccacatccaccaccggcagaagaggtctgtgtccattgaaagatttgtggagaccctggtggtggccgacaagatgatggtgggctaccacggcaggaaggacatcgagcactacatcctgtctgtgatgaacatcgtggccaagctgtacagagacagcagcctgggcaatgtggtgaacatcatcgtggcccggctgattgtgctgacagaggaccagcccaacctggagatcaaccaccacgccgacaagagcctggacagcttctgcaagtggcagaagagcatcctgagccaccagagtgatggcaacaccatcccagaaaatggaattgcccaccacgacaatgctgtgctgatcaccaggtatgacatctgcacctacaagaacaagccctgtggcaccctgggcctggcctctgtggccggcatgtgtgagcctgagaggagctgcagcatcaatgaagatattggcctgggcagcgccttcaccatcgcccatgaaattggccacaactttggcatgaaccatgatggcatcggcaacagctgtggcaccaagggccatgaagctgccaagctgatggccgcccacatcacagccaacaccaaccccttctcctggagcgcctgcagccgggactacatcaccagcttcctggacagcggccggggcacctgcctggacaatgagccccccaagagggacttcctgtacccagctgtggcccctggccaggtgtatgatgctgatgagcagtgccgcttccagtacggggccaccagccggcagtgcaagtatggagaggtgtgccgggagctgtggtgcctgagcaagagcaacagatgtgtgaccaacagcatcccagctgctgagggcaccctgtgccagacaggcaacatcgagaagggctggtgctaccagggcgactgtgtgcccttcggcacctggccccagagcattgatggcggctggggcccctggagcctgtggggagaatgttccaggacctgtggcggcggcgtgagcagcagcctgcggcactgtgacagccctgcccccagcggcggcggcaagtactgcctgggggagaggaagcgctaccgcagctgcaacacagacccctgccccctgggcagccgggacttccgggagaagcagtgtgccgactttgacaacatgcccttccggggcaagtactacaactggaagccctacacaggaggcggcgtgaagccctgtgccctgaactgcctggccgagggctacaacttctacacagagcgggccccagctgtgattgatggcacccagtgcaatgctgacagcctggacatctgcatcaatggagagtgcaagcacgtgggctgtgacaacatcctgggcagtgatgccagagaagatcgctgccgggtgtgtggaggagatggcagcacctgtgatgccatcgagggcttcttcaatgacagcctgccccggggcggctacatggaggtggtgcagatcccccggggctctgtgcacatcgaggtgcgggaggtggccatgagcaagaactacatcgccctgaagtcagaaggagatgactactacatcaatggagcctggaccatcgactggcccaggaagtttgatgtggccggcacagccttccactacaagaggcccacagatgagcctgagagcctggaggccctgggccccaccagtgaaaatctcatcgtgatggtgctgctgcaggagcagaacctgggcatccgctacaagttcaacgtgcccatcaccaggactggaagtggggacaatgaggtgggcttcacctggaaccaccagccctggagcgaatgttctgccacctgtgccggcggcgtgcagaggcaggaggtggtgtgcaagaggctggatgacaacagcatcgtgcagaacaactactgtgaccctgacagcaagcccccagagaaccagagggcctgcaacacagagccctgccccccagagtggttcatcggggactggctggagtgcagcaagacctgtgatggcggcatgaggaccagggctgtgctgtgcatcaggaagattggccccagcgaggaggagaccctggactacagcggctgcctgacccacaggcctgtggagaaggagccctgcaacaaccagagctgccccccccagtgggtggccctggactggagcgagtgcacccccaagtgtggccctggcttcaagcacagaattgtgctgtgcaagagcagtgacctgagcaagaccttccctgctgcccagtgcccagaggagagcaagccccctgtgcgcatccgctgcagcctgggccgctgccccccaccccgctgggtgactggagactggggccagtgcagcgcccagtgtggcctgggccagcagatgaggacagtgcagtgcctgagctacacaggccaggccagcagtgactgcctggagaccgtgcggccccccagcatgcagcagtgtgagagcaaatgtgacagcacccccatcagcaacacagaggagtgcaaggatgtgaacaaggtggcctactgccccctggtgctgaagttcaagttctgcagccgggcctacttccggcagatgtgctgcaagacctgccagggccactag

SEQ ID NO: 258662 - DNA, 2577 bp, Artificial Sequence
  derived and/or modified sequence
atggagatcctgtggaagaccctgacctggatcctgagcctgatcatggccagttcagaattccactcagatcacagactgagctattctagccaagaagaatttttaacgtatcttgaacattatcaactgaccataccaattagggtcgaccagaatggggcattcctgagtttcacggtgaaaaatgacaaacattcccgacggaggcgaagcatggaccctatcgatccccagcaggccgttagcaaactgttcttcaagctgtcagcgtacggcaagcacttccatctaaacctcaccttgaacacggacttcgtttctaaacattttactgtggaatactggggtaaggacggtcctcagtggaagcacgattttctggataattgccactacacaggatacctccaggaccagcgcagcacaacgaaagtcgcccttagtaactgtgtgggactgcacggtgtgatcgccacggaagatgaggagtattttattgagcccctcaagaataccaccgaagactccaaacatttctcctacgagaacgggcaccctcatgtgatctacaagaaatcagccctccagcaacgccatttatacgaccactcccattgtggagtttccgattttactcgtagcggaaaaccctggtggctgaacgatacttcaactgtatcctattcccttcccattaacaacacacatatccatcaccgacagaaacgtagtgtgagtatagaacgctttgtggagactctcgtggtggccgataaaatgatggtagggtatcacggcaggaaggatatcgagcactatattctgtccgttatgaatattgtggcaaaactgtaccgcgacagttctctcggtaatgttgtaaatatcatagtggcacggctgattgtcctcacagaggatcagcccaacctggagatcaatcaccacgcagataaaagtctagatagcttttgtaaatggcagaaaagcatactcagtcaccagtcagacggtaacactattcccgaaaacggtatcgcccatcacgacaacgcagtgctgattaccaggtacgatatctgcacatataagaataagccctgtggcacgctgggactggcgtccgtggccggcatgtgtgagccagagcgtagctgttccatcaacgaggacatagggttggggtcagctttcactatcgctcacgaaatcggacacaattttgggatgaaccatgacggtattgggaactcctgcagaaaggtaatgaagcaacagtacggctcttcgcattattgtgagtaccaatcgttcttcctcgtatgcctgcagagtcgactgcaccatcaactgagccgcgaagtttgtcgagagctgtggtgcctgtcaaagagtaatcggtgcgttacaaacagcatccctgcagcggagggcaccctctgccagacggggaatatcgaaaagggctggtgttaccaaggtgactgtgtcccatttggtacctggccccagtcaatcgacgggggctggggcccatggtctctttggggtgagtgttcgcggacctgcggagggggagtgtccagcagtcttcgacactgcgatagtcctgccccatcaggaggaggaaaatactgtctgggggagagaaagcggtatagaagctgcaatacagacccatgtcctctcggcagtagggacttccgagagaagcaatgtgcagatttcgacaatatgccttttagaggcaaatactacaattggaagccatatacaggcggtggagtaaagccctgcgctctcaactgcctggctgaaggttacaatttctatacagagcgtgcaccggctgtcatcgatggcacacagtgcaacgccgattctcttgatatttgcattaatggggaatgcaaacatgtgggctgcgacaacatcctcggatctgacgcaagagaagaccggtgcagggtgtgcggtggagatggatcgacttgtgatgcaatcgaaggcttcttcaacgattccctgcctcggggcggctatatggaagttgtacagattcctcgcggaagcgtgcacatcgaagtccgcgaagtcgccatgagtaaaaactacatcgcactgaaatctgagggtgatgattattacataaatggggcatggacaatcgattggcctagaaagttcgacgttgcagggactgcctttcactataagcggccaaccgacgaacctgagtctctggaggctttgggcccaacctccgaaaatctgatagtgatggtgcttctgcaggaacagaacctggggattaggtacaagtttaatgtcccaatcacgcggaccgggagcggagacaacgaggtcggtttcacatggaatcaccaaccttggagtgaatgttctgccacctgcgcaggtggtaaaatgcccacaagacaacctacccagcgcgcccgttggaggactaaacatatcctgagttacgcattatgccttctaaagaaactgatcggaaatatatcatgtagattcgcctccagttgcaacttagctaaagagactttgctgtag

SEQ ID NO: 258663 - DNA, 3354 bp, Artificial Sequence
  derived and/or modified sequence
atggagatcctgtggaagaccctgacctggatcctgagcctgatcatggcgagctctgagttccatagcgatcacaggctgtcttatagcagccaagaggaattcctcacttatctggaacattatcagctcacaatcccaattagagtggaccaaaacggggcatttctcagctttaccgtgaagaatgacaaacattcccgacgtcgccggtccatggacccaatcgatcctcagcaggccgtctctaagttgttttttaaactctccgcttatggtaagcactttcatctgaaccttaccctgaacactgattttgtcagtaaacattttaccgtcgagtactggggcaaggacggtcctcagtggaagcatgatttcctagacaattgtcactacactggatacctccaggatcagcgcagcactacaaaggtggctttatctaactgtgtgggcctgcacggggtgatagccacagaggacgaagaatacttcattgaacctctgaagaacactacagaagacagcaaacacttcagctacgaaaacgggcacccacacgtgatctacaaaaaaagtgctctccagcaaaggcacttatatgaccactcccattgtggagtctctgattttacgcggtcaggaaaaccctggtggctcaacgatacatccaccgtgtcatactcactgcccataaacaatacacacattcatcatcggcagaagagatccgtctcaatcgagagattcgttgaaaccctcgtggtggcagacaaaatgatggtgggctaccacgggcggaaagacattgaacactatattctgagcgtgatgaacatcgttgctaagctgtatcgagattcgtctctggggaacgtggtcaacatcattgtagcaagacttatcgttttaaccgaggaccagcccaatctggagatcaaccaccatgcagataaaagccttgattcattctgcaaatggcagaagtctatcctgagccatcagtccgacgggaatacgattcctgaaaacggcatcgcacaccacgacaacgccgtgcttatcacaaggtacgacatctgtacctataagaacaagccttgcggaacacttggactcgcgtcagtagcagggatgtgcgagccagaaaggagctgttcaatcaatgaggacatcggtcttggtagcgccttcacaattgcccatgaaataggacataatttcggaatgaaccacgatgggattggcaatagttgcggcaccaaagggcacgaggccgcaaagttgatggctgcccacataaccgcaaacactaaccctttctcttggtctgcctgctcgcgggattatataacgtcattccttgattccggacgcggaacatgtttagacaacgaaccacctaagcgggattttctataccccgccgtggcccctggccaagtgtacgatgctgatgagcagtgtagatttcaatatggagccacctcgagacaatgcaaatatggggaggtgtgtagggagctctggtgtcttagcaagagtaacagatgcgtcaccaattctatccctgccgccgagggaacattatgccagactgggaacatagagaaaggttggtgttaccaaggggactgcgtgccatttggaacttggccacagtcaattgatgggggctgggggccatggagcttatggggtgaatgttctcgaacctgcgggggtggagtctccagttctttacgtcattgcgacagtccagctccctcgggcgggggtaagtactgtttgggggaaaggaaacgttataggagctgcaacaccgacccatgcccgctcgggtcaagagattttagggagaagcagtgcgctgatttcgacaatatgcctttccgaggaaagtactacaactggaagccatatacaggaggaggcgttaagccgtgcgcactgaactgcctggcggaggggtacaatttctataccgaacgagcgcctgctgtgatcgacggcacacagtgcaacgccgattcactcgacatttgcatcaatggagagtgtaagcatgtgggatgtgacaacatccttggatctgacgcgcgggaggatcgctgcagagtgtgcggaggtgacggcagcacgtgtgatgcaatagaggggtttttcaatgattccctccccagaggagggtatatggaggtggtgcagattcccagaggcagcgtccacatcgaggtgagggaagtggcaatgagcaaaaactatatcgccctgaagagtgagggcgacgattactacattaatggagcttggacaattgactggccaagaaaattcgacgtcgctgggactgcctttcattataagcggccaacagacgagcccgagagccttgaagcgctgggtcccactagtgaaaatctgattgtgatggtcctgctccaggagcagaatttgggcatccgctacaagtttaacgtgcccataaccaggactggatctggcgacaacgaagtaggtttcacatggaatcaccaaccctggtccgaatgtagcgctacctgcgccggtggagtccagaggcaggaggttgtctgcaaaagattagacgataacagcattgtgcaaaacaactattgcgatccggacagtaagccaccagagaatcagcgagcctgcaacacggaaccttgccctcccgaatggttcattggcgactggctcgagtgtagtaagacttgtgatggggggatgcgtaccagagctgtgctttgtattcgcaaaatcgggccgtcagaggaagagactttggattactccggatgcctgactcatcggcccgttgaaaaagaaccatgtaataatcaaagctgtccccctcagtgggtggcacttgactggtccgaatgtactcctaaatgcgggccaggcttcaagcaccggattgtactgtgcaagtcatccgacctcagtaaaacattcccggccgcccaatgtcccgaagaaagtaaaccaccagtgcgtataagatgttctctcggacgatgccctccgccccggtgggtgactggtgattgggggcaatgtagtgctcaatgtggactgggacagcagatgaggacagtacagtgcctgtcatatactgggcaggcttcatctgactgcttggaaacagtgcgcccaccatcaatgcagcaatgtgaatccaagtgcgactccaccccgatatcaaacactgaagaatgtaaagatgtcaataaagttgcctactgtccgctcgtcctaaagttcaaattttgtagccgggcctacttccggcagatgtgttgcaaaacatgtcaggggcactag

SEQ ID NO: 258664 - DNA, 2577 bp, Artificial Sequence
  derived and/or modified sequence
atggagattctgtggaagaccctgacatggatacttagtctgattatggccagttccgagttccactcggaccaccgactgtcatacagcagtcaagaggaattcctaacgtacctagagcactatcagctcaccatacccataagagtcgatcagaatggcgcttttctgagcttcacagtgaaaaacgataaacactcacggcgacggaggtctatggatcccatagaccctcaacaagccgtttccaagctgtttttcaagctgtctgcgtatggaaaacatttccatctgaatctcaccctgaacacagacttcgtgtccaaacacttcactgtggagtattgggggaaagatggaccgcagtggaaacatgacttcttagacaattgccattatactgggtatcttcaagaccagaggtctacgacaaaggtggcccttagcaactgcgtcggtctgcacggggtcattgcaaccgaagatgaggaatatttcattgaaccattaaaaaatacgacagaggattctaagcatttttcctatgaaaacggacacccccatgttatctacaaaaagagcgctttacagcagagacacctgtacgatcacagtcactgcggcgtctcagactttacgcggtctggcaagccgtggtggttaaatgatacatctactgtaagttattctctgcccattaacaacactcatatacatcatcgacagaaaagaagcgtgagtatcgagcggttcgtggaaacactagttgtggctgataagatgatggtgggctaccacggaaggaaagatatagaacactatatcctgagcgtgatgaatatagttgctaagctctatcgcgacagctcgctggggaacgtggttaacatcatcgtggcccgtctgatcgtgctgaccgaggaccagccaaacttggagatcaatcatcatgcagacaagtctctggactccttttgcaaatggcagaagtctatactgagccaccagtctgacggtaatactattccagagaacggaatcgctcaccacgacaatgcagtcctgataactagatatgatatctgtacctacaaaaataagccttgcggaacattaggattggcaagcgtggctggcatgtgtgagccagaaaggagctgttccattaatgaggacattggtctgggtagcgcgttcacaatcgcccatgagatcgggcacaattttgggatgaaccacgatggcatcgggaactcttgtaggaaggtcatgaagcagcagtatggaagtagccactattgcgagtatcagtcattcttcctggtctgccttcagtctagattgcaccatcagcttagccgcgaggtttgtcgcgaactctggtgtttgagtaaaagcaaccggtgtgtcactaatagcatccctgcagccgagggcactctctgccagacaggcaacatcgagaaaggctggtgttaccagggcgactgcgtgcccttcggcacctggcctcagtctattgacgggggatggggcccttggtctctctggggcgaatgtagcaggacatgtggtggcggagtgagtagtagccttcggcactgcgattccccagctcccagcgggggtggcaaatactgcctgggagagcgcaagaggtacaggtcttgcaacaccgatccatgtcccctcggctcgagagatttccgcgaaaaacagtgtgccgacttcgataacatgccctttcgcggtaaatactacaactggaaaccatatactggaggtggagtgaaaccgtgcgctttgaactgcctagctgaaggttacaatttctacacagaaagagcccctgccgtcatcgacggtactcagtgcaatgccgattccctggacatctgtattaatggagagtgcaaacatgtgggctgcgataacattctggggtccgatgccagggaggacagatgtagggtgtgcggaggggacggaagcacttgcgatgccattgagggatttttcaatgactcactgccccgtggcggatacatggaagtggtgcagattcccagaggaagcgtgcatatcgaggtgcgagaggtcgctatgtcaaaaaactatattgccttgaaatcagagggggatgattattatatcaatggagcatggactatcgactggccacgaaaattcgatgtggcagggaccgcattccattacaagcggcctactgacgagcctgagtcactggaagctttgggcccaactagcgagaatctaatagtaatggtcctccttcaagaacagaacctaggaatcagatataaattcaatgtgcctattactcgtaccgggtctggggacaacgaggttggctttacttggaatcaccagccatggtccgagtgttctgccacgtgcgcaggtggaaaaatgcccactagacagccgacacagagagccaggtggaggaccaaacatatactgtcttatgccttatgtctgctcaagaaactgatcggcaatatcagctgtagattcgcaagttcctgcaaccttgcaaaggagacgctgctgtag

SEQ ID NO: 258665 - DNA, 3354 bp, Artificial Sequence
  derived and/or modified sequence
atggaaatcctctggaaaactctgacttggatattgagcctcatcatggctagctccgaatttcatagcgatcaccgactaagctattccagccaagaagagttcctgacatatctggagcattatcagctgaccatccccatccgggtggatcagaatggcgcatttctcagcttcactgttaagaatgacaagcattcaaggcggcgaagatccatggatcctattgatccgcagcaagctgtctccaagctgtttttcaaattgagcgcctacggaaagcacttccacctcaaccttacgctgaacactgacttcgtgtccaagcactttacagttgaatactggggtaaggatggacctcagtggaagcacgattttttagacaattgccattacacaggatacttgcaggatcaacggtccactaccaaggtggcactgtctaattgcgtgggccttcacggtgtgattgccacagaagacgaggaatacttcatcgagcccttgaaaaacaccaccgaagacagtaagcatttcagctacgaaaacggacatcctcacgtcatctataagaaatccgcactccaacagcgtcatctgtacgatcactctcattgcggggttagtgacttcacacgaagtggaaaaccgtggtggctgaacgacacttcaactgtctcttattccctgcctatcaacaatactcacattcaccacaggcagaagaggtcggtgtccatagagagattcgtcgaaacacttgtggtggccgacaagatgatggtaggctatcatgggcgtaaggacattgaacattacatcctgagtgtcatgaatattgtggccaagttgtacagggatagctctttgggcaacgtggtgaacataattgtcgcacgactgattgtgcttaccgaagaccagcctaatcttgagatcaaccatcatgcggataaaagtctggacagcttctgcaagtggcagaaaagtattctcagtcaccagtctgacggaaatactattcctgaaaatggcattgcccatcacgacaacgcggtcttgatcacccgctacgacatctgtacttacaaaaacaaaccctgtgggacgctgggactggcatccgtggctggtatgtgcgagccagaaaggtcgtgcagtattaatgaagatattggactaggaagcgccttcacaattgctcacgaaatagggcataattttgggatgaaccacgacggcatcggcaactcctgcggtacaaaggggcacgaggctgcaaagcttatggctgcccatataacggctaataccaatcccttttcatggtccgcctgcagtagagactatatcacaagcttcctagacagcggacggggaacctgccttgataatgagccgccaaagcgcgacttcttgtaccccgcagtggcccctggccaggtgtatgacgccgacgaacagtgtaggtttcaatacggagccactagtcggcaatgcaagtacggcgaggtgtgtagggaactgtggtgtctttctaagtccaaccgatgcgtaactaactccatcccagccgcagaagggactctgtgccagacggggaacatcgagaagggctggtgctaccaaggagactgtgtcccttttggaacgtggccccagtcaattgacggaggatggggaccctggtccttgtggggagagtgcagtaggacctgtggtggtggcgtctcatcaagtctgagacattgtgactcccctgcgcctagcgggggagggaagtactgcctcggcgagcgtaaacggtacagatcctgcaacacagatccttgtcctttggggagtcgggattttagggagaaacaatgtgccgatttcgacaacatgcccttccgcggtaagtactacaactggaagccttacacaggtggtggggttaaaccttgcgctcttaattgtctggcagagggctacaatttctatacagagcgagcacctgccgtgatcgatgggactcaatgtaacgcagattctctcgacatctgtataaacggagaatgcaagcatgtaggctgcgataatatcctggggagcgatgcaagggaggaccgctgcagggtgtgcggcggagacgggagtacctgcgatgccatcgagggtttttttaatgacagcttgccccgtggaggatacatggaggtggtccagatcccaaggggctctgtacacatcgaggtgagagaagtggcgatgtctaagaactatattgctctcaaatctgagggtgatgattactatattaatggcgcttggactatcgactggccacggaagttcgacgtcgccggtaccgcttttcactacaagcggccaaccgatgagcctgagtcactggaggccctgggcccaacttccgagaacttgatcgtcatggtcctgctccaggaacaaaacttggggatccggtataagttcaatgtgccaattaccaggactggcagtggcgacaatgaagtgggctttacatggaaccaccagccctggtcggagtgtagcgccacatgtgccggaggcgtgcagaggcaggaggtggtgtgtaagcgactggatgataattcaattgtgcaaaacaattattgcgaccctgacagtaaacctcctgaaaaccagcgcgcatgcaatactgagccatgccccccagagtggtttattggggactggctggagtgcagcaaaacatgtgatggcggaatgcgcacccgagccgtgttatgcatccgcaaaatagggccttctgaagaggagacccttgactactcaggatgcctgacccaccggccagtcgagaaggaaccctgcaacaatcagagttgtcccccacagtgggtcgccctcgattggtccgagtgcacgcccaagtgcggaccaggatttaagcaccggatcgtgctgtgcaagtcatctgacctgagtaagaccttccccgctgcccagtgccccgaggagtctaagccgccagtcagaataaggtgctccttggggaggtgtccacctccccgatgggtgactggagattggggacagtgctcagcacaatgcggcctcggacaacagatgcgaactgtccagtgcttgtcttatacaggtcaggcatctagcgattgcctggagacggtgcgaccacccagtatgcaacaatgtgaaagcaaatgtgactccactcccatcagcaacacagaggaatgcaaggacgtgaacaaagtcgcctattgtcctcttgtgctgaagttcaagttctgttctagggcttattttcggcaaatgtgttgcaaaacctgccagggccattag

SEQ ID NO: 258666 - DNA, 2577 bp, Artificial Sequence
  derived and/or modified sequence
atggagatcctgtggaagaccctgacctggatcctgagcctgatcatggccagcagcgagttccacagcgaccacagactgagctacagcagccaggaggagttcctgacctacctggagcactaccagctgaccatccccatcagagtggaccagaacggcgccttcctgagcttcaccgtgaagaacgacaagcacagcagaagaagaagaagcatggaccccatcgacccccagcaggccgtgagcaagctgttcttcaagctgagcgcctacggcaagcacttccacctgaacctgaccctgaacaccgacttcgtgagcaagcacttcaccgtggagtactggggcaaggacggcccccagtggaagcacgacttcctggacaactgccactacaccggctacctgcaggaccagagaagcaccaccaaggtggccctgagcaactgcgtgggcctgcacggcgtgatcgccaccgaggacgaggagtacttcatcgagcccctgaagaacaccaccgaggacagcaagcacttcagctacgagaacggccacccccacgtgatctacaagaagagcgccctgcagcagagacacctgtacgaccacagccactgcggcgtgagcgacttcaccagaagcggcaagccctggtggctgaacgacaccagcaccgtgagctacagcctgcccatcaacaacacccacatccaccacagacagaagagaagcgtgagcatcgagagattcgtggagaccctggtggtggccgacaagatgatggtgggctaccacggcagaaaggacatcgagcactacatcctgagcgtgatgaacatcgtggccaagctgtacagagacagcagcctgggcaacgtggtgaacatcatcgtggccagactgatcgtgctgaccgaggaccagcccaacctggagatcaaccaccacgccgacaagagcctggacagcttctgcaagtggcagaagagcatcctgagccaccagagcgacggcaacaccatccccgagaacggcatcgcccaccacgacaacgccgtgctgatcaccagatacgacatctgcacctacaagaacaagccctgcggcaccctgggcctggccagcgtggccggcatgtgcgagcccgagagaagctgcagcatcaacgaggacatcggcctgggcagcgccttcaccatcgcccacgagatcggccacaacttcggcatgaaccacgacggcatcggcaacagctgcagaaaggtgatgaagcagcagtacggcagcagccactactgcgagtaccagagcttcttcctggtgtgcctgcagagcagactgcaccaccagctgagcagagaggtgtgcagagagctgtggtgcctgagcaagagcaacagatgcgtgaccaacagcatccccgccgccgagggcaccctgtgccagaccggcaacatcgagaagggctggtgctaccagggcgactgcgtgcccttcggcacctggccccagagcatcgacggcggctggggcccctggagcctgtggggcgagtgcagcagaacctgcggcggcggcgtgagcagcagcctgagacactgcgacagccccgcccccagcggcggcggcaagtactgcctgggcgagagaaagagatacagaagctgcaacaccgacccctgccccctgggcagcagagacttcagagagaagcagtgcgccgacttcgacaacatgcccttcagaggcaagtactacaactggaagccctacaccggcggcggcgtgaagccctgcgccctgaactgcctggccgagggctacaacttctacaccgagagagcccccgccgtgatcgacggcacccagtgcaacgccgacagcctggacatctgcatcaacggcgagtgcaagcacgtgggctgcgacaacatcctgggcagcgacgccagagaggacagatgcagagtgtgcggcggcgacggcagcacctgcgacgccatcgagggcttcttcaacgacagcctgcccagaggcggctacatggaggtggtgcagatccccagaggcagcgtgcacatcgaggtgagagaggtggccatgagcaagaactacatcgccctgaagagcgagggcgacgactactacatcaacggcgcctggaccatcgactggcccagaaagttcgacgtggccggcaccgccttccactacaagagacccaccgacgagcccgagagcctggaggccctgggccccaccagcgagaacctgatcgtgatggtgctgctgcaggagcagaacctgggcatcagatacaagttcaacgtgcccatcaccagaaccggcagcggcgacaacgaggtgggcttcacctggaaccaccagccctggagcgagtgcagcgccacctgcgccggcggcaagatgcccaccagacagcccacccagagagccagatggagaaccaagcacatcctgagctacgccctgtgcctgctgaagaagctgatcggcaacatcagctgcagattcgccagcagctgcaacctggccaaggagaccctgctgtag

SEQ ID NO: 258667 - DNA, 3354 bp, Artificial Sequence
  derived and/or modified sequence
atggagatcctgtggaagaccctgacctggatcctgagcctgatcatggccagcagcgagttccacagcgaccacagactgagctacagcagccaggaggagttcctgacctacctggagcactaccagctgaccatccccatcagagtggaccagaacggcgccttcctgagcttcaccgtgaagaacgacaagcacagcagaagaagaagaagcatggaccccatcgacccccagcaggccgtgagcaagctgttcttcaagctgagcgcctacggcaagcacttccacctgaacctgaccctgaacaccgacttcgtgagcaagcacttcaccgtggagtactggggcaaggacggcccccagtggaagcacgacttcctggacaactgccactacaccggctacctgcaggaccagagaagcaccaccaaggtggccctgagcaactgcgtgggcctgcacggcgtgatcgccaccgaggacgaggagtacttcatcgagcccctgaagaacaccaccgaggacagcaagcacttcagctacgagaacggccacccccacgtgatctacaagaagagcgccctgcagcagagacacctgtacgaccacagccactgcggcgtgagcgacttcaccagaagcggcaagccctggtggctgaacgacaccagcaccgtgagctacagcctgcccatcaacaacacccacatccaccacagacagaagagaagcgtgagcatcgagagattcgtggagaccctggtggtggccgacaagatgatggtgggctaccacggcagaaaggacatcgagcactacatcctgagcgtgatgaacatcgtggccaagctgtacagagacagcagcctgggcaacgtggtgaacatcatcgtggccagactgatcgtgctgaccgaggaccagcccaacctggagatcaaccaccacgccgacaagagcctggacagcttctgcaagtggcagaagagcatcctgagccaccagagcgacggcaacaccatccccgagaacggcatcgcccaccacgacaacgccgtgctgatcaccagatacgacatctgcacctacaagaacaagccctgcggcaccctgggcctggccagcgtggccggcatgtgcgagcccgagagaagctgcagcatcaacgaggacatcggcctgggcagcgccttcaccatcgcccacgagatcggccacaacttcggcatgaaccacgacggcatcggcaacagctgcggcaccaagggccacgaggccgccaagctgatggccgcccacatcaccgccaacaccaaccccttcagctggagcgcctgcagcagagactacatcaccagcttcctggacagcggcagaggcacctgcctggacaacgagccccccaagagagacttcctgtaccccgccgtggcccccggccaggtgtacgacgccgacgagcagtgcagattccagtacggcgccaccagcagacagtgcaagtacggcgaggtgtgcagagagctgtggtgcctgagcaagagcaacagatgcgtgaccaacagcatccccgccgccgagggcaccctgtgccagaccggcaacatcgagaagggctggtgctaccagggcgactgcgtgcccttcggcacctggccccagagcatcgacggcggctggggcccctggagcctgtggggcgagtgcagcagaacctgcggcggcggcgtgagcagcagcctgagacactgcgacagccccgcccccagcggcggcggcaagtactgcctgggcgagagaaagagatacagaagctgcaacaccgacccctgccccctgggcagcagagacttcagagagaagcagtgcgccgacttcgacaacatgcccttcagaggcaagtactacaactggaagccctacaccggcggcggcgtgaagccctgcgccctgaactgcctggccgagggctacaacttctacaccgagagagcccccgccgtgatcgacggcacccagtgcaacgccgacagcctggacatctgcatcaacggcgagtgcaagcacgtgggctgcgacaacatcctgggcagcgacgccagagaggacagatgcagagtgtgcggcggcgacggcagcacctgcgacgccatcgagggcttcttcaacgacagcctgcccagaggcggctacatggaggtggtgcagatccccagaggcagcgtgcacatcgaggtgagagaggtggccatgagcaagaactacatcgccctgaagagcgagggcgacgactactacatcaacggcgcctggaccatcgactggcccagaaagttcgacgtggccggcaccgccttccactacaagagacccaccgacgagcccgagagcctggaggccctgggccccaccagcgagaacctgatcgtgatggtgctgctgcaggagcagaacctgggcatcagatacaagttcaacgtgcccatcaccagaaccggcagcggcgacaacgaggtgggcttcacctggaaccaccagccctggagcgagtgcagcgccacctgcgccggcggcgtgcagagacaggaggtggtgtgcaagagactggacgacaacagcatcgtgcagaacaactactgcgaccccgacagcaagccccccgagaaccagagagcctgcaacaccgagccctgcccccccgagtggttcatcggcgactggctggagtgcagcaagacctgcgacggcggcatgagaaccagagccgtgctgtgcatcagaaagatcggccccagcgaggaggagaccctggactacagcggctgcctgacccacagacccgtggagaaggagccctgcaacaaccagagctgccccccccagtgggtggccctggactggagcgagtgcacccccaagtgcggccccggcttcaagcacagaatcgtgctgtgcaagagcagcgacctgagcaagaccttccccgccgcccagtgccccgaggagagcaagccccccgtgagaatcagatgcagcctgggcagatgccccccccccagatgggtgaccggcgactggggccagtgcagcgcccagtgcggcctgggccagcagatgagaaccgtgcagtgcctgagctacaccggccaggccagcagcgactgcctggagaccgtgagaccccccagcatgcagcagtgcgagagcaagtgcgacagcacccccatcagcaacaccgaggagtgcaaggacgtgaacaaggtggcctactgccccctggtgctgaagttcaagttctgcagcagagcctacttcagacagatgtgctgcaagacctgccagggccactag

SEQ ID NO: 258668 - protein, 247 aa, Artificial Sequence
  derived and/or modified sequence
MEYHPDLENLDEDGYTQLHFDSQSNTRIAVVSEKGSCAASPPWRLIAVILGILCLVILVIAVVLGTMAIWRSNSGSNTLENGYFLSRNKENHSQPTQSSLEDSVTPTKAVKTTGVLSSPCPPNWIIYEKSCYLFSMSLNSWDGSKRQCWQLGSNLLKIDSSNELGFIVKQVSSQPDNSFWIGLSRPQTEVPWLWEDGSTFSSNLFQIRTTATQENPSPNCVWIHVSVIYDQLCSVPSYSICEKKFSM

SEQ ID NO: 258669 - DNA, 744 bp, Artificial Sequence
  derived and/or modified sequence
atggaatatcacccagacctggaaaatctggatgaggatggatatacacagctgcactttgattctcagtcaaacaccagaattgccgttgtgagcgaaaaaggcagctgcgcggcctcccccccctggcgcctaatcgctgtgatccttggcattctctgtttggtgattctggtcatcgcagttgtccttggaactatggccatatggagatccaatagtgggtccaacacactcgaaaacggctacttccttagcagaaataaggaaaaccacagtcaacccactcagagcagtctggaggactctgttactccaacaaaggctgtgaaaacaaccggggtgctcagcagcccctgtccgccaaattggattatctatgaaaaatcctgctacctgtttagtatgtccctaaacagctgggatggcagcaaaagacagtgttggcaacttggaagcaacctcctcaagatcgactcaagcaatgaactgggctttatcgttaaacaggtaagcagccaacctgataatagtttttggattggactttctcggccacagacagaagtgccctggctttgggaggacggatccacttttagctctaacctattccaaatcaggaccaccgcaactcaggaaaacccttcaccaaattgtgtctggatccacgtgagtgtaatttatgaccagttatgttccgtgccttcttatagtatctgcgagaagaagttttcaatgtag

SEQ ID NO: 258670 - DNA, 744 bp, Artificial Sequence
  derived and/or modified sequence
atggagtaccaccccgaccttgaaaatttagatgaggatggctatacacaactgcatttcgactctcaatcaaatacccggatagccgttgtgagtgagaaaggctcatgcgccgcctccccaccgtggcgtcttattgctgttatccttggaatcttgtgtttggtcatactagttatcgcagttgtgctaggcacaatggccatctggcgatctaactctggcagcaacaccctggaaaatggctactttctgagcaggaataaggagaaccactcgcaacctacgcagagctcgctggaggacagtgtcacccccaccaaagccgttaaaacgaccggcgtattgtcaagcccttgcccccccaactggatcatttatgaaaagagctgctacttgttctccatgtctctgaattcttgggacggatcaaagcggcagtgctggcagctcggttccaacttgcttaagatcgactcatctaacgagctgggttttatcgtcaagcaggtgagcagtcaacccgacaacagcttttggatcggcctttccagaccacagaccgaagtgccttggctgtgggaagacgggagcacttttagcagtaacttgttccagatcagaacaacggcgacacaggaaaatccctcccctaattgcgtctggatccacgtatcggttatctacgaccaactgtgttccgtgccaagctacagtatttgcgagaagaagttctcaatgtag

SEQ ID NO: 258671 - DNA, 744 bp, Artificial Sequence
  derived and/or modified sequence
atggagtaccacccagacctggagaacctggatgaagatggctacacccagctgcactttgacagccagagcaacaccagaattgctgtggtgtctgagaagggcagctgtgccgccagccccccctggaggctgattgctgtgatcctgggcatcctgtgcctggtgatcctggtgattgctgtggtgctgggcaccatggccatctggaggagcaacagcggcagcaacaccctggagaatggctacttcctgagcaggaacaaggagaaccacagccagcccacccagagcagcctggaggacagcgtgacccccaccaaggctgtgaagaccactggagtgctgagcagcccctgcccccccaactggatcatctatgagaagagctgctacctgttctccatgagcctgaacagctgggatggcagcaagaggcagtgctggcagctgggcagcaacctgctgaagattgacagcagcaatgagctgggcttcatcgtgaagcaggtgagcagccagcctgacaacagcttctggattggcctgagccggccccagacagaggtgccctggctgtgggaggatggcagcaccttcagcagcaacctcttccagatccgcaccacagccacccaggagaaccccagccccaactgtgtgtggatccacgtgtctgtcatctatgaccagctgtgcagcgtgcccagctacagcatctgtgagaagaagttctccatgtag

SEQ ID NO: 258672 - DNA, 744 bp, Artificial Sequence
  derived and/or modified sequence
atggagtaccaccccgacctggagaacctggacgaggacggctacactcagcttcatttcgactcacaatcaaatacgaggattgccgtcgtttcagaaaagggtagttgcgctgcgagccctccttggaggctcatcgctgtgattcttggcatcttatgtttggttattctggtgattgcggtcgtgctcggaacaatggccatctggagaagcaactctggctcgaatacactggaaaatgggtacttcctttcccggaacaaggaaaaccatagccagcccactcagagctcacttgaggactccgtgactccaacaaaggcagtcaaaaccaccggagtcctgtcgagcccttgtccacccaattggatcatctatgagaaaagctgttacctttttagtatgagtctcaacagttgggatgggagcaagagacagtgctggcagctggggagtaacctcctgaagatagatagcagcaacgagctgggctttattgtcaagcaggtgtcatcccaacccgataactctttctggatcgggctgtctcggccacagaccgaagttccttggttatgggaggacggaagtaccttttccagcaatctgtttcagatccgcaccacagcaacccaggagaatccctccccgaattgcgtctggatacacgtatctgtgatctatgatcaactgtgttcagtccccagctactcgatctgcgaaaagaaattttccatgtag

SEQ ID NO: 258673 - DNA, 744 bp, Artificial Sequence
  derived and/or modified sequence
atggagtaccaccccgacctggagaacctggacgaggacggctacacacagctacattttgatagccaatcaaataccagaattgctgtggtttcagaaaaagggtcctgcgcagcatcccctccctggcgccttatcgccgtgattctcgggattctgtgccttgtgatcctcgtgatcgccgtagttctgggcacgatggcaatttggaggtctaactccggatctaataccctcgagaatggctactttttgtcaaggaataaggagaaccactctcagccaacacaaagctcattggaagacagcgtgacacctaccaaagcagtcaagaccacgggagtcctcagctccccatgcccccccaactggatcatctatgagaagtcctgttacctcttcagcatgtccctgaattcttgggatggaagtaagcggcagtgttggcaactgggcagtaatctcctcaaaattgatagtagcaatgaactgggttttatcgtgaagcaagtctcctctcagccggacaactccttttggattggcctgtctcgcccccagactgaggtcccttggttatgggaggacgggtctacattttcttcaaacctatttcagatcaggacaacagccacccaggagaatccctcacccaactgcgtctggattcatgtatccgtgatttatgaccagctttgtagtgtgccaagctattctatctgtgaaaagaaatttagcatgtag

SEQ ID NO: 258674 - DNA, 744 bp, Artificial Sequence
  derived and/or modified sequence
atggaataccatcctgatctcgagaatctggacgaggatgggtatacccaactccacttcgactcccagagtaatactaggatcgctgtggtctccgaaaaagggagctgcgccgcttcccccccatggaggttgatagccgtgatcttgggaatcctgtgtctcgtgattctggtgatcgctgttgtactgggcaccatggctatttggaggagcaattcagggagcaataccctggagaacgggtatttcctcagtcgaaataaggagaatcattctcagcctacacagtccagcctcgaggacagcgttactccaacaaaggctgtaaaaacgacaggtgtgctgagtagtccatgccctccgaactggattatttatgagaaatcctgctatctcttcagtatgagtctaaatagttgggacggcagcaaaagacagtgctggcagcttggtagcaatctcttgaagatcgattctagcaacgaactgggattcatcgtgaagcaagtatcaagccaaccagacaatagtttttggatcggcttatctaggcctcaaactgaagtcccctggctctgggaagacggcagcacgttctcatccaacctttttcagattcgcaccactgcgacacaagagaacccttcacccaattgcgtatggatccatgtttcagtaatttatgatcagctctgcagcgttccatcctactctatttgcgagaagaagttttcaatgtag

SEQ ID NO: 258675 - DNA, 744 bp, Artificial Sequence
  derived and/or modified sequence
atggaataccacccggacctcgaaaacctcgatgaggacggttacacgcaactgcacttcgactcacagtcgaacacacgaatcgccgtggtgtccgaaaagggaagctgcgctgcatcacctccttggcggctcatcgcagtgatcctcggaatactctgcctggtgattctggtgatcgccgtggtgctgggcactatggctatatggcgaagcaatagtgggtctaacactctggagaatgggtatttcctgtctcgcaataaggagaaccacagccaaccgacccaatcatctctggaagactccgtgactccaacaaaggcagtgaagactaccggggtgctatctagtccatgcccccctaattggatcatctatgaaaagtcctgctatttgttctcaatgtccctcaactcctgggacggctccaagcggcagtgttggcagcttggctccaatcttctgaaaatagacagctcaaacgagctggggttcattgtaaaacaggtttcgagccagccagacaactccttttggataggcctatcacgcccacagacggaagtaccatggctgtgggaagacggaagcacgttcagttccaatctctttcagatccggaccacagccacccaagaaaacccctcacccaactgtgtgtggatacatgtgtcagtgatatacgaccagctgtgttcggttcccagctattcaatctgtgagaagaagttctccatgtag

SEQ ID NO: 258676 - DNA, 1130 bp, Artificial Sequence
  derived and/or modified sequence
ggttgaactacttaagcttaatttgttaaactccggtaagtacctagcccacatgatttgactcagagattctcttttgtccacagacagtcatctcaggagcagaaagaaaagagctcccaaatgctatatctattcaggggctctcaagaacaatggaatatcatcctgatttagaaaatttggatgaagatggatatactcaattacacttcgactctcaaagcaataccaggatagctgttgtttcagagaaaggatcgtgtgctgcatctcctccttggcgcctcattgctgtaattttgggaatcctatgcttggtaatactggtgatagctgtggtcctgggtaccatggctatttggagatccaattcaggaagcaacacattggagaatggctactttctatcaagaaataaagagaaccacagtcaacccacacaatcatctttagaagacagtgtgactcctaccaaagctgtcaaaaccacaggggttctttccagcccttgtcctcctaattggattatatatgagaagagctgttatctattcagcatgtcactaaattcctgggatggaagtaaaagacaatgctggcaactgggctctaatctcctaaagatagacagctcaaatgaattgggatttatagtaaaacaagtgtcttcccaacctgataattcattttggataggcctttctcggccccagactgaggtaccatggctctgggaggatggatcaacattctcttctaacttatttcagatcagaaccacagctacccaagaaaacccatctccaaattgtgtatggattcacgtgtcagtcatttatgaccaactgtgtagtgtgccctcatatagtatttgtgagaagaagttttcaatgtaagaggaagggtggagaaggagagagaaatatgtgaggtagtaaggaggacagaaaacagaacagaaaagagtaacagctgaggtcaagataaatgcagaaaatgtttagagagcttggccaactgtaatcttaaccaagaaattgaagggagaggctgtgatttctgtatttgtcgacctacaggtaggctagtattatttttctagttagtagatccctagacatggaatc

SEQ ID NO: 258677 - DNA, 881 bp, Artificial Sequence
  derived and/or modified sequence
atggaatatcatcctgatttagaaaatttggatgaagatggatatactcaattacacttcgactctcaaagcaataccaggatagctgttgtttcagagaaaggatcgtgtgctgcatctcctccttggcgcctcattgctgtaattttgggaatcctatgcttggtaatactggtgatagctgtggtcctgggtaccatgggtactgggcagtttctcaaggatctctcatttttaaataacagaagaaagctatttggagatccaattcaggaagcaacacattggagaatggctactttctatcaagaaataaagagaaccacagtcaacccacacaatcatctttagaagacagtgtgactcctaccaaagctgtcaaaaccacaggggttctttccagcccttgtcctcctaattggattatatatgagaagagctgttatctattcagcatgtcactaaattcctgggatggaagtaaaagacaatgctggcaactgggctctaatctcctaaagatagacagctcaaatgaattgagtctcactctgttgcccaagctagagtgcagtgaagccgcgacatcccaggctcaagtgatcctcccacctcagcttcctgagtagggatttatagtaaaacaagtgtcttcccaacctgataattcattttggataggcctttctcggccccagactgaggtaccatggctctgggaggatggatcaacattctcttctaacttatttcagatcagaaccacagctacccaagaaaacccatctccaaattgtgtatggattcacgtgtcagtcatttatgaccaactgtgtagtgtgccctcatatagtatttgtgagaagaagttttcaatgtaa

SEQ ID NO: 258678 - DNA, 1592 bp, Artificial Sequence
  derived and/or modified sequence
atttcctgctcttgaatatctggttgaactacttaagcttaatttgttaaactccggggctctcaagaacaatggaatatcatcctgatttagaaaatttggatgaagatggatatactcaattacacttcgactctcaaagcaataccaggatagctgttgtttcagagaaaggatcgtgtgctgcatctcctccttggcgcctcattgctgtaattttgggaatcctatgcttggtaatactggtgatagctgtggtcctgggtaccatggctatttggagatccaattcaggaagcaacacattggagaatggctactttctatcaagaaataaagagaaccacagtcaacccacacaatcatctttagaagacagtgtgactcctaccaaagctgtcaaaaccacaggggttctttccagcccttgtcctcctaattggattatatatgagaagagctgttatctattcagcatgtcactaaattcctgggatggaagtaaaagacaatgctggcaactgggctctaatctcctaaagatagacagctcaaatgaattgggatttatagtaaaacaagtgtcttcccaacctgataattcattttggataggcctttctcggccccagactgaggtaccatggctctgggaggatggatcaacattctcttctaacttatttcagatcagaaccacagctacccaagaaaacccatctccaaattgtgtatggattcacgtgtcagtcatttatgaccaactgtgtagtgtgccctcatatagtatttgtgagaagaagttttcaatgtaagaggaagggtggagaaggagagagaaatatgtgaggtagtaaggaggacagaaaacagaacagaaaagagtaacagctgaggtcaagataaatgcagaaaatgtttagagagcttggccaactgtaatcttaaccaagaaattgaagggagaggctgtgatttctgtatttgtcgacctacaggtaggctagtattatttttctagttagtagatccctagacatggaatcagggcagccaagcttgagtttttattttttatttatttatttttttgagatagggtctcactttgttacccagcctagaatcttgtataatatgtaattgtagggaaactgctctcataggaaagttttctgctttttaaatacaaaaatacataaaaatacataaaatctgatgatgaatataaaaaagtaaccaacctcattggaacaagtattaacattttggaatatgttttattagttttgtgatgtactgttttacaatttttaccatttttttcagtaattactgtaaaatggtattattggaatgaaactatatttcctcatgtgctgatttgtcttatttttttcatactttcccactggtgctatttttatttccaatggatatttctgtattactagggaggcatttacagtcctctaatgttgattaatatgtgaaaagaaattgtaccaattttactaaattatgcagtttaaaatggatgattttatgttatgtggatttcatttcaataaaaaaaaactcttatcaaaaaa

SEQ ID NO: 258679 - DNA, 744 bp, Artificial Sequence
  derived and/or modified sequence
atggagtaccaccccgacctggagaacctggacgaggacggctacacccagctgcacttcgacagccagagcaacaccagaatcgccgtggtgagcgagaagggcagctgcgccgccagccccccctggagactgatcgccgtgatcctgggcatcctgtgcctggtgatcctggtgatcgccgtggtgctgggcaccatggccatctggagaagcaacagcggcagcaacaccctggagaacggctacttcctgagcagaaacaaggagaaccacagccagcccacccagagcagcctggaggacagcgtgacccccaccaaggccgtgaagaccaccggcgtgctgagcagcccctgcccccccaactggatcatctacgagaagagctgctacctgttcagcatgagcctgaacagctgggacggcagcaagagacagtgctggcagctgggcagcaacctgctgaagatcgacagcagcaacgagctgggcttcatcgtgaagcaggtgagcagccagcccgacaacagcttctggatcggcctgagcagaccccagaccgaggtgccctggctgtgggaggacggcagcaccttcagcagcaacctgttccagatcagaaccaccgccacccaggagaaccccagccccaactgcgtgtggatccacgtgagcgtgatctacgaccagctgtgcagcgtgcccagctacagcatctgcgagaagaagttcagcatgtag

SEQ ID NO: 258680 - protein, 189 aa, Artificial Sequence
  derived and/or modified sequence
MEYHPDLENLDEDGYTQLHFDSQSNTRIAVVSEKGSCAASPPWRLIAVILGILCLVILVIAVVLGTMAIWRSNSGSNTLENGYFLSRNKENHSQPTQSSLEDSVTPTKAVKTTGVLSSPCPPNWIIYEKSCYLFSMSLNSWDGSKRQCWQLGSNLLKIDSSNELISDQNHSYPRKPISKLCMDSRVSHL

SEQ ID NO: 258681 - DNA, 570 bp, Artificial Sequence
  derived and/or modified sequence
atggaataccatcccgacctggagaacctggatgaagatggctatacccaactgcatttcgattcccagtcaaacacgcggatcgcggttgtaagcgagaaaggctcttgtgccgctagcccaccctggcgcctgatcgctgttattctcggtattctgtgtctcgtcatactggtgatcgcggtcgtgctcggtaccatggcgatctggaggtcgaactctggcagtaacactctcgagaatggttatttcctaagtcgtaataaagagaatcatagccagcctacccaatccagcttggaggactccgttactcccacaaaggccgtgaaaacgacaggcgttcttagttctccatgtcctcccaattggatcatatatgaaaaatcttgttaccttttctcgatgtcattaaattcttgggatggttcaaagaggcagtgttggcaattaggctctaatctgctgaaaatagacagttccaatgaactcataagtgatcagaatcacagctatccacgaaagccaatttctaaattatgtatggactctcgggtgtcgcacttgtag

SEQ ID NO: 258682 - DNA, 570 bp, Artificial Sequence
  derived and/or modified sequence
atggagtaccacccagacctggagaacctggatgaagatggctacacccagctgcactttgacagccagagcaacaccagaattgctgtggtgtctgagaagggcagctgtgccgccagccccccctggaggctgattgctgtgatcctgggcatcctgtgcctggtgatcctggtgattgctgtggtgctgggcaccatggccatctggaggagcaacagcggcagcaacaccctggagaatggctacttcctgagcaggaacaaggagaaccacagccagcccacccagagcagcctggaggacagcgtgacccccaccaaggctgtgaagaccactggagtgctgagcagcccctgcccccccaactggatcatctatgagaagagctgctacctgttctccatgagcctgaacagctgggatggcagcaagaggcagtgctggcagctgggcagcaacctgctgaagattgacagcagcaatgagctgatcagtgaccagaaccacagctaccccaggaagcccatcagcaagctgtgcatggacagccgggtgagccacctgtag

SEQ ID NO: 258683 - DNA, 570 bp, Artificial Sequence
  derived and/or modified sequence
atggagtaccaccccgacctggagaacctggacgaggacggctacactcaactacatttcgattcacaatctaacactcggattgccgttgtaagtgagaaggggagttgtgctgccagcccaccgtggagacttattgccgtgatactgggtattctgtgcttggtaatacttgttattgccgttgtgctaggcacaatggctatttggcggtcgaacagcggaagtaatacactcgagaacggctattttctttcccgaaacaaggaaaatcatagccaacccacccagagcagtctggaggatagtgtgactccaactaaggctgttaagactacaggcgtgttgtcttcaccttgcccgcccaactggattatctacgagaagtcctgctacctgttcagcatgtccctgaattcatgggacgggagcaagcgccagtgttggcagctaggaagtaacttgctcaagatagactctagtaacgagttaatttctgatcagaaccactcttatcctaggaagccaattagcaagctctgcatggacagtcgggtgagccacctttag

SEQ ID NO: 258684 - DNA, 570 bp, Artificial Sequence
  derived and/or modified sequence
atggaatatcatcccgacctggagaatctggatgaggatggatacacacaactgcactttgattctcagagtaacacccgcattgcggttgtgagtgagaagggaagctgtgccgcttctcccccatggcgacttatcgcagtcatcttgggcatcctttgtctagtgattctggtcattgccgtggtcctgggcactatggctatctggagaagcaatagcggcagcaatacgctcgagaatgggtacttcctcagccggaataaagagaaccactcacagccaacacagtcctcattggaagactctgtaaccccgaccaaggctgttaagactaccggagtgctgagtagtccatgtcccccaaattggatcatctacgaaaaatcttgctatctgttctctatgtcactcaattcctgggatggatctaaacgtcagtgctggcaactcggatctaacctgttaaagatagacagcagcaacgagcttatcagcgaccagaaccactcttatccccgtaaaccaatctcaaagctctgtatggactcgcgcgtctcccatctctag

SEQ ID NO: 258685 - DNA, 625 bp, Artificial Sequence
  derived and/or modified sequence
atggaatatcatcctgatttagaaaatttggatgaagatggatatactcaattacacttcgactctcaaagcaataccaggatagctgttgtttcagagaaaggatcgtgtgctgcatctcctccttggcgcctcattgctgtaattttgggaatcctatgcttggtaatactggtgatagctgtggtcctgggtaccatggctatttggagatccaattcaggaagcaacacattggagaatggctactttctatcaagaaataaagagaaccacagtcaacccacacaatcatctttagaagacagtgtgactcctaccaaagctgtcaaaaccacaggggttctttccagcccttgtcctcctaattggattatatatgagaagagctgttatctattcagcatgtcactaaattcctgggatggaagtaaaagacaatgctggcaactgggctctaatctcctaaagatagacagctcaaatgaattgatttcagatcagaaccacagctacccaagaaaacccatctccaaattgtgtatggattcacgtgtcagtcatttatgaccaactgtgtagtgtgccctcatatagtatttgtgagaagaagttttcaatgtaa

SEQ ID NO: 258686 - DNA, 570 bp, Artificial Sequence
  derived and/or modified sequence
atggagtaccaccccgacctggagaacctggacgaggacggctacacccagctgcacttcgacagccagagcaacaccagaatcgccgtggtgagcgagaagggcagctgcgccgccagccccccctggagactgatcgccgtgatcctgggcatcctgtgcctggtgatcctggtgatcgccgtggtgctgggcaccatggccatctggagaagcaacagcggcagcaacaccctggagaacggctacttcctgagcagaaacaaggagaaccacagccagcccacccagagcagcctggaggacagcgtgacccccaccaaggccgtgaagaccaccggcgtgctgagcagcccctgcccccccaactggatcatctacgagaagagctgctacctgttcagcatgagcctgaacagctgggacggcagcaagagacagtgctggcagctgggcagcaacctgctgaagatcgacagcagcaacgagctgatcagcgaccagaaccacagctaccccagaaagcccatcagcaagctgtgcatggacagcagagtgagccacctgtag

SEQ ID NO: 258687 - protein, 143 aa, Artificial Sequence
  derived and/or modified sequence
MEYHPDLENLDEDGYTQLHFDSQSNTRIAVVSEKGSCAASPPWRLIAVILGILCLVILVIAVVLGTMGVLSSPCPPNWIIYEKSCYLFSMSLNSWDGSKRQCWQLGSNLLKIDSSNELISDQNHSYPRKPISKLCMDSRVSHL

SEQ ID NO: 258688 - DNA, 432 bp, Artificial Sequence
  derived and/or modified sequence
atggaatatcaccccgacctggagaacttggatgaagacggttatacacagcttcatttcgactctcagagcaacactcggatcgccgtggttagtgaaaagggatcgtgcgccgcttcaccaccttggcggctgattgctgtaatcttgggaatcctttgtctggtgatcctcgtcattgccgtggtcctggggactatgggagtgctcagctccccctgcccccctaactggattatctatgagaagtcttgctacttattctccatgagcctgaattcttgggatggctcaaagaggcagtgctggcagctgggctccaacctgctgaaaatcgacagcagcaacgaactaatcagcgatcagaatcactcatacccccggaagccaatctccaagctgtgcatggactcgcgtgtgagccacctgtag

SEQ ID NO: 258689 - DNA, 432 bp, Artificial Sequence
  derived and/or modified sequence
atggagtaccacccagacctggagaacctggatgaagatggctacacccagctgcactttgacagccagagcaacaccagaattgctgtggtgtctgagaagggcagctgtgccgccagccccccctggaggctgattgctgtgatcctgggcatcctgtgcctggtgatcctggtgattgctgtggtgctgggcaccatgggcgtgctgagcagcccctgcccccccaactggatcatctatgagaagagctgctacctgttctccatgagcctgaacagctgggatggcagcaagaggcagtgctggcagctgggcagcaacctgctgaagattgacagcagcaatgagctgatcagtgaccagaaccacagctaccccaggaagcccatcagcaagctgtgcatggacagccgggtgagccacctgtag

SEQ ID NO: 258690 - DNA, 432 bp, Artificial Sequence
  derived and/or modified sequence
atggagtaccaccccgacctggagaacctggacgaggacggctacacccaactacattttgatagtcagagcaatactagaattgccgtggtgtcagagaaagggtcctgcgctgctagcccgccttggaggttgatcgctgtgattctgggcatactctgcctggtaatcctggttatagctgtcgtgttagggaccatgggcgtgctttcgtctccgtgcccgcctaattggattatatacgagaagagctgctatctgttttccatgtccttgaattcctgggatgggtcaaagcggcagtgttggcagctgggttctaatctgttgaagattgatagctccaacgagctgatctcagatcagaatcactcttatcctcgcaagccaatttccaagctgtgcatggattctcgtgtctcacacctctag

SEQ ID NO: 258691 - DNA, 432 bp, Artificial Sequence
  derived and/or modified sequence
atggagtaccaccccgaccttgaaaatctggacgaggacgggtacacccaattgcactttgattctcagagcaacacccggatagccgtggtgtccgaaaagggctcatgcgcggcatcaccgccatggaggctaattgcagtaatactgggcattctctgtttggtgattctggttatagcagtcgtcttggggaccatgggggttctgtccagtccttgccctccaaattggatcatttacgaaaagagctgctatctgttctccatgtccttaaactcttgggatggcagcaaacgtcagtgctggcagctggggagcaacttgctgaagattgattctagcaacgagctgattagtgatcaaaatcactcctacccccgtaaacccatctccaaactttgcatggactccagagtcagccacctctag

SEQ ID NO: 258692 - DNA, 1154 bp, Artificial Sequence
  derived and/or modified sequence
agacagtcatctcaggagcagaaagaaaagagctcccaaatgctatatctattcaggggctctcaagaacaatggaatatcatcctgatttagaaaatttggatgaagatggatatactcaattacacttcgactctcaaagcaataccaggatagctgttgtttcagagaaaggatcgtgtgctgcatctcctccttggcgcctcattgctgtaattttgggaatcctatgcttggtaatactggtgatagctgtggtcctgggtaccatgggggttctttccagcccttgtcctcctaattggattatatatgagaagagctgttatctattcagcatgtcactaaattcctgggatggaagtaaaagacaatgctggcaactgggctctaatctcctaaagatagacagctcaaatgaattgatttcagatcagaaccacagctacccaagaaaacccatctccaaattgtgtatggattcacgtgtcagtcatttatgaccaactgtgtagtgtgccctcatatagtatttgtgagaagaagttttcaatgtaagaggaagggtggagaaggagagagaaatatgtgaggtagtaaggaggacagaaaacagaacagaaaagagtaacagctgaggtcaagataaatgcagaaaatgtttagagagcttggccaactgtaatcttaaccaagaaattgaagggagaggctgtgatttctgtatttgtcgacctacaggtaggctagtattatttttctagttagtagatccctagacatggaatcagggcagccaagcttgagtttttattttttatttatttatttttttgagatagggtctcactttgttacccaggctggagtgcagtggcacaatctcgactcactgcagctatctctcgcctcagcccctcaagtagctgggactacaggtgcatgccaccatgccaggctaatttttggtgttttttgtagagactgggttttgccatgttgaccaagctggtctctaactcctgggcttaagtgatctgcccgccttggcctcccaaagtgctgggattacagatgtgagccaccacacctggccccaagcttgaattttcattctgccattgacttggcatttaccttgggtaagccataag

SEQ ID NO: 258693 - DNA, 432 bp, Artificial Sequence
  derived and/or modified sequence
atggagtaccaccccgacctggagaacctggacgaggacggctacacccagctgcacttcgacagccagagcaacaccagaatcgccgtggtgagcgagaagggcagctgcgccgccagccccccctggagactgatcgccgtgatcctgggcatcctgtgcctggtgatcctggtgatcgccgtggtgctgggcaccatgggcgtgctgagcagcccctgcccccccaactggatcatctacgagaagagctgctacctgttcagcatgagcctgaacagctgggacggcagcaagagacagtgctggcagctgggcagcaacctgctgaagatcgacagcagcaacgagctgatcagcgaccagaaccacagctaccccagaaagcccatcagcaagctgtgcatggacagcagagtgagccacctgtag

SEQ ID NO: 258694 - protein, 168 aa, Artificial Sequence
  derived and/or modified sequence
MEYHPDLENLDEDGYTQLHFDSQSNTRIAVVSEKGVLSSPCPPNWIIYEKSCYLFSMSLNSWDGSKRQCWQLGSNLLKIDSSNELGFIVKQVSSQPDNSFWIGLSRPQTEVPWLWEDGSTFSSNLFQIRTTATQENPSPNCVWIHVSVIYDQLCSVPSYSICEKKFSM

SEQ ID NO: 258695 - DNA, 507 bp, Artificial Sequence
  derived and/or modified sequence
atggagtaccaccctgatttggaaaatctggatgaagatggctacacacagcttcatttcgactcgcagagcaataccaggatagccgtggtcagtgaaaaaggggtcttatcgtcgccttgtcctcctaattggatcatatacgaaaagagttgttacttgttctccatgtcattgaattcctgggatggatctaaacggcagtgttggcagctcggatccaacctgctgaagatcgattcttccaacgaacttggatttatcgtcaaacaggtgtccagtcagccagataattctttctggatcggcttgagcaggccccaaacagaggtcccctggctgtgggaagacggctctacgttttcttccaacctgttccagatccggacgaccgcaactcaagaaaatccttcccccaactgcgtatggatccatgtgtcagtcatttacgatcagctgtgtagcgtcccatcgtactcgatctgtgagaagaagttttctatgtag

SEQ ID NO: 258696 - DNA, 507 bp, Artificial Sequence
  derived and/or modified sequence
atggagtaccacccagacctggagaacctggatgaagatggctacacccagctgcactttgacagccagagcaacaccagaattgctgtggtgtctgagaagggcgtgctgagcagcccctgcccccccaactggatcatctatgagaagagctgctacctgttctccatgagcctgaacagctgggatggcagcaagaggcagtgctggcagctgggcagcaacctgctgaagattgacagcagcaatgagctgggcttcatcgtgaagcaggtgagcagccagcctgacaacagcttctggattggcctgagccggccccagacagaggtgccctggctgtgggaggatggcagcaccttcagcagcaacctcttccagatccgcaccacagccacccaggagaaccccagccccaactgtgtgtggattcatgtgtctgtcatctatgaccagctgtgcagcgtgcccagctacagcatctgtgagaagaagttctccatgtag

SEQ ID NO: 258697 - DNA, 507 bp, Artificial Sequence
  derived and/or modified sequence
atggagtaccaccccgacctggagaacctggacgaggacggctacacgcagctgcacttcgacagccagagcaacacccgcatcgcagtggtgagtgaaaagggggtgctctcaagtccctgtccgcctaactggattatttatgagaaatcatgttacctcttttctatgtccctcaattcgtgggatgggtcgaagcggcaatgctggcagctgggctcaaatttgctcaagattgactcttccaacgagctgggcttcatcgtcaaacaggtaagttcccaacccgataattcattctggatcggcctatctaggccccagacagaggttccatggctgtgggaagacggatcgactttttcttctaacctttttcagattcggacaaccgccacccaagaaaacccttctcccaactgcgtgtggatccacgtcagcgtgatctacgatcagctatgctccgtcccaagctacagtatttgcgaaaaaaaattctctatgtag

SEQ ID NO: 258698 - DNA, 507 bp, Artificial Sequence
  derived and/or modified sequence
atggaatatcatccagaccttgaaaacctcgatgaggacggctatactcaactgcacttcgattctcagtctaacacccggatcgccgttgtgagcgaaaagggggtgctatccagcccctgtcctccaaattggataatttacgagaaaagttgctacctgttctccatgtctctgaacagctgggatggaagtaagcgccagtgctggcagcttggctcaaatctgttgaagatcgatagcagtaatgagcttggctttatcgtgaagcaagtctcctctcagcccgataattccttttggattggtctctccagacctcagaccgaggtcccgtggttgtgggaagatgggtccacattttcgtcgaatctttttcagattaggacaacagctactcaggagaatccatctcccaattgcgtctggattcacgtgagcgtcatctatgatcagctatgttccgtaccaagttactccatctgtgaaaagaaattttcgatgtag

SEQ ID NO: 258699 - DNA, 1000 bp, Artificial Sequence
  derived and/or modified sequence
atgatttgactcagagattctcttttgtccacagacagtcatctcaggagcagaaagaaaagagctcccaaatgctatatctattcaggggctctcaagaacaatggaatatcatcctgatttagaaaatttggatgaagatggatatactcaattacacttcgactctcaaagcaataccaggatagctgttgtttcagagaaaggggttctttccagcccttgtcctcctaattggattatatatgagaagagctgttatctattcagcatgtcactaaattcctgggatggaagtaaaagacaatgctggcaactgggctctaatctcctaaagatagacagctcaaatgaattgggatttatagtaaaacaagtgtcttcccaacctgataattcattttggataggcctttctcggccccagactgaggtaccatggctctgggaggatggatcaacattctcttctaacttatttcagatcagaaccacagctacccaagaaaacccatctccaaattgtgtatggattcacgtgtcagtcatttatgaccaactgtgtagtgtgccctcatatagtatttgtgagaagaagttttcaatgtaagaggaagggtggagaaggagagagaaatatgtgaggtagtaaggaggacagaaaacagaacagaaaagagtaacagctgaggtcaagataaatgcagaaaatgtttagagagcttggccaactgtaatcttaaccaagaaattgaagggagaggctgtgatttctgtatttgtcgacctacaggtaggctagtattatttttctagttagtagatccctagacatggaatcagggcagccaagcttgagtttttattttttatttatttatttttttgagatagggtctcactttgttacccaggctggagtgcagtggcacaatctcgactcactgcagctatctctcgcctcagcccctcaagtagctgggactacaggtgcatgcca

SEQ ID NO: 258700 - DNA, 507 bp, Artificial Sequence
  derived and/or modified sequence
atggagtaccaccccgacctggagaacctggacgaggacggctacacccagctgcacttcgacagccagagcaacaccagaatcgccgtggtgagcgagaagggcgtgctgagcagcccctgcccccccaactggatcatctacgagaagagctgctacctgttcagcatgagcctgaacagctgggacggcagcaagagacagtgctggcagctgggcagcaacctgctgaagatcgacagcagcaacgagctgggcttcatcgtgaagcaggtgagcagccagcccgacaacagcttctggatcggcctgagcagaccccagaccgaggtgccctggctgtgggaggacggcagcaccttcagcagcaacctgttccagatcagaaccaccgccacccaggagaaccccagccccaactgcgtgtggatccacgtgagcgtgatctacgaccagctgtgcagcgtgcccagctacagcatctgcgagaagaagttcagcatgtag

SEQ ID NO: 258701 - protein, 77 aa, Artificial Sequence
  derived and/or modified sequence
MEYHPDLENLDEDGYTQLHFDSQSNTRIAVVSEKGSCAASPPWRLIAVILGILCLVILVIAVVLGTMAGFKAVEFKG

SEQ ID NO: 258702 - DNA, 234 bp, Artificial Sequence
  derived and/or modified sequence
atggaatatcatcccgacctggaaaatctggatgaggatggctacactcagcttcactttgactcacagtcaaataccagaatcgccgttgtgagcgagaagggctcctgcgccgcctctccgccatggagactgattgccgttatcttaggtattttatgtcttgtgattttggtgattgctgtggtactaggcaccatggctggctttaaagcagtggagtttaaaggttag

SEQ ID NO: 258703 - DNA, 351 bp, Artificial Sequence
  derived and/or modified sequence
atggagtatcatccagacctagagaaccttgacgaggacggatatacccagctgcactttgacagtcaaagcaatactcgcatcgcagtggtctcagagaaggggagctgtgcagcttctcctccctggaggctgattgcagtgatcctgggaattttgtgcctcgtgatcttggtgattgccgtcgttttaggcaccatgggtacgggccagtttctgaaagatctgtccttcctcaataatcggcggaagttgttcggggacccaatccaggaggccacccactggaggatggcaaccttttaccaagaaataaaaagaactacggtgaaccctcacaatcacttgtag

SEQ ID NO: 258704 - DNA, 234 bp, Artificial Sequence
  derived and/or modified sequence
atggagtaccacccagacctggagaacctggatgaagatggctacacccagctgcactttgacagccagagcaacaccagaattgctgtggtgtctgagaagggcagctgtgccgccagccccccctggaggctgattgctgtgatcctgggcatcctgtgcctggtgatcctggtgattgctgtggtgctgggcaccatggccggcttcaaggctgtggagttcaagggctag

SEQ ID NO: 258705 - DNA, 351 bp, Artificial Sequence
  derived and/or modified sequence
atggagtaccacccagacctggagaacctggatgaagatggctacacccagctgcactttgacagccagagcaacaccagaattgctgtggtgtctgagaagggcagctgtgccgccagccccccctggaggctgattgctgtgatcctgggcatcctgtgcctggtgatcctggtgattgctgtggtgctgggcaccatgggcaccggccagttcctgaaggacctgtccttcctgaacaacagaaggaagctgtttggagaccccatccaggaggccacccactggaggatggccaccttctaccaggagatcaagaggaccaccgtgaacccccacaaccacctgtag

SEQ ID NO: 258706 - DNA, 234 bp, Artificial Sequence
  derived and/or modified sequence
atggagtaccaccccgacctggagaacctggacgaggacggctacacccagctgcattttgattcccagtccaatacccgaatcgccgtggtaagcgagaaggggtcctgtgctgcgagccccccgtggaggctgatagccgtgattctcgggattttgtgcctggtaattctcgtgattgccgttgtcttaggcaccatggccggttttaaggctgttgaattcaaagggtag

SEQ ID NO: 258707 - DNA, 351 bp, Artificial Sequence
  derived and/or modified sequence
atggagtaccaccccgacctggagaacctggacgaggacggctacacgcaacttcattttgattctcaatcgaatacgagaatcgcagtcgtgtcagaaaaagggagctgcgccgcatcacctccatggcggttgattgctgttatcctggggatcctgtgcctggtgatcttagtgatcgctgtcgtcctgggtacgatgggcacgggccagttcctcaaggacttgtcattcctcaataaccgtcggaagctgttcggcgatcccatacaggaagctacacattggcgcatggcaacattttatcaggaaattaaaagaacaacagttaatccacataatcacctgtag

SEQ ID NO: 258708 - DNA, 234 bp, Artificial Sequence
  derived and/or modified sequence
atggagtatcacccagaccttgaaaatctggatgaggacggatacacgcagctccactttgactctcagtctaacacaaggatagcagtagtaagtgagaagggctcatgtgcagcttcccctccctggaggctgatcgccgtcatcttgggaatcctctgtctcgtgatcttagtgatcgccgttgtgttaggcacaatggcaggctttaaagctgtggagttcaagggatag

SEQ ID NO: 258709 - DNA, 351 bp, Artificial Sequence
  derived and/or modified sequence
atggaataccatcccgacctggaaaatctggatgaagacgggtacactcagttgcattttgactctcagagcaatactagaattgccgtggtgtcagagaaagggagctgcgctgcgagcccaccctggcgcttgattgccgtaatcctcggtatactgtgcttagtaattctggtaatcgctgtggtactaggaaccatgggtacaggacagttcctgaaagatcttagcttcctgaataaccgaagaaagctgtttggggaccctattcaggaagcaactcattggcgcatggctacattctaccaggagatcaagcgtaccaccgtaaatcctcacaatcacctgtag

SEQ ID NO: 258710 - DNA, 425 bp, Artificial Sequence
  derived and/or modified sequence
ccacatgatttgactcagagattctcttttgtccacagacagtcatctcaggagcagaaagaaaagagctcccaaatgctatatctattcaggggctctcaagaacaatggaatatcatcctgatttagaaaatttggatgaagatggatatactcaattacacttcgactctcaaagcaataccaggatagctgttgtttcagagaaaggatcgtgtgctgcatctcctccttggcgcctcattgctgtaattttgggaatcctatgcttggtaatactggtgatagctgtggtcctgggtaccatggctggtttcaaagctgtggaattcaaaggataaattaatgaagaaaacaagcggagctgaagaagaaagtacaatatggtgctgtcttcctaatgaaataaattcactaaatggaca

SEQ ID NO: 258711 - DNA, 234 bp, Artificial Sequence
  derived and/or modified sequence
atggagtaccaccccgacctggagaacctggacgaggacggctacacccagctgcacttcgacagccagagcaacaccagaatcgccgtggtgagcgagaagggcagctgcgccgccagccccccctggagactgatcgccgtgatcctgggcatcctgtgcctggtgatcctggtgatcgccgtggtgctgggcaccatggccggcttcaaggccgtggagttcaagggctag

SEQ ID NO: 258712 - DNA, 351 bp, Artificial Sequence
  derived and/or modified sequence
atggagtaccaccccgacctggagaacctggacgaggacggctacacccagctgcacttcgacagccagagcaacaccagaatcgccgtggtgagcgagaagggcagctgcgccgccagccccccctggagactgatcgccgtgatcctgggcatcctgtgcctggtgatcctggtgatcgccgtggtgctgggcaccatgggcaccggccagttcctgaaggacctgagcttcctgaacaacagaagaaagctgttcggcgaccccatccaggaggccacccactggagaatggccaccttctaccaggagatcaagagaaccaccgtgaacccccacaaccacctgtag

SEQ ID NO: 258713 - protein, 29 aa, Artificial Sequence
  derived and/or modified sequence
MSFFQLLMKRKELIPLVVFMTVAAGGASS

SEQ ID NO: 258714 - protein, 83 aa, Artificial Sequence
  derived and/or modified sequence
MSFFQLLMKRKELIPLVVFMTVAAGGASSFAVYSLWKTDVILDRKKNPEPWETVDPTVPQKLITINQQWKPIEELQNVQRVTK

SEQ ID NO: 258715 - DNA, 875 bp, Artificial Sequence
  derived and/or modified sequence
gttcggttccgggcgttaccatcgtccgtgcgcaccgcccggcgtccaggtgagtctcccatctgcagagacgcggacgcgccggcccgcagttggcctgcggagcgcggtggacggtttggcgcccaccaggcgatcaatactttggatttttaatttctagatttggcaattcttcgctgaagtcatcatgagctttttccaactcctgatgaaaaggaaggaactcattcccttggtggtgttcatgactgtggcggcgggtggagcctcatctttcgctgtgtattctctttggaaaaccgatgtgatccttgatcgaaaaaaaaatccagaaccttgggaaactgtggaccctactgtacctcaaaagcttataacaatcaaccaacaatggaaacccattgaagagttgcaaaatgtccaaagggtgaccaaatgacgagccctcgcctctttcttctgaagagtactctataaatctagtggaaacatttctgcacaaactagattctggacaccagtgtgcggaaatgcttctgctacatttttagggtttgtctacattttttgggctctggataaggaattaaaggagtgcagcaataactgcactgtctaaaagtttgtgcttattttcttgtaaatttgaatattgcatattgaaatttttgtttatgatctatgaatgtttttcttaaaatttacaaagctttgtaaattagattttctttaataaaatgccatttgtgcaagatttctcaaagattaggtatatatttaaatggaagagaaaatatttttatgggagaaaaatacatttgaaccatgaaatttcatcttttaaataacatccagtacagatttctgtgtaa

SEQ ID NO: 258716 - DNA, 732 bp, Artificial Sequence
  derived and/or modified sequence
gcgtgaccagagcgcgctggcccggcccacccggggcggttgtggtcgctatatataaggtggggaggccgccggcccgttcggttccgggcgttaccatcgtccgtgcgcaccgcccggcgtccagatttggcaattcttcgctgaagtcatcatgagctttttccaactcctgatgaaaaggaaggaactcattcccttggtggtgttcatgactgtggcggcgggtggagcctcatctttcgctgtgtattctctttggaaaaccgatgtgatccttgatcgaaaaaaaaatccagaaccttgggaaactgtggaccctactgtacctcaaaagcttataacaatcaaccaacaatggaaacccattgaagagttgcaaaatgtccaaagggtgaccaaatgacgagccctcgcctctttcttctgaagagtactctataaatctagtggaaacatttctgcacaaactagattctggacaccagtgtgcggaaatgcttctgctacatttttagggtttgtctacattttttgggctctggataaggaattaaaggagtgcagcaataactgcactgtctaaaagtttgtgcttattttcttgtaaatttgaatattgcatattgaaatttttgtttatgatctatgaatgtttttcttaaaatttacaaagctttgtaaattagattttctttaataaaatgccatttgtgcaagatttctcaaaga

SEQ ID NO: 258717 - DNA, 252 bp, Artificial Sequence
  derived and/or modified sequence
atgagcttcttccagctgctgatgaagagaaaggagctgatccccctggtggtgttcatgaccgtggccgccggcggcgccagcagcttcgccgtgtacagcctgtggaagaccgacgtgatcctggacagaaagaagaaccccgagccctgggagaccgtggaccccaccgtgccccagaagctgatcaccatcaaccagcagtggaagcccatcgaggagctgcagaacgtgcagagagtgaccaagtag

SEQ ID NO: 258718 - DNA, 252 bp, Artificial Sequence
  derived and/or modified sequence
atgtcattcttccagcttttgatgaagcgaaaagagctgattccactcgttgtcttcatgacagtcgctgcaggcggagcatcctcgtttgctgtctactcattgtggaaaaccgacgttatcctggacaggaagaagaatccggaaccatgggagaccgttgaccccacagtgccccaaaaactcatcacaataaatcagcagtggaaacccattgaagaactgcagaatgtgcagcgggtgacgaaatag

SEQ ID NO: 258719 - DNA, 252 bp, Artificial Sequence
  derived and/or modified sequence
atgtcctttttccagctgctgatgaaaagaaaggaattgatacccctcgtagtgtttatgacggtggccgctggtggtgccagttcgttcgctgtttattccctgtggaagaccgacgttattctggaccggaaaaagaatccagagccctgggagaccgttgaccccactgtgccccagaaactgatcactattaatcaacaatggaaaccgattgaggaactgcagaatgtccagagagtgaccaaatag

SEQ ID NO: 258720 - DNA, 252 bp, Artificial Sequence
  derived and/or modified sequence
atgtccttcttccagctgctgatgaagaggaaggagctgatccccctggtggtgttcatgacagtggccgccggcggggccagcagctttgctgtgtacagcctgtggaagacagatgtgatcctggacaggaagaagaaccctgagccctgggagaccgtggaccccaccgtgccccagaagctgatcaccatcaaccagcagtggaagcccatcgaggagctgcagaatgtgcagagggtgaccaagtag

SEQ ID NO: 258721 - DNA, 252 bp, Artificial Sequence
  derived and/or modified sequence
atgagcttcttccagctgctgatgaagcggaaggagctgatccccctggtggtcttcatgaccgttgcggcgggaggggcttcaagctttgcagtgtattcactctggaagacggacgtgattctcgatcgtaaaaagaatccagagccctgggaaaccgtggaccccaccgtacctcaaaagctgataacaatcaaccagcagtggaagccaattgaggagttgcagaacgtgcagcgtgtgactaagtag

SEQ ID NO: 258722 - DNA, 252 bp, Artificial Sequence
  derived and/or modified sequence
atgagcttcttccagctgctgatgaagcggaaggagctgatcccccttgtagtcttcatgaccgtggccgctggcggagcgtcctcctttgcagtctacagtttgtggaaaacagatgtcattctggacagaaagaagaatcctgaaccctgggaaacggtggatccaacggtgcctcagaagttgattactattaaccagcagtggaaaccgattgaagagctccaaaatgtgcaaagagtcacaaaatag

SEQ ID NO: 258723 - DNA, 252 bp, Artificial Sequence
  derived and/or modified sequence
atgtcattctttcagttgctgatgaagagaaaggaattgattcccttggtggttttcatgaccgttgcagctggaggggcatcctccttcgcggtgtacagtctatggaaaacagacgtcatcttggaccgaaaaaagaatcctgagccttgggaaactgtggatccaacggtcccccaaaaactcattacgatcaaccagcagtggaaacccatcgaggaactgcaaaacgttcaaagagtgaccaaatag

SEQ ID NO: 258724 - DNA, 252 bp, Artificial Sequence
  derived and/or modified sequence
atgagttttttccagctgctgatgaaaaggaaggaactcatccccctcgtggtatttatgaccgtggccgcagggggagcaagcagtttcgccgtgtattccctctggaagacggacgtcatcctggatcggaaaaaaaaccccgagccttgggaaacagtagatcctacggttccacagaaactgatcactattaaccaacagtggaagcccatcgaggagctgcaaaatgtgcaaagagtcactaaatag

SEQ ID NO: 258725 - DNA, 87 bp, Artificial Sequence
  derived and/or modified sequence
atgagctttttccaactcctgatgaaaaggaaggaactcattcccttggtggtgttcatgactgtggcggcgggtggagcctcatct

SEQ ID NO: 258726 - protein, 83 aa, Artificial Sequence
  derived and/or modified sequence
MSDNDDIEVESDEEQPRFQSAADKRAHHNALERKRRDHIKDSFHSLRDSVPSLQGEKGTKMKLTLPPVFPYEHLPFPTVFCHG

SEQ ID NO: 258727 - DNA, 252 bp, Artificial Sequence
  derived and/or modified sequence
atgagcgacaacgacgacatcgaggtggagagcgacgaggagcagcccagattccagagcgccgccgacaagagagcccaccacaacgccctggagagaaagagaagagaccacatcaaggacagcttccacagcctgagagacagcgtgcccagcctgcagggcgagaagggcaccaagatgaagctgaccctgccccccgtgttcccctacgagcacctgcccttccccaccgtgttctgccacggctag

SEQ ID NO: 258728 - DNA, 252 bp, Artificial Sequence
  derived and/or modified sequence
atgtccgacaatgatgacatcgaagtggagtctgacgaggagcagcctcgcttccaaagtgcggccgataagagggcgcaccataacgccctggagcggaagagaagggaccacatcaaagattccttccacagtctgagggactcagtgccgtctctgcaaggtgagaaaggtaccaagatgaaactaacacttccccctgtgtttccctacgagcacctgcccttccccactgtattttgtcacggttag

SEQ ID NO: 258729 - DNA, 252 bp, Artificial Sequence
  derived and/or modified sequence
atgtctgacaatgatgacatcgaggtggagagtgatgaggagcagccccgcttccagagcgctgctgacaagagggcccaccacaatgccctggagaggaagagaagagaccacatcaaggacagcttccacagcctgcgggacagcgtgcccagcctgcagggcgagaagggcaccaagatgaagctgaccctgccccctgtgttcccctatgagcacctgcccttccccaccgtcttctgccacggctag

SEQ ID NO: 258730 - DNA, 252 bp, Artificial Sequence
  derived and/or modified sequence
atgagcgacaacgacgacatcgaggtggagagcgacgaggagcagccccgattccagtctgccgctgataaacgcgcacaccacaatgccctggaacgcaaaaggcgggaccacattaaggactcgttccactctcttcgcgactcagtgccttcgctccaaggcgagaagggtacaaagatgaagctcactctaccacctgtctttccatacgaacacttacctttccctacggtgttttgtcatggctag

SEQ ID NO: 258731 - DNA, 330 bp, Artificial Sequence
  derived and/or modified sequence
ttcccctccccgccgccgctgcagtggccgctccctgggccgtaggaaatgagcgataacgatgacatcgaggtggagagcgacgaagagcaaccgaggtttcaatctgcggctgacaaacgggctcatcataatgcactggaacgaaaacgtagggaccacatcaaagacagctttcacagtttgcgggactcagtcccatcactccaaggagagaagggaacaaagatgaagttaaccctcccacctgtctttccttatgaacacttgccttttccaactgttttctgccatggctaatcagaaaaagtttcttaaggaaatggtggc

SEQ ID NO: 258732 - DNA, 252 bp, Artificial Sequence
  derived and/or modified sequence
atgtccgacaatgatgatatcgaggtggagtccgatgaggagcagccccgtttccagtccgccgctgacaagagagcacatcacaacgccctggagcgtaagcggagggaccatatcaaggacagctttcacagcctgcgagattcagtgccatctctgcaaggagaaaaaggaactaaaatgaaactcactcttcctcccgtgtttccttacgagcacttaccttttccaaccgtcttctgtcacggatag

SEQ ID NO: 258733 - protein, 93 aa, Artificial Sequence
  derived and/or modified sequence
MAQSGGEARPGPKTAVQIRVAIQEAEDVDELEDEEEGAETRGAGDPARYLSPGWGSASEEEPSRGHRNRSSVNSRTMLASFIVSSAPSTAPST

SEQ ID NO: 258734 - protein, 104 aa, Artificial Sequence
  derived and/or modified sequence
MAQSGGEARPGPKTAVQIRVAIQEAEDVDELEDEEEGAETRGAGDPARYLSPGWGSASEEEPSRGHRTAQLPWLESQQVFSLKPFLLPTGIELTPENPWGSSVS

SEQ ID NO: 258735 - DNA, 282 bp, Artificial Sequence
  derived and/or modified sequence
atggcccagagcggcggcgaggccagacccggccccaagaccgccgtgcagatcagagtggccatccaggaggccgaggacgtggacgagctggaggacgaggaggagggcgccgagaccagaggcgccggcgaccccgccagatacctgagccccggctggggcagcgccagcgaggaggagcccagcagaggccacagaaacagaagcagcgtgaacagcagaaccatgctggccagcttcatcgtgagcagcgcccccagcaccgcccccagcacctag

SEQ ID NO: 258736 - DNA, 561 bp, Artificial Sequence
  derived and/or modified sequence
gcagtcgctgccgaccggctggctgggccttgcggcgtgaggaccccggcggcgccgcagtcccgcgagccatggcccagtccggcggggaggctcggcccgggcccaagacggcggtgcagatccgcgtcgccatccaggaggccgaggacgtggacgagttggaggacgaggaggagggggcggagactcggggcgccggggacccggcccggtacctcagccccggctggggcagcgcgagcgaggaggagccgagccgcgggcacaggaataggagctcggtgaattcaaggaccatgcttgcttcgttcattgtatcttcagcacctagcacagcacccagcacataggacatgtttgttgactgaatgcgtatctctatcatcacactcactcaatggtgttgagatatttgtgtttccccttccctagacagtgagatccttgaaggcagctgccttatcttattcctttttgtatttccatacctagcctaatacctagcttatataagggaacagaataaatgaacaataaagaaaagtctttacagcctct

SEQ ID NO: 258737 - DNA, 315 bp, Artificial Sequence
  derived and/or modified sequence
atggcccagagcggcggcgaggccagacccggccccaagaccgccgtgcagatcagagtggccatccaggaggccgaggacgtggacgagctggaggacgaggaggagggcgccgagaccagaggcgccggcgaccccgccagatacctgagccccggctggggcagcgccagcgaggaggagcccagcagaggccacagaaccgcccagctgccctggctggagagccagcaggtgttcagcctgaagcccttcctgctgcccaccggcatcgagctgacccccgagaacccctggggcagcagcgtgagctag

SEQ ID NO: 258738 - DNA, 282 bp, Artificial Sequence
  derived and/or modified sequence
atggcccaatccggtggagaagccaggcccggccctaagacagccgtccagattagagttgccatccaagaggcggaggacgtagatgaactggaagatgaagaagaaggcgccgaaacgagaggcgctggcgatccagcacggtatctgtcacccggatggggctccgcaagtgaagaggagccttcacgcggccatcgaaacaggagcagcgtcaatagcagaacgatgctggcgtcttttatcgtcagcagcgcaccatcaaccgccccatccacgtag

SEQ ID NO: 258739 - DNA, 315 bp, Artificial Sequence
  derived and/or modified sequence
atggcccagagcggtggcgaggccaggcctggaccaaagactgcagtgcagatcagggtggccattcaagaggccgaagatgtcgatgaactggaagatgaggaggagggagccgagactagaggtgctggagatccagctaggtacctatcacccggatggggatcagcaagtgaggaggaaccttcccggggacaccgcaccgcgcagttgccttggttagagagtcagcaggtctttagcctcaagccttttctcctgccgactggaatcgagctgacccctgagaacccctggggctcttcagtttcctag

SEQ ID NO: 258740 - DNA, 282 bp, Artificial Sequence
  derived and/or modified sequence
atggcccagagcggcggggaggcccggcccggccccaagacagctgtgcagatccgggtggccatccaggaggccgaggatgtggatgagctggaggatgaggaggagggcgctgagaccagaggagctggggaccctgcccgctacctgagccctggctggggcagcgccagcgaggaggagcccagccggggccacaggaacagaagctctgtgaacagcaggaccatgctggccagcttcatcgtgtcctctgcccccagcacagcccccagcacctag

SEQ ID NO: 258741 - DNA, 315 bp, Artificial Sequence
  derived and/or modified sequence
atggcccagagcggcggggaggcccggcccggccccaagacagctgtgcagatccgggtggccatccaggaggccgaggatgtggatgagctggaggatgaggaggagggcgctgagaccagaggagctggggaccctgcccgctacctgagccctggctggggcagcgccagcgaggaggagcccagccggggccacaggacagcccagctgccctggctggagagccagcaggtgttcagcctgaagcccttcctgctgcccactggaattgagctgaccccagagaacccctggggcagctctgtgtcctag

SEQ ID NO: 258742 - DNA, 282 bp, Artificial Sequence
  derived and/or modified sequence
atggcccagagcggcggcgaggcccggcccggccccaagaccgccgtgcagatccgcgttgcgattcaggaggccgaggacgtggatgagttggaagacgaagaggagggcgccgaaacccggggtgctggggatcctgcccggtatctaagcccaggatggggatcggccagcgaagaggagcccagccggggccaccggaatcgttcgtctgtgaatagcaggactatgttggctagtttcatcgtgtcctcagcgccaagcaccgcacctagtacatag

SEQ ID NO: 258743 - DNA, 315 bp, Artificial Sequence
  derived and/or modified sequence
atggcccagagcggcggcgaggcccggcccggccccaagaccgccgttcagatcagggtggcaattcaagaggctgaggatgtggacgagctcgaggacgaagaagagggcgccgaaacccggggagcaggggatcctgcccgctatctgagtcctggctggggctccgcttctgaggaggaaccatcccgaggacatagaacggcccagctcccgtggttggaaagccagcaggtgttctctttgaagcctttcctgctgccgacgggaatcgagttgacacccgagaatccctgggggagcagtgtctcctag

SEQ ID NO: 258744 - DNA, 282 bp, Artificial Sequence
  derived and/or modified sequence
atggcccaatcaggaggcgaagccagaccgggtcccaaaaccgctgtacaaataagagtcgcaattcaagaagctgaagacgtcgacgagttagaagacgaggaagagggggctgagacacgtggggcaggggatcctgccaggtatttatcccctgggtggggttctgcctccgaggaggaaccatcccgaggacatcgaaaccgctcaagcgtaaacagcaggaccatgctggcttcgttcatcgtgagtagcgccccatcaacagccccttctacctag

SEQ ID NO: 258745 - DNA, 315 bp, Artificial Sequence
  derived and/or modified sequence
atggcgcagagtggcggagaggccaggcccggtcctaaaaccgctgtgcagatccgggtcgcgatacaggaagctgaagatgtcgacgagctggaggacgaggaggagggggcagagaccaggggtgcaggggatcctgcccgatatctgtcccccggttgggggtcagctagtgaggaagagccgtcacgcggtcacagaaccgcacagctgccatggctcgagtcgcagcaggtattttctctcaagccatttctgctgccaacagggattgaactgactccggaaaacccgtggggttcatccgtcagttag

SEQ ID NO: 258746 - DNA, 1083 bp, Artificial Sequence
  derived and/or modified sequence
cggcgtgaggaccccggcggcgccgcagtcccgcgagccatggcccagtccggcggggaggctcggcccgggcccaagacggcggtgcagatccgcgtcgccatccaggaggccgaggacgtggacgagttggaggacgaggaggagggggcggagactcggggcgccggggacccggcccggtacctcagccccggctggggcagcgcgagcgaggaggagccgagccgcgggcacagaactgcccagctcccgtggcttgagtctcagcaagtgttcagtctgaagcccttcctgctgcccactggcatagagttgaccccagaaaatccctggggttcttcggtgagctgacagagcccagtgggcaggcacccagagcaggaggagatgtagccaagaacaggatccacactatcccctgtttggacccaggctcgcatggcagcagccatcacccgatgtgaatgttctcagctcctggagcctacaggagaaaacccagattcctcaatctgctcattaagatgtgacacccactcacatcatctcctcagcccattgcctcaacagttcacgctgtcaacagttcacgctcccgtgattccagctagttccctgagcatagggggctattttgtgtctacatgcctctgcacccccacctctaggtcctctgattgactgatttctagtcagcctttaaaacttcgctgcctcttctccaccacccccaatccccaccccagagctggctgtgtttcctttcttctctgttgctgtagtactctgtacattttatgcctagcaccttccacaattgtgattctatcattgtgtctccctcacaggaataggagctcggtgaattcaaggaccatgcttgcttcgttcattgtatcttcagcacctagcacagcacccagcacataggacatgtttgttgactgaatgcgtatctctatcatcacactcactcaatggtgttgagatatttgtgtttccccttccctagacagtgagatccttgaaggcagctgccttatcttattcctttttgtatttccatacctagcctaatac

SEQ ID NO: 258747 - protein, 882 aa, Artificial Sequence
  derived and/or modified sequence
MAAAMETEQLGVEIFETADCEENIESQDRPKLEPFYVERYSWSQLKKLLADTRKYHGYMMAKAPHDFMFVKRNDPDGPHSDRIYYLAMSGENRENTLFYSEIPKTINRAAVLMLSWKPLLDLFQATLDYGMYSREEELLRERKRIGTVGIASYDYHQGSGTFLFQAGSGIYHVKDGGPQGFTQQPLRPNLVETSCPNIRMDPKLCPADPDWIAFIHSNDIWISNIVTREERRLTYVHNELANMEEDARSAGVATFVLQEEFDRYSGYWWCPKAETTPSGGKILRILYEENDESEVEIIHVTSPMLETRRADSFRYPKTGTANPKVTFKMSEIMIDAEGRIIDVIDKELIQPFEILFEGVEYIARAGWTPEGKYAWSILLDRSQTRLQIVLISPELFIPVEDDVMERQRLIESVPDSVTPLIIYEETTDIWINIHDIFHVFPQSHEEEIEFIFASECKTGFRHLYKITSILKESKYKRSSGGLPAPSDFKCPIKEEIAITSGEWEVLGRHGSNIQVDEVRRLVYFEGTKDSPLEHHLYVVSYVNPGEVTRLTDRGYSHSCCISQHCDFFISKYSNQKNPHCVSLYKLSSPEDDPTCKTKEFWATILDSAGPLPDYTPPEIFSFESTTGFTLYGMLYKPHDLQPGKKYPTVLFIYGGPQVQLVNNRFKGVKYFRLNTLASLGYVVVVIDNRGSCHRGLKFEGAFKYKMGQIEIDDQVEGLQYLASRYDFIDLDRVGIHGWSYGGYLSLMALMQRSDIFRVAIAGAPVTLWIFYDTGYTERYMGHPDQNEQGYYLGSVAMQAEKFPSEPNRLLLLHGFLDENVHFAHTSILLSFLVRAGKPYDLQIYPQERHSIRVPESGEHYELHLLHYLQENLGSRIAALKVI

SEQ ID NO: 258748 - protein, 849 aa, Artificial Sequence
  derived and/or modified sequence
MWKRSEQMKIKSGKCNMAAAMETEQLGVEIFETADCEENIESQDRPKLEPFYVERYSWSQLKKLLADTRKYHGYMMAKAPHDFMFVKRNDPDGPHSDRIYYLAMSGENRENTLFYSEIPKTINRAAVLMLSWKPLLDLFQATLDYGMYSREEELLRERKRIGTVGIASYDYHQGSGTFLFQAGSGIYHVKDGGPQGFTQQPLRPNLVETSCPNIRMDPKLCPADPDWIAFIHSNDIWISNIVTREERRLTYVHNELANMEEDARSAGVATFVLQEEFDRYSGYWWCPKAETTPSGGKILRILYEENDESEVEIIHVTSPMLETRRADSFRYPKTGTANPKVTFKMSEIMIDAEGRIIDVIDKELIQPFEILFEGVEYIARAGWTPEGKYAWSILLDRSQTRLQIVLISPELFIPVEDDVMERQRLIESVPDSVTPLIIYEETTDIWINIHDIFHVFPQSHEEEIEFIFASECKTGFRHLYKITSILKESKYKRSSGGLPAPSDFKCPIKEEIAITSGEWEVLGRHGSNIQVDEVRRLVYFEGTKDSPLEHHLYVVSYVNPGEVTRLTDRGYSHSCCISQHCDFFISKYSNQKNPHCVSLYKLSSPEDDPTCKTKEFWATILDSAGPLPDYTPPEIFSFESTTGFTLYGMLYKPHDLQPGKKYPTVLFIYGGPQGQIEIDDQVEGLQYLASRYDFIDLDRVGIHGWSYGGYLSLMALMQRSDIFRVAIAGAPVTLWIFYDTGYTERYMGHPDQNEQGYYLGSVAMQAEKFPSEPNRLLLLHGFLDENVHFAHTSILLSFLVRAGKPYDLQIYPQERHSIRVPESGEHYELHLLHYLQENLGSRIAALKVI

SEQ ID NO: 258749 - protein, 898 aa, Artificial Sequence
  derived and/or modified sequence
MWKRSEQMKIKSGKCNMAAAMETEQLGVEIFETADCEENIESQDRPKLEPFYVERYSWSQLKKLLADTRKYHGYMMAKAPHDFMFVKRNDPDGPHSDRIYYLAMSGENRENTLFYSEIPKTINRAAVLMLSWKPLLDLFQATLDYGMYSREEELLRERKRIGTVGIASYDYHQGSGTFLFQAGSGIYHVKDGGPQGFTQQPLRPNLVETSCPNIRMDPKLCPADPDWIAFIHSNDIWISNIVTREERRLTYVHNELANMEEDARSAGVATFVLQEEFDRYSGYWWCPKAETTPSGGKILRILYEENDESEVEIIHVTSPMLETRRADSFRYPKTGTANPKVTFKMSEIMIDAEGRIIDVIDKELIQPFEILFEGVEYIARAGWTPEGKYAWSILLDRSQTRLQIVLISPELFIPVEDDVMERQRLIESVPDSVTPLIIYEETTDIWINIHDIFHVFPQSHEEEIEFIFASECKTGFRHLYKITSILKESKYKRSSGGLPAPSDFKCPIKEEIAITSGEWEVLGRHGSNIQVDEVRRLVYFEGTKDSPLEHHLYVVSYVNPGEVTRLTDRGYSHSCCISQHCDFFISKYSNQKNPHCVSLYKLSSPEDDPTCKTKEFWATILDSAGPLPDYTPPEIFSFESTTGFTLYGMLYKPHDLQPGKKYPTVLFIYGGPQVQLVNNRFKGVKYFRLNTLASLGYVVVVIDNRGSCHRGLKFEGAFKYKMGQIEIDDQVEGLQYLASRYDFIDLDRVGIHGWSYGGYLSLMALMQRSDIFRVAIAGAPVTLWIFYDTGYTERYMGHPDQNEQGYYLGSVAMQAEKFPSEPNRLLLLHGFLDENVHFAHTSILLSFLVRAGKPYDLQIYPQERHSIRVPESGEHYELHLLHYLQENLGSRIAALKVI

SEQ ID NO: 258750 - DNA, 2649 bp, Artificial Sequence
  derived and/or modified sequence
atggccgccgccatggagactgaacagctaggtgtcgagatttttgagactgcagactgtgaggagaacatcgagagtcaagatagacctaagttggaaccattctatgtcgagaggtattcttggagccaattgaagaagctgctggctgacactcggaagtaccacggctacatgatggctaaggctccccatgactttatgtttgtcaagaggaacgaccctgacgggcctcactcggacaggatttactacctcgctatgtccggtgaaaaccgggagaacactttgttctattctgagatacctaaaacaattaaccgggccgccgtccttatgttgtcgtggaagcctttactcgacctgtttcaagccacgctggactatggaatgtatagtcgcgaggaagaactgcttcgagaacgcaagcgcatcggaacagtgggaatcgcctcttatgactatcaccagggatccggaacctttctgttccaggcagggtccggcatctaccacgttaaagacggtggaccccaggggttcacccagcagccgcttcggccaaacttggtggagactagctgccccaatatccggatggatccaaaactctgcccagcagatccggactggattgcctttattcacagcaacgatatttggatatccaatatcgtaacccgggaggaacgacgtcttacttatgttcataacgagctggccaatatggaggaggatgccaggtccgctggggtcgccacttttgttctacaggaagaattcgacaggtatagcggatactggtggtgtccaaaagcggagactactccaagcgggggcaaaatattacgtattctctacgaagagaacgatgaatccgaggtcgagatcatccatgtgacctctcccatgctggagaccaggcgcgcagatagcttccgttaccccaagactggcaccgccaaccctaaagtaaccttcaagatgagcgagattatgatcgacgccgagggtcgtatcattgatgtcattgataaggaattgatacagccttttgagatcctatttgagggcgtggagtatatcgctcgcgctggctggacccccgagggtaaatatgcatggtccatccttcttgataggagccagacccgattgcaaattgtattgatatcgcctgagctatttatcccagttgaagacgatgtgatggagcgtcagaggttgattgagagcgtgccggactccgtgacgcctctgattatctatgaggagaccactgacatttggattaatatccacgatatttttcacgtatttccacaaagccacgaggaagaaattgaatttattttcgcttcagagtgcaagactggatttagacacctgtacaaaattacatcaatccttaaggagtccaaatataaaagatcgtctggggggctgcccgcaccttcagactttaagtgtcccattaaggaagaaatcgctatcactagtggtgaatgggaggttcttggacggcacggctctaacattcaggttgacgaagtcagacggttggtgtattttgaggggacaaaagattccccactcgaacatcacctctacgtggtatcatacgtgaacccaggcgaggtaactcgcttgactgatcgcgggtacagtcattcgtgctgcatttcacagcactgcgatttttttatctctaaatattctaatcagaaaaaccctcactgcgtgtcactgtataagctgagttccccagaagatgacccgacatgcaaaaccaaagaattttgggctacgatcttagatagtgccgggcctctgccagactatacacctccagagattttctctttcgagtcaacaactggttttacactatatggcatgctgtataagcctcacgacctgcagccaggcaagaaatacccaacagtcctattcatctacggcgggccgcaggtccagctcgtaaacaacaggtttaaaggagttaagtattttcgcctgaacacactggcttcccttggttatgtggtcgtcgtcattgacaatcggggatcatgtcaccggggcttgaagttcgaaggcgcattcaaatacaaaatgggccagatcgaaatcgatgatcaggtggaaggtctgcagtacctcgcttcacgctacgatttcatcgacctcgatagggtagggattcacggatggtcttatggaggttacctgagccttatggctcttatgcagcggagcgacattttccgcgtagcgatcgcgggcgcgccagttaccctctggattttctacgacacgggctacaccgagaggtatatggggcaccctgatcagaacgagcagggttactacctggggtccgtggcaatgcaagccgaaaagttcccgagtgaaccaaatcgattactgttgctgcatggttttctagatgaaaatgtgcatttcgcgcacactagcattcttctgtccttcttagttcgcgctggaaagccttacgatctacagatataccctcaggaacggcactctatacgcgtgccagagtctggcgaacattacgagctgcacttactgcactatctgcaagaaaacctcggctctagaattgccgcactgaaagtcatctag

SEQ ID NO: 258751 - DNA, 2550 bp, Artificial Sequence
  derived and/or modified sequence
atgtggaaacggtcagagcagatgaagataaagtctggcaaatgtaacatggctgctgccatggagaccgaacagctgggggttgaaatcttcgagactgccgattgcgaggagaacatcgaaagtcaggaccgcccaaagctagaacccttttatgtggagaggtactcatggagccagcttaagaaattgttagcagacacccggaaataccacggttatatgatggccaaagcaccccacgatttcatgttcgtgaagagaaacgacccggacggcccccactctgacagaatatattacctggctatgtccggagaaaaccgcgagaatactctgttctacagcgagatccctaaaaccatcaaccgggcagctgtgctgatgttgtcctggaaacctctcttagacttgtttcaggcgaccttggactacggcatgtatagtagggaggaagagctgcttcgcgaacggaaacggatcggaactgttggaattgcaagttatgattatcaccaaggctcgggcacatttttgtttcaggcaggctccggaatataccacgttaaggatggaggacctcagggtttcactcaacagcctcttcgccccaaccttgtggaaactagctgcccaaatatcaggatggatccaaagctctgtcccgccgatccggattggattgccttcattcattccaatgacatttggatttccaacattgtgacccgagaagagcgcagacttacttatgtgcataatgaactcgccaatatggaagaggacgcgaggagcgcaggagtggccacctttgtgttgcaggaggagtttgatcgctacagcgggtactggtggtgtcctaaggcagagactaccccttctggcggaaagattctgcgcattctgtatgaggaaaacgacgagtctgaagttgagataatccatgtgactagtccaatgcttgagacgcggcgggcggatagctttcggtacccaaagacaggaaccgccaacccaaaagtgaccttcaagatgagcgagattatgattgacgcggaaggccgcataattgatgtgatcgataaggaacttattcagcctttcgaaattcttttcgaaggtgtggaatacatcgcacgcgcaggctggacacctgagggcaagtatgcctggtcaattttgctggaccggagtcagactaggttgcagatcgtgctgatcagcccagagttatttattccagtggaggatgacgtaatggagcgacagcgattgatcgagagtgtcccagactctgtcacacccctgatcatctacgaggaaaccacggacatctggataaacatacacgacatcttccatgtctttcctcaaagtcatgaggaagagatcgagttcattttcgcctcagaatgcaagacggggttccggcacctgtacaagattaccagcattcttaaagagtcaaaatacaaaagaagttcgggcggactgccggctccttccgacttcaaatgtccaatcaaggaggagatagccattacctctggcgagtgggaggtgctgggtcgacacggctcaaatatacaggtggatgaagttaggagactggtgtatttcgaaggtaccaaagattcccctctcgaacaccacctctacgtagtgtcgtatgttaaccctggcgaggtgacaagactcacagacaggggctattctcatagttgttgtataagccagcattgtgatttttttatcagcaagtatagcaaccagaaaaaccctcactgcgtttctctctataagctctctagtcctgaagacgaccctacgtgtaagaccaaggagttttgggccactattctcgacagcgcagggcctctgcccgattatactccaccagaaatattttcctttgaatccacaacaggcttcaccctgtatggtatgctttacaagcctcatgatctccagccagggaagaagtatccgactgtcctgttcatctatggtggtccacagggtcagattgagattgacgaccaagtcgaaggtctccagtacttggccagcaggtatgactttattgatcttgacagagtgggaatccacggctggagttacggtgggtatttgagcctcatggctttaatgcagaggagcgatatatttcgggtggcaatcgccggcgcaccggtcacactttggattttttatgacaccggatacaccgaaaggtacatgggacaccccgatcagaatgagcaaggatattacttggggtcagtagccatgcaagcagagaagttcccaagtgagccaaatagactgctccttttacatggttttttggatgagaatgtgcatttcgcccacaccagcattttgttgagttttcttgtgcgcgcaggtaaaccctacgatctccagatatacccccaggagaggcactcaattcgcgtgcccgagtcaggagaacactacgagttgcatctcctgcattaccttcaggagaatctgggctccagaatcgccgcactcaaggtgatttag

SEQ ID NO: 258752 - DNA, 2697 bp, Artificial Sequence
  derived and/or modified sequence
atgtggaaaagatccgaacagatgaaaattaagtccgggaagtgcaatatggctgcggccatggaaaccgaacagttaggggtggaaatctttgaaacagcggattgcgaagagaacatcgagtctcaggatcggccaaaattggaacccttctatgtggagcggtactcctggagccaactgaagaaactcctggccgatactcgcaagtaccacgggtatatgatggcgaaagccccccacgactttatgttcgtgaaaaggaatgaccccgacggcccacattctgacaggatctattacttggccatgtcaggggaaaatagagagaatacattattctatagcgagatcccaaagactatcaatagagcggctgtgctcatgctttcgtggaagcccctgctggatcttttccaggccacactggattacggcatgtattcacgggaggaagaactgcttagggagagaaagagaattggtactgtgggcattgcttcttacgattatcaccagggctccggcacgttcctgtttcaggctgggtccggcatttaccacgttaaggacggtggaccacaaggattcacacagcagccactacgaccgaatctcgtggagacctcatgtcctaatatccgtatggatcctaaattgtgtccggctgacccagactggatagccttcatccactctaatgacatttggatttccaacattgtaacaagagaggagcgtcgtttgacttacgtgcacaacgagctcgccaatatggaggaagatgctaggtccgccggcgtcgctaccttcgtgcttcaggaagaattcgaccgctactctgggtactggtggtgtccgaaggctgaaacaacaccatcaggggggaagatcctgcggattttatacgaagagaatgatgagagtgaggtggaaataatccatgttacaagcccaatgctcgagacccggagagccgattccttcagatatccaaaaactgggactgctaaccctaaggtcacatttaagatgagcgagatcatgatcgatgccgagggacgaattatagatgtaattgataaggagcttattcagccttttgagatcctgttcgaaggggtggagtacattgcacgcgccggatggacccccgagggcaaatacgcatggtcaattttgctggacaggtcccaaactcgtctgcaaatcgttctaatctcccctgagttgttcataccggtggaagatgatgttatggaaagacagcgacttatcgagagtgtacccgactcagttaccccactgatcatatacgaggagaccactgacatatggattaatatacacgacatctttcatgtattccctcagtctcacgaagaggaaattgaattcatttttgcctccgaatgcaaaactggattccggcacctttacaaaatcactagcatactgaaagaatcaaaatacaaacgctcctccggtgggttaccggctccctcagatttcaaatgtcccattaaagaggaaatcgcaattaccagtggcgagtgggaggtcctgggtcggcatggcagcaatattcaggtcgacgaggtgagaaggctggtttattttgagggtaccaaggactctccactggaacaccacttgtacgtggtgtcctatgtgaatcccggggaggtcactcggctgactgacaggggttatagccacagctgctgcatttctcagcattgcgatttcttcatctcaaagtatagcaatcagaaaaacccccattgtgtgagcttatacaagctgtcctccccggaggacgaccccacatgtaagacaaaggaattctgggccaccattctcgattctgctgggccactaccagattatactccccctgaaatattcagctttgagagtaccactgggttcaccctgtacggcatgctgtacaagccgcacgacttacaaccggggaagaagtaccctaccgttcttttcatttacggaggccctcaagtccaattggtgaacaaccggttcaagggcgtaaagtacttccgactgaacacccttgcctctcttgggtatgtcgtcgtggtgatagacaacaggggctcttgccaccgtggcctgaagttcgagggtgcctttaaatataagatgggccagattgaaattgatgaccaggtggaaggtctacagtatttagcaagcagatacgatttcatcgacctcgatcgtgtgggtatccacggttggtcgtatggaggctacctgagtctgatggcgctgatgcagagatctgatatcttccgagtggccattgcaggggcccctgttacactgtggattttctatgatactgggtataccgagaggtacatgggacacccagaccaaaacgagcaaggttactacctgggcagtgtggctatgcaggcagagaagtttccatccgaacctaatcgcctgctcctgctccacggtttcttggacgagaacgtgcacttcgcccacacaagcattcttctttccttcctggtgagagcgggaaagccttacgatttgcaaatttacccccaggaaaggcattcaatacgcgttcctgaatccggagagcattatgaactgcacctgttgcactacctgcaggagaatctgggaagccgcatcgctgctcttaaagtcatttag

SEQ ID NO: 258753 - DNA, 2697 bp, Artificial Sequence
  derived and/or modified sequence
atgtggaaacggtctgagcagatgaagattaagagtggcaagtgcaacatggccgccgccatggaaacggaacaactgggggtcgagatattcgagacagccgattgtgaagagaatatcgaatctcaggaccggcctaaattggagcccttttacgtggaaagatactcatggtcacagctgaagaaactgttagccgacactagaaagtaccacgggtatatgatggccaaggccccccatgattttatgtttgtaaaacgcaatgaccctgacggcccccactctgacagaatttattacttagccatgtctggtgagaaccgggagaacacactcttctattccgagattcctaaaacaattaatcgagccgctgttctgatgctgagttggaagcccctgctcgatctttttcaggctaccctcgattacggcatgtacagccgcgaggaagagctcttaagagaaagaaagcgaataggcaccgtcggaatcgctagctacgattatcatcagggaagcggcacctttttgtttcaggccggtagcgggatctatcacgtgaaggacggcggcccccagggattcacacaacagcctctgagacccaatctggtcgaaacaagttgtcccaatatcagaatggatcccaaattatgcccagcagatcctgactggattgcgtttatacatagtaacgatatctggatatcaaatatcgtgactagggaagagcgtcgcttgacctacgtacacaatgagttggccaacatggaagaggatgctagaagcgccggagtggctacattcgtgctccaagaagagtttgataggtacagcggctattggtggtgcccaaaggccgaaaccaccccatcgggcggcaaaatactgagaatcctctacgaagagaacgatgaaagcgaggtcgaaatcatccacgtgaccagcccaatgcttgagacgaggagagcagattctttccgctatcctaagacaggcaccgccaatccaaaggttacttttaaaatgtccgaaattatgatcgacgcagaagggaggattatagatgtaattgataaggagttaatacaaccattcgagatactgttcgaaggggttgaatatattgccagagcagggtggaccccagaaggaaaatatgcatggtctatcctccttgatagatcgcagactaggctgcagattgtgcttatctctcccgaattgtttatccctgttgaggacgacgtgatggaaagacaacggctcattgagagcgttccagacagtgtcactcctctcattatctacgaggaaacaacggacatctggatcaacattcacgacatatttcacgtgttcccgcagtcccacgaggaggagatcgaatttatcttcgcatctgaatgcaaaaccggcttcagacacctgtacaagattacgtcaatcctgaaagagtctaagtataaacgaagcagtggaggcctgccagccccttcagattttaaatgcccgatcaaggaggaaattgcaattacctccggggagtgggaggtgctgggtaggcacggctcaaacattcaagtggacgaagtgcgcagactggtctactttgagggaactaaagactcaccattagaacatcacctgtatgttgtgtcatatgtcaacccaggggaagtgacgcgtctgaccgatcggggctactcacattcgtgttgtatctcacagcattgtgacttttttatcagcaagtattcaaatcaaaagaatccacattgtgtgtcactgtacaagctatctagccccgaagacgaccctacctgtaagacaaaagaattctgggcaaccattttggattcagccggtcccctgccagattacacaccccccgagattttttcattcgagtccacaacagggttcacactgtatggaatgttatataagccacacgacctgcagcccgggaaaaagtatcctactgtactatttatctacggaggtccccaggtccaactggtcaataatcgatttaagggagtgaagtacttcagactgaataccctcgcctctttaggctatgtggtcgtcgtcattgacaaccgaggctcttgccaccgtggcctcaaatttgagggcgcttttaagtacaaaatggggcagatcgaaattgacgaccaggtggagggcctccagtatctggccagcagatacgacttcattgatcttgatcgggtggggatccatgggtggagttatggggggtacctgtctcttatggccctgatgcagagaagtgacatttttagagtggcaatagctggagcccctgtcacactgtggattttctacgacactggatatacagaaaggtacatggggcacccggaccagaatgagcagggctactaccttggaagtgtcgctatgcaggccgagaaatttcctagtgagcctaacaggctgttgctgctgcacggtttcctggatgagaacgttcactttgctcatacctcaatcctgcttagcttcctggtgcgcgcaggaaagccttatgacctacaaatctacccccaagaaaggcacagtattcgagtgcctgagtcgggagagcactatgagctccatctgctgcattacctacaggaaaatctggggagtagaattgctgcgctgaaggtgatatag

SEQ ID NO: 258754 - DNA, 2649 bp, Artificial Sequence
  derived and/or modified sequence
atggctgctgccatggagacagagcagctgggcgtggagatctttgaaacagctgactgtgaggagaacatcgagagccaggaccggcccaagctggagcccttctacgtggagcgctacagctggagccagctgaagaagctgctggccgacaccaggaagtaccacggctacatgatggccaaggcccctcatgacttcatgtttgtgaagagaaatgaccctgatggcccccacagcgaccgcatctactacctggccatgtctggagaaaatcgggagaacaccctcttctacagcgagatccccaagaccatcaacagagctgctgtgctgatgctgtcctggaagcccctgctggacctcttccaggccaccctggactatggcatgtacagccgggaggaggagctgctgcgggagaggaagagaattggaacagtgggcatcgccagctatgactaccaccagggcagcggcaccttcctgttccaggccggcagcggcatctaccacgtgaaggatggcggcccccagggcttcacccagcagcccctgcggcccaacctggtggagaccagctgccccaacatccgcatggaccccaagctgtgcccagctgaccctgactggatcgccttcatccacagcaatgacatctggatcagcaacatcgtgacccgggaggagcggcggctgacctacgtgcacaatgagctggccaacatggaggaggatgcccggtctgctggggtggccacctttgtgctgcaggaggagtttgaccgctacagcggctactggtggtgccccaaggccgagaccacccccagcggcggcaagatcctgcgcatcctgtatgaagaaaatgatgaaagtgaggtggagatcatccacgtgaccagccccatgctggagacccggcgggctgacagcttccgctaccccaagacaggaacagccaaccccaaggtgaccttcaagatgtctgagatcatgattgatgctgagggccgcatcattgatgtgattgacaaggagctgatccagccctttgagatcctgtttgagggcgtggagtacatcgcccgggccggctggaccccagagggcaagtatgcctggagcatcctgctggacaggagccagacccggctgcagatcgtgctgatcagccctgagctgttcatccctgtggaggatgatgtgatggagcggcagaggctcatcgagagcgtgcctgacagcgtgacccccctcatcatctatgaggagaccacagacatctggatcaacatccatgacatcttccacgtgttcccccagagccatgaggaggagattgagttcatctttgccagcgagtgcaagacaggcttccgccacctgtacaagatcaccagcatcctgaaggagagcaagtacaagaggagcagcggcggcctgcctgcccccagcgacttcaagtgccccatcaaggaggagatcgccatcaccagcggggagtgggaggtgctgggcagacatggcagcaacatccaggtggatgaggtgcggcggctggtgtactttgagggcaccaaggacagccccctggagcaccacctgtatgtggtgtcctatgtgaaccctggagaggtgacccggctgacagaccggggctacagccacagctgctgcatcagccagcactgtgacttcttcatcagcaagtacagcaaccagaagaacccccactgtgtgtccctgtacaagctgagcagcccagaagatgaccccacctgcaagaccaaggagttctgggccaccatcctggacagcgctggccccctgcctgactacaccccacctgagatcttctcctttgagagcaccaccggcttcaccctgtatggcatgctgtacaagccccatgacctgcagcccgggaagaagtaccccaccgtgctcttcatctatggaggcccccaggtgcagctggtgaacaaccgcttcaagggcgtgaagtacttccggctgaacaccctggccagcctgggctacgtggtggtggtgattgacaacagaggcagctgccaccggggcctgaagtttgagggcgccttcaagtacaagatgggccagattgaaattgatgaccaggtggagggcctgcagtacctggccagccgctatgacttcatcgacctggacagagtgggcatccacggctggagctatggaggctacctgagcctgatggccctgatgcagaggagtgacatcttccgggtggccatcgccggggcccctgtgaccctgtggatcttctatgacaccggctacacagagcgctacatgggccacccagaccagaatgagcagggctactacctgggctctgtggccatgcaggccgagaagttccccagcgagcccaaccggctgctgctgctgcacggcttcctggatgaaaatgtgcactttgcccacaccagcatcctgctgtccttcctggtgcgggccggcaagccctatgacctgcagatctacccccaggagcggcacagcatccgggtgcctgagagcggggagcactatgagctgcacctgctgcactacctgcaggagaacctgggcagcagaattgctgccctgaaggtgatctag

SEQ ID NO: 258755 - DNA, 2550 bp, Artificial Sequence
  derived and/or modified sequence
atgtggaagaggtctgagcagatgaagatcaagagcggcaagtgcaacatggctgctgccatggagacagagcagctgggcgtggagatctttgaaacagctgactgtgaggagaacatcgagagccaggaccggcccaagctggagcccttctacgtggagcgctacagctggagccagctgaagaagctgctggccgacaccaggaagtaccacggctacatgatggccaaggcccctcatgacttcatgtttgtgaagagaaatgaccctgatggcccccacagcgaccgcatctactacctggccatgtctggagaaaatcgggagaacaccctcttctacagcgagatccccaagaccatcaacagagctgctgtgctgatgctgtcctggaagcccctgctggacctcttccaggccaccctggactatggcatgtacagccgggaggaggagctgctgcgggagaggaagagaattggaacagtgggcatcgccagctatgactaccaccagggcagcggcaccttcctgttccaggccggcagcggcatctaccacgtgaaggatggcggcccccagggcttcacccagcagcccctgcggcccaacctggtggagaccagctgccccaacatccgcatggaccccaagctgtgcccagctgaccctgactggatcgccttcatccacagcaatgacatctggatcagcaacatcgtgacccgggaggagcggcggctgacctacgtgcacaatgagctggccaacatggaggaggatgcccggtctgctggggtggccacctttgtgctgcaggaggagtttgaccgctacagcggctactggtggtgccccaaggccgagaccacccccagcggcggcaagatcctgcgcatcctgtatgaagaaaatgatgaaagtgaggtggagatcatccacgtgaccagccccatgctggagacccggcgggctgacagcttccgctaccccaagacaggaacagccaaccccaaggtgaccttcaagatgtctgagatcatgattgatgctgagggccgcatcattgatgtgattgacaaggagctgatccagccctttgagatcctgtttgagggcgtggagtacatcgcccgggccggctggaccccagagggcaagtatgcctggagcatcctgctggacaggagccagacccggctgcagatcgtgctgatcagccctgagctgttcatccctgtggaggatgatgtgatggagcggcagaggctcatcgagagcgtgcctgacagcgtgacccccctcatcatctatgaggagaccacagacatctggatcaacatccatgacatcttccacgtgttcccccagagccatgaggaggagattgagttcatctttgccagcgagtgcaagacaggcttccgccacctgtacaagatcaccagcatcctgaaggagagcaagtacaagaggagcagcggcggcctgcctgcccccagcgacttcaagtgccccatcaaggaggagatcgccatcaccagcggggagtgggaggtgctgggcagacatggcagcaacatccaggtggatgaggtgcggcggctggtgtactttgagggcaccaaggacagccccctggagcaccacctgtatgtggtgtcctatgtgaaccctggagaggtgacccggctgacagaccggggctacagccacagctgctgcatcagccagcactgtgacttcttcatcagcaagtacagcaaccagaagaacccccactgtgtgtccctgtacaagctgagcagcccagaagatgaccccacctgcaagaccaaggagttctgggccaccatcctggacagcgctggccccctgcctgactacaccccacctgagatcttctcctttgagagcaccaccggcttcaccctgtatggcatgctgtacaagccccatgacctgcagcccgggaagaagtaccccaccgtgctcttcatctatggaggcccccagggccagatcgagattgatgaccaggtggagggcctgcagtacctggccagccgctatgacttcatcgacctggacagagtgggcatccacggctggagctatggaggctacctgagcctgatggccctgatgcagaggagtgacatcttccgggtggccatcgccggggcccctgtgaccctgtggatcttctatgacaccggctacacagagcgctacatgggccacccagaccagaatgagcagggctactacctgggctctgtggccatgcaggccgagaagttccccagcgagcccaaccggctgctgctgctgcacggcttcctggatgaaaatgtgcactttgcccacaccagcatcctgctgtccttcctggtgcgggccggcaagccctatgacctgcagatctacccccaggagcggcacagcatccgggtgcctgagagcggggagcactatgagctgcacctgctgcactacctgcaggagaacctgggcagcagaattgctgccctgaaggtgatctag

SEQ ID NO: 258756 - DNA, 2697 bp, Artificial Sequence
  derived and/or modified sequence
atgtggaagaggtctgagcagatgaagatcaagagcggcaagtgcaacatggctgctgccatggagacagagcagctgggcgtggagatctttgaaacagctgactgtgaggagaacatcgagagccaggaccggcccaagctggagcccttctacgtggagcgctacagctggagccagctgaagaagctgctggccgacaccaggaagtaccacggctacatgatggccaaggcccctcatgacttcatgtttgtgaagagaaatgaccctgatggcccccacagcgaccgcatctactacctggccatgtctggagaaaatcgggagaacaccctcttctacagcgagatccccaagaccatcaacagagctgctgtgctgatgctgtcctggaagcccctgctggacctcttccaggccaccctggactatggcatgtacagccgggaggaggagctgctgcgggagaggaagagaattggaacagtgggcatcgccagctatgactaccaccagggcagcggcaccttcctgttccaggccggcagcggcatctaccacgtgaaggatggcggcccccagggcttcacccagcagcccctgcggcccaacctggtggagaccagctgccccaacatccgcatggaccccaagctgtgcccagctgaccctgactggatcgccttcatccacagcaatgacatctggatcagcaacatcgtgacccgggaggagcggcggctgacctacgtgcacaatgagctggccaacatggaggaggatgcccggtctgctggggtggccacctttgtgctgcaggaggagtttgaccgctacagcggctactggtggtgccccaaggccgagaccacccccagcggcggcaagatcctgcgcatcctgtatgaagaaaatgatgaaagtgaggtggagatcatccacgtgaccagccccatgctggagacccggcgggctgacagcttccgctaccccaagacaggaacagccaaccccaaggtgaccttcaagatgtctgagatcatgattgatgctgagggccgcatcattgatgtgattgacaaggagctgatccagccctttgagatcctgtttgagggcgtggagtacatcgcccgggccggctggaccccagagggcaagtatgcctggagcatcctgctggacaggagccagacccggctgcagatcgtgctgatcagccctgagctgttcatccctgtggaggatgatgtgatggagcggcagaggctcatcgagagcgtgcctgacagcgtgacccccctcatcatctatgaggagaccacagacatctggatcaacatccatgacatcttccacgtgttcccccagagccatgaggaggagattgagttcatctttgccagcgagtgcaagacaggcttccgccacctgtacaagatcaccagcatcctgaaggagagcaagtacaagaggagcagcggcggcctgcctgcccccagcgacttcaagtgccccatcaaggaggagatcgccatcaccagcggggagtgggaggtgctgggcagacatggcagcaacatccaggtggatgaggtgcggcggctggtgtactttgagggcaccaaggacagccccctggagcaccacctgtatgtggtgtcctatgtgaaccctggagaggtgacccggctgacagaccggggctacagccacagctgctgcatcagccagcactgtgacttcttcatcagcaagtacagcaaccagaagaacccccactgtgtgtccctgtacaagctgagcagcccagaagatgaccccacctgcaagaccaaggagttctgggccaccatcctggacagcgctggccccctgcctgactacaccccacctgagatcttctcctttgagagcaccaccggcttcaccctgtatggcatgctgtacaagccccatgacctgcagcccgggaagaagtaccccaccgtgctcttcatctatggaggcccccaggtgcagctggtgaacaaccgcttcaagggcgtgaagtacttccggctgaacaccctggccagcctgggctacgtggtggtggtgattgacaacagaggcagctgccaccggggcctgaagtttgagggcgccttcaagtacaagatgggccagattgaaattgatgaccaggtggagggcctgcagtacctggccagccgctatgacttcatcgacctggacagagtgggcatccacggctggagctatggaggctacctgagcctgatggccctgatgcagaggagtgacatcttccgggtggccatcgccggggcccctgtgaccctgtggatcttctatgacaccggctacacagagcgctacatgggccacccagaccagaatgagcagggctactacctgggctctgtggccatgcaggccgagaagttccccagcgagcccaaccggctgctgctgctgcacggcttcctggatgaaaatgtgcactttgcccacaccagcatcctgctgtccttcctggtgcgggccggcaagccctatgacctgcagatctacccccaggagcggcacagcatccgggtgcctgagagcggggagcactatgagctgcacctgctgcactacctgcaggagaacctgggcagcagaattgctgccctgaaggtgatctag

SEQ ID NO: 258757 - DNA, 2649 bp, Artificial Sequence
  derived and/or modified sequence
atggccgccgccatggagaccgagcagctgggcgtggagatcttcgagacggcagactgtgaggaaaacatcgaaagtcaggaccgtcccaagctcgagcctttttatgttgagcgatatagctggtcccagctgaaaaagctcttggcggacactcgaaaataccacgggtacatgatggccaaggcaccccacgacttcatgtttgtgaagcgcaacgatcccgatggcccacacagcgaccggatttattacctggctatgtcaggcgaaaaccgcgaaaacaccttattttactccgagattcctaagaccattaatcgggccgcagtcctgatgttgtcttggaagccacttcttgacctgtttcaggccacacttgattacggcatgtattccagagaagaagagctattgagggaaaggaagcgtattggtaccgtgggcatcgcttcctatgactatcaccagggttcaggaacctttctcttccaagctggctccggaatttaccacgtcaaagacggtgggccacaagggttcacacagcagccactccgtcccaatctcgtggagacatcatgtcccaacatccgcatggacccaaagctgtgccccgctgaccctgactggatagccttcatccattccaatgacatctggatcagtaacatcgtgacaagagaagaaagacggctgacctacgttcataacgagctagccaatatggaggaggacgccagatccgccggcgttgctacattcgtgttacaagaggagtttgatcgatattctggatattggtggtgtcccaaagctgagactacacccagcggcggcaagatactacgaattctgtacgaggagaacgatgaatcggaagtggaaattatccacgtcacctccccaatgttagagacccggcgggctgattcattccgttacccaaagacggggactgctaacccgaaagtgacctttaaaatgtctgagatcatgattgatgcagaaggtagaatcatagacgtgattgataaggaactaatccagcccttcgaaatactttttgaaggcgtggagtacatcgctcgggccggatggacacccgagggcaagtacgcttggtctattttgctcgatagatctcagaccagacttcagatagtgttgatcagcccagaactcttcattcctgtggaagatgatgtcatggagagacagagactcatcgaatccgtccctgacagcgttactcccctgattatttatgaggaaactacagacatttggatcaatattcacgatatttttcacgtgtttccacagtcacacgaggaggaaatagaattcatcttcgccagcgagtgtaagacgggttttaggcatctgtataagatcaccagcattttgaaagaatcaaaatacaaaagaagctccgggggcctgcctgcccccagtgatttcaagtgtcctattaaggaggagattgcaatcaccagcggagagtgggaagtgctgggtcggcacggcagcaatatccaagtagacgaagtgcgcaggcttgtttacttcgaaggcacgaaagactcaccgctcgagcatcatctatatgttgtgagctatgtgaaccctggtgaagtcactcgtttaactgatcgtgggtattcacactcttgttgcatttctcagcactgcgacttcttcatctcaaagtacagcaatcagaagaaccctcactgtgtcagtctgtacaagctgagctccccagaggacgatcctacgtgcaagaccaaggagttctgggcaactatactggactcagctggaccactgccggattacaccccccccgagatcttctccttcgaaagtactaccggttttaccttatatggaatgctctataagccacacgaccttcagccaggcaaaaaatacccaaccgtgctgttcatttacggcggacctcaggtgcagctggtgaacaataggtttaagggggtgaagtactttcggttgaatacactggcttccttagggtacgtcgtagtcgtaattgacaaccggggctcctgccatcgcggacttaaatttgagggtgcctttaagtataagatggggcaaattgaaattgacgaccaggtagaaggacttcagtatctggctagccggtacgattttatcgatctcgatagagtcggtattcacggttggagttatggcggctatctgtccctgatggccctcatgcaacgttccgatatcttcagagtagcaattgctggagcacctgtgacactctggatcttttacgacaccggctatacagaaaggtacatgggccacccagatcagaatgagcaggggtattatttggggtccgttgctatgcaagctgagaagttcccatccgaacccaaccggctcctcctccttcacggctttttggatgagaacgtgcactttgcccacacatctatcttgctgagcttcctggtgcgtgcagggaaaccatacgacctacagatttatccccaggaacggcattctattcgggtccccgagtcaggcgagcactatgagctgcacctgctacactacttgcaggagaacttggggtctcgcatcgccgctctgaaggtcatttag

SEQ ID NO: 258758 - DNA, 2550 bp, Artificial Sequence
  derived and/or modified sequence
atgtggaagcggagcgagcagatgaagatcaagagcggcaagtgcaatatggcagcagcaatggagacagagcagttaggcgtggagatcttcgagacagccgattgtgaagagaacatcgagagtcaggatcgccccaagcttgaacccttctacgtggaaaggtattcctggagccagctgaagaagctcctagcagatacacggaaatatcacgggtatatgatggccaaggcacctcacgatttcatgtttgtgaagcggaacgatccggacggaccacatagcgacaggatttactatctcgctatgtcgggcgagaatcgagagaacactctattttactccgaaatccctaaaacgatcaatagagccgccgtgttgatgttgtcatggaaacctcttttggacctcttccaggctacgctggactacggcatgtactcaagggaggaagagctcttgagggaacgcaagagaataggaacggtcggaattgcgagctacgactaccatcaggggtctggcacattcctcttccaggctggctctgggatctaccatgtgaaggacggcgggccgcagggattcacacagcagccgctgcggccaaatcttgtcgagacatcttgccctaatatccgcatggatcctaagctctgtccggccgaccctgattggatagccttcattcactctaacgatatttggatttccaatatcgtcactagagaggagcgtagactcacctatgtgcataatgagctggctaacatggaggaggacgcgaggagtgccggggtcgccactttcgtgctgcaggaagaatttgaccgttacagcgggtattggtggtgtccgaaagcagagacaacaccctctggcgggaaaatccttagaatcctttacgaagaaaacgatgagtctgaggtagagatcattcacgtcacatccccgatgctggaaactaggagggccgatagcttccggtacccgaagacagggactgccaacccgaaagtcacctttaaaatgtcagaaataatgatcgacgcggaggggcgcattatcgatgtgatagataaggagcttatacagccatttgaaatactgttcgagggcgtggaatatatcgcccgtgccggctggacacctgaaggcaaatatgcctggtcgatcctgctggatagatctcagacgcggctgcagatcgtattaatcagccctgagctgtttataccagttgaggatgacgtcatggagcgccaacgcctgatcgagtctgtcccagactcagtgacccccttgattatctacgaagaaactaccgacatctggattaatatccacgacatttttcacgtgtttccccagagccacgaggaggagattgagttcatattcgcatcagaatgtaagactggcttccggcacctgtacaaaattacatcaatccttaaggaaagtaaatacaagcgctccagcggaggcctgccggctcctagcgatttcaaatgccctatcaaggaggagatcgcgataacttcaggagaatgggaggtgctgggcaggcacggatccaacattcaggtcgatgaagtccggcgattagtgtacttcgaagggaccaaagacagccccctggagcaccacctatacgtagtttcctatgtcaaccctggggaggtgacacgccttacagataggggctacagccacagttgctgcatctcccagcactgcgattttttcatctccaagtatagtaaccaaaagaatccccactgtgtgagcctgtataagctctcaagtccagaagatgacccgacatgcaaaacgaaagagttttgggcaaccattctggatagcgcaggccctctcccggactacaccccccccgagatcttctcctttgaaagcacaaccggtttcaccctctatggcatgctgtataaacctcacgacttgcagcctggtaagaagtatcctacagttcttttcatttatggcggaccccaaggccagattgagatcgatgaccaggtggaaggacttcaatatttagcatcccgctatgatttcatcgatctggatagggttgggatccacggttggagctatggcggttatttatcactgatggccctaatgcagcgctctgatattttcagggtggcaatagccggagcccccgtgaccttgtggatattctatgacacaggttacacagaaaggtatatgggccacccagaccagaatgaacaggggtattacctgggcagcgtcgctatgcaggccgagaagtttcctagcgaaccaaatcgcctgttattgctgcacgggttcctcgatgaaaacgtgcactttgcccacacgagtatccttctgtctttcctagtacgggcaggaaaaccttacgacctacagatctacccccaggagcggcattctatccgagtccctgaatcaggcgagcactatgagctgcacttgttacactatctgcaagagaacttaggctcacgcatcgcggctctgaaagtgatctag

SEQ ID NO: 258759 - DNA, 2697 bp, Artificial Sequence
  derived and/or modified sequence
atgtggaagcggagcgagcagatgaagatcaagagcggcaagtgcaacatggcggctgcaatggagaccgaacagcttggggttgagatatttgagacggctgattgcgaagaaaacattgagtcacaggaccgccccaagctcgaacctttttatgtagagagatactcttggagccagctcaagaaacttttggccgacactagaaagtaccatggctatatgatggcaaaggcaccgcacgatttcatgttcgttaagcgcaacgacccagacggaccccactcagacagaatatactacttagcaatgtctggtgaaaaccgcgagaacaccctgttctattcagagatccctaagaccattaacagagctgcagtgctgatgctttcctggaaacccctgcttgatttatttcaggctacccttgattatggtatgtatagtagggaggaggaactattaagagagcggaagcgcataggaaccgttggaatcgcatcgtatgattatcatcagggctcaggaacgtttcttttccaggctggctctgggatctaccacgttaaagatggaggcccgcagggctttacccagcagccactccggcctaatctggtagagacatcctgtccaaacatccggatggatcccaagctgtgcccagccgatccggactggatcgcattcatacacagcaacgatatctggatatctaatatcgtgacgcgagaggaaaggcggctcacctatgtgcacaacgaactggcaaacatggaggaggacgctcggtcagctggggtggccacgtttgtgctacaggaggaattcgatagatactctggatattggtggtgtcccaaggctgagacaaccccctctggcggcaagatactcaggatcttatacgaggagaacgatgagtctgaagtggagatcatccatgtgaccagtcctatgctggagactaggagagcagattcttttcggtatcctaagacgggtacagccaaccctaaagtcacttttaaaatgtccgagattatgatcgacgctgaggggcgcataattgatgtaattgacaaggaattaattcagccattcgaaatcctcttcgagggagtcgaatatatcgctagagccggatggacacccgagggaaaatacgcatggtcgatcctgctggatcgatctcagacgcgactgcaaatcgtgctgatcagtcccgagctgttcatacctgtggaggatgacgtgatggagcgtcagcgcttaattgagagtgtgccggattccgtgacgcccctcatcatctatgaagaaaccacagatatctggataaatatccatgacatcttccacgtgttcccacagagccatgaagaggagatcgaattcatatttgcctcagaatgcaagacgggattccgacacttgtacaagataacatcgattcttaaggagtccaaatataagcgtagtagtggcggcttaccagccccctctgacttcaagtgccctataaaagaggaaattgcaattacgtccggggagtgggaggtactcggccgccatgggtccaatattcaggtggacgaggtgaggaggctagtgtatttcgaagggaccaaagacagccctctggagcatcacctgtacgttgtctcctacgttaatcctggcgaagtgacaagacttaccgatcgcggctactctcactcatgctgcatatctcagcattgcgattttttcataagcaagtattctaatcagaagaaccctcattgtgttagtctttataaactctcatccccagaggacgatcccacttgtaaaacgaaggaattttgggctacgatactggacagcgccggtccactcccggactacacgccccccgaaatattttcattcgagagcaccaccggttttacactctacgggatgttatacaagcctcacgacttacaaccagggaagaagtacccaacagtgttatttatctatggcggcccccaggtgcagctggtaaacaaccggttcaagggcgtgaagtacttcagactgaacacgctcgcctcactcggttacgtggtggttgtcatagataatcgggggtcttgccaccggggtcttaaattcgagggtgcttttaagtacaaaatggggcagatcgagatcgacgatcaggtggaaggactgcagtatcttgctagccgctacgattttatcgacctggatcgcgtgggaatacacggctggagttacgggggttatcttagcctgatggccctgatgcaacggtcagatatcttccgagtcgctattgcaggggcccccgtgacgctgtggatattttatgatactggctacactgagcgatacatgggtcaccctgatcaaaatgagcagggatactacctcgggagcgtggctatgcaagccgagaaattccccagcgagccaaacaggttgctgttgctccatggcttcttagatgagaatgtgcactttgcccatacatccatccttttgagttttctggtgcgtgccggcaaaccatacgatctccagatttacccacaggagcggcactccatccgggtgcctgagagcggggagcattatgaactgcacctcctgcattacctgcaggaaaacctgggatcccggattgctgctctgaaagtgatttag

SEQ ID NO: 258760 - DNA, 2697 bp, Artificial Sequence
  derived and/or modified sequence
atgtggaagcggagcgagcagatgaagatcaagagcggcaagtgcaatatggcagcagcgatggagaccgagcagctaggggtagagatatttgagaccgctgactgtgaggaaaatattgaatcccaagacagaccgaaactcgagccgttctacgtcgagcggtactcctggagccagctgaaaaagttactcgcagatacacgaaagtatcacggttatatgatggctaaggcgcctcatgatttcatgtttgtgaaacgcaatgatccagatggacctcacagtgataggatttactacctggctatgtcgggcgaaaatcgagagaacacactcttttattctgagatacccaagaccataaatcgggctgctgtgctaatgttatcctggaagcctctccttgatctgttccaagccacactcgactatgggatgtacagtagggaagaggagctgctgcgggagaggaaacggatcggcactgtgggaattgcttcctatgactatcatcagggcagcggcaccttcctttttcaggctggatccggcatttaccacgtgaaagacggcggcccacaaggctttacacagcaacctctgagaccaaacctcgtggagacgtcttgtcctaatatccgcatggatcccaaattgtgcccggccgatccagactggatagcatttatacatagcaacgacatttggatctctaacattgtgacgagagaggaaagaagactgacctatgtacataatgagttggcaaacatggaggaggacgctagaagcgccggggtcgcaacattcgtgttacaagaagagttcgatcggtacagcggatattggtggtgtcctaaggccgaaacaacaccatcgggaggcaagattttgcggattttgtatgaggagaatgacgaatccgaggtggaaattatccacgttacatctcccatgttggaaactagaagagcagactctttccggtatcctaagaccggtactgcaaacccaaaagtcacgttcaaaatgagcgagatcatgatagacgcggaggggaggattatagatgttatcgataaggagctgattcaaccatttgagatcctgttcgaaggggtcgagtacatcgcgagggcagggtggacacccgaaggaaaatatgcttggtctattttgctggaccgcagtcaaacgcgcctgcagattgtcctgatcagtccagaactgtttatacctgtagaggacgatgtgatggagagacagagacttatcgaatccgttcctgactcagttacaccattgattatttacgaggagactaccgacatttggattaacattcacgacatatttcatgtgttccctcagtctcacgaggaagagattgaattcattttcgcttctgaatgcaagacgggtttccggcacttgtataagatcaccagtattcttaaagaaagtaaatataagcggagttcaggaggtctaccagccccctctgacttcaaatgtccgatcaaagaggagatcgctataacttctggcgagtgggaggtgctaggacgccatgggagcaacattcaggtggatgaggtcagaaggctggtttatttcgagggtaccaaggacagtcccctggaacaccacttgtatgtggtgtcgtacgttaacccgggtgaggtaacgcgcctgacagacagagggtactcccactcgtgctgtattagtcagcactgtgacttctttattagcaagtatagcaaccagaagaacccccactgtgtttctttgtacaagctgagctcccccgaggacgaccccacttgcaagaccaaggaattctgggcaaccattctagattctgctgggcccctgcccgattatacaccaccagaaattttctcatttgaatctacaaccggttttaccttgtatggaatgctctacaagccccacgacctccagcccggtaaaaagtatcccacagttttgtttatctacgggggtcctcaggtgcagctggtaaataaccgatttaagggggtgaagtattttagactgaatactttagcgtctctgggctacgttgtcgttgtgatcgacaatcggggctcttgtcaccggggcctgaagtttgagggggctttcaagtacaagatgggacagattgaaatcgatgatcaggttgaggggctccagtatttggcatccagatatgactttattgatctggacagggtggggattcatggctggtcctatggcggttacctatctttgatggcccttatgcagaggagcgatatctttagggtagctatcgcgggcgcaccagttacgctttggattttctatgatacaggatacaccgagagatatatgggacaccccgatcaaaatgagcaaggctactatcttgggagcgtggccatgcaggcggagaagttccctagcgagcctaacagattgctccttttgcatggcttccttgatgaaaacgtccattttgctcacacatcgattctgctcagtttcctcgttcgggccggaaagccctacgacctgcaaatctatccacaggagagacactccataagggtccctgagagtggggaacattacgagctgcatctacttcactacctgcaagaaaaccttgggtcacggatagccgcactgaaggtcatttag

SEQ ID NO: 258761 - DNA, 2649 bp, Artificial Sequence
  derived and/or modified sequence
atggccgctgctatggagaccgagcaactcggcgtagaaattttcgagacagccgactgcgaggaaaacattgagagccaagatcgacctaagttagagcctttttacgttgagagatactcttggagtcaactgaagaagctgctggcagatacaagaaaataccatggctacatgatggccaaggcaccccatgactttatgttcgtgaaaagaaacgaccctgatggacctcattccgaccgaatttattatttggccatgagcggggagaatcgggagaatacgcttttctattcggagattcccaaaacgattaacagggccgctgttcttatgttgtcttggaagcctctgctggatctgtttcaggccacattagattatggcatgtacagcagggaggaggagctgctgcgggagagaaagcgtatcggaaccgtaggcatagcctcctatgattatcatcaaggcagcggaactttcctgtttcaggccggttccggaatctatcacgtcaaggatggcggaccacaggggttcacccagcaacccctgaggcccaacctcgtagaaaccagttgccccaatatccggatggatcccaaactctgcccagctgacccagattggatcgcattcatccattccaatgacatttggatctccaatatagtgacacgggaggaacgcaggttgacatacgttcataatgaactggctaacatggaggaggacgcccgatctgcaggagtcgccacattcgtcctccaggaagagtttgacaggtatagtggatactggtggtgtccaaaggctgaaacaaccccatcgggcggtaaaattcttaggatactgtacgaggagaatgatgagtcggaggttgaaattattcacgtgacctcaccaatgcttgagacgcggcgagccgattctttccggtatcccaaaaccggcactgcgaatccgaaagtgacatttaagatgagcgaaattatgattgatgcagaggggaggattatcgacgtgatcgataaagagttaatccaaccctttgagatcttatttgaaggcgtcgagtatatagctcgggcaggatggacccctgaggggaaatatgcatggagcatcctgctagatcgaagccaaacccgactgcaaattgtgctgatctctcctgaactgttcatcccggtggaagacgatgtgatggaacggcagaggctcattgagtcggtccccgattcagttaccccgttgatcatatatgaagagacaactgacatctggattaatatccacgatatctttcatgtgttcccccagagccacgaggaggagatcgagtttatctttgcttctgagtgcaaaactgggttcaggcatttatataaaatcaccagcattctgaaagaaagtaaatacaaaagatctagcggcggtttaccagccccatccgatttcaagtgtcccatcaaagaagaaattgctattacaagtggcgaatgggaggtgttaggccgacatgggtccaacattcaagttgatgaagttagacggctggtttattttgagggtacaaaggactcccccctggaacaccacctgtacgtggtctcatatgtgaaccctggagaggtaaccagacttacagatcggggatacagtcacagctgttgtattagccagcattgcgatttcttcattagcaagtacagtaatcagaaaaacccgcactgcgtttctctgtataaactttcatccccagaggatgatcctacctgcaagaccaaagagttttgggcgaccatactggacagcgctggtccgctaccggattacaccccccctgaaatattctcctttgagtcaactacaggattcacgctttatggaatgttgtataaaccacatgatctgcagcctggaaaaaagtatcctaccgtgctctttatctacggtggcccacaggtgcagctcgtgaataatagattcaagggtgtgaaatactttcggctgaacaccctagctagcctgggatatgtggtcgtagtcattgacaatcggggatcttgccaccggggacttaaattcgagggggcttttaagtataagatgggacagattgagattgacgatcaggtagaggggctacagtatctggcttctcggtacgactttatagacttagatagggtgggtattcacggttggagctatggaggttatctctccctcatggctttgatgcagcggagcgatatctttcgagttgcaattgccggtgcacccgtaacactgtggatcttctacgacaccggatacacagagcgctatatggggcaccctgaccagaacgagcaggggtattacctcggttctgtggccatgcaagcagagaaatttccctccgagccaaaccggttactgctactgcacggattcctggacgaaaacgtgcatttcgcacatacctctatccttctgagctttcttgtgcgggcaggaaaaccttacgacctgcaaatctatccccaagagcgacactctatccgcgttccagagtctggcgaacactatgaattgcatcttctgcattacctgcaggaaaacttaggctcccgtatagcggcactgaaggtgatctag

SEQ ID NO: 258762 - DNA, 2550 bp, Artificial Sequence
  derived and/or modified sequence
atgtggaaacggtcagaacagatgaaaataaaaagtggtaagtgcaatatggctgcagctatggagacggaacagttaggggtggaaatatttgagaccgcagattgtgaggaaaatatcgagtctcaggaccgccctaagttagagcccttttacgtggaacgctattcttggtctcaactgaagaagctgctagccgatactaggaaatatcacggatacatgatggccaaggcccctcacgacttcatgtttgtcaaacgaaacgatcccgacgggcctcattccgatcgaatttactacctcgccatgagcggggaaaaccgcgagaacacccttttttatagcgagatcccaaagaccatcaacagggccgcagtgcttatgttatcttggaagccattactcgacctgtttcaggccactctggattatgggatgtactcacgggaggaagaactcctccgggaacggaaaaggatcggaacagtggggatcgccagctacgactaccaccagggaagcggcacattcctcttccaagcaggctcaggaatttaccacgtgaaagatggcggtccccagggtttcacccagcagccattacggccaaatctcgtggaaacatcctgtcccaacatcaggatggaccctaagctgtgccccgctgacccagattggatagcgtttatccactcaaatgatatttggatctctaacatcgtgacccgggaagagcgtcggctcacctatgtgcacaatgagttagccaacatggaggaagacgcaaggtctgctggtgtggccacatttgtcctgcaggaggagttcgatagatactcaggatattggtggtgtccgaaggccgagactacacctagcggaggaaagatcttaagaatcctatacgaggaaaacgacgagtctgaggtggagataattcatgtcacttcacctatgctggaaacccgaagagcagactccttcaggtaccctaagacaggcaccgctaaccctaaggtcacatttaaaatgagcgagataatgatagatgctgaaggccgtattatcgatgtgattgataaagagttaatacaaccctttgagatcctgttcgaaggggtggaatacattgccagagcaggctggacacctgagggtaagtacgcatggtctattttgctggaccgatcccagacccgattacagattgtccttattagcccagaattattcatccccgtcgaagacgatgttatggaaaggcagagattaatcgagtctgtccccgactcagtgaccccactcataatatacgaggagaccacagacatttggatcaatatccatgatatcttccacgtttttccgcagagccatgaagaagagatcgagtttatcttcgcctccgaatgcaaaactggatttcgtcacttgtataagataactagtatcctgaaagaatcaaagtacaagaggtcatccggaggccttccagccccatccgactttaaatgccctattaaagaagagatcgctatcacctccggagagtgggaagtgctgggcagacatggctctaacatccaggtagacgaggtccgtcggctcgtgtactttgaggggacaaaggacagccccctcgaacaccatctgtacgtcgtgagctatgtcaaccctggggaggtaaccagattgactgatcgtggctactctcactcttgctgcatcagccagcactgtgactttttcatcagcaagtacagtaaccaaaagaacccacattgcgttagtttatacaagcttagcagccccgaagatgatcctacctgcaagacaaaagagttctgggcaaccattctggactcggccggtcctttgccagactacacaccaccagaaatcttttcatttgaaagcaccaccggattcactctgtacgggatgctttacaaacctcatgaccttcagcctgggaagaaatatcctaccgtgctctttatttacggcggtcctcagggccaaattgaaatcgatgaccaggtggaaggtctacagtatctggcctcgcgatatgacttcatagacctcgacagagtggggatccatggctggagctacggcggatatctttctctaatggctcttatgcagagaagcgatatatttagggtggctatcgccggagctccagtcacgctgtggatcttctacgatacaggttataccgaacgatacatgggacacccggatcaaaacgagcagggctattacctcggatcggttgccatgcaggcggaaaaatttccctctgagcccaataggctgctcctcctacacggcttccttgatgaaaatgtacacttcgcacacacctctattctcttaagctttctggtgagggccggaaaaccctacgatttacagatataccctcaggaaagacactccattcgggtccctgaaagcggggagcattacgaattacatttgttgcactaccttcaggaaaatctgggaagccgtatcgcggctctgaaggtgatctag

SEQ ID NO: 258763 - DNA, 2697 bp, Artificial Sequence
  derived and/or modified sequence
atgtggaaacgctcggagcagatgaaaatcaaaagcgggaagtgcaacatggcggctgccatggagaccgagcagctgggcgtggaaatctttgaaactgccgactgtgaggaaaacatcgaaagccaagaccgaccgaagctagagcctttttacgtggaaagatatagctggtcacagttgaagaagctgctggccgatacgaggaagtaccatggttatatgatggccaaagcgcctcatgactttatgttcgtcaaacggaacgatcctgacgggcctcactctgacagaatctattatctggcaatgagtggcgagaaccgcgaaaacaccctcttttattctgaaataccgaagaccattaatagagctgccgtgctgatgctcagttggaaaccacttctggatctgttccaggctactttggactacggtatgtactctcgggaagaagagcttctgagggagagaaagcgaattggaactgttggaatcgccagttacgattaccaccagggctctggcacctttctcttccaggcaggtagtgggatttatcacgtgaaagacggaggtccacagggcttcacccaacagcccttgcgtcctaatctggtggaaacttcctgccccaatatcagaatggacccgaagctctgtccagcggacccagattggattgcgttcatccattctaacgatatttggatctccaacatagtgaccagagaggaaaggcggctgacatatgtgcacaatgagctagctaatatggaagaggacgccaggtctgccggagtggcaactttcgtgcttcaggaggagtttgatagatactccgggtactggtggtgccccaaggccgagaccacaccgtctggcggaaaaattctccgtatcctgtacgaggagaacgatgaatccgaggtagagatcattcacgtgacctctcctatgcttgaaacaaggagggccgactcattcagataccccaaaacgggaaccgctaaccctaaggtgaccttcaagatgagcgaaataatgatcgacgctgagggacgaatcatcgatgttatagataaggagctcattcaaccctttgagatattattcgaaggggtggagtatatagcccgtgccggatggactcccgaagggaaatacgcctggtcgattctcttagaccgaagccagactcgactgcaaatagtacttatttcccccgagctgttcattccagtggaggacgacgtgatggagagacaacgtttgatcgaatctgtgccagacagtgtgaccccattaatcatttacgaagagacaacagacatctggatcaatattcatgatatcttccatgtcttcccccaatctcatgaggaagaaatcgaattcatttttgcaagcgagtgtaagaccggatttcgacacctctacaaaatcaccagcattctcaaagagtcgaaatataaacggtcatccgggggtctacccgctccatctgactttaagtgccctattaaagaagagattgccattacgtcaggagagtgggaggttctggggcgacacggcagcaacattcaggtcgacgaggttagacgactcgtttatttcgaggggacaaaggattcacccttggagcaccatttatacgtcgtgtcctatgtgaaccctggagaagtgactcgactcacagaccgcggatattctcatagctgctgtatttcccaacactgtgactttttcattagtaagtattctaaccagaaaaacccccactgcgtgagcctctacaagctgtcttctccagaagatgacccaacttgtaagacaaaagagttctgggccacgattttggactctgctggccctcttcccgactacacacctcccgagatattctccttcgagtcaactacgggcttcacactctacggaatgctgtataaacctcatgacttgcagccagggaagaagtatcccaccgtcctcttcatttacggtgggccacaggtccagctggtgaacaacagattcaaaggagtcaagtattttagacttaatacccttgcgtccctcggctatgtggtagtggtcattgacaaccgaggctcgtgtcatagaggcctgaaatttgagggggcattcaagtacaaaatggggcaaattgaaatcgacgatcaggttgaaggcctgcagtacttagcctcaagatatgattttatcgatctggatcgggtgggtattcacggttggtcatatggcggttatctgtctctcatggccctgatgcagcgctccgacatctttcgagttgcgatcgccggagcccctgtgacgctctggatcttctacgataccggctacacagagcgctacatgggtcatcccgaccagaatgaacagggatattatctggggagcgtggccatgcaggccgagaaatttccgtctgagcccaacaggttactgctcctacacggttttctcgatgagaatgtacattttgcccacactagtattctcctgtctttccttgtacgggcaggaaaaccatacgacttacagatttaccctcaggaacggcacagcatccgggtgcctgagagcggcgagcattacgagctgcacctcctgcactacctccaagaaaacttgggttcacgtatcgcggcactcaaagtgatttag

SEQ ID NO: 258764 - DNA, 2697 bp, Artificial Sequence
  derived and/or modified sequence
atgtggaagaggagcgaacagatgaagataaaaagcggtaagtgcaatatggccgctgccatggagacggaacagcttggcgtggagatctttgaaactgcggactgcgaagaaaacattgaaagccaggaccggccaaaattagaacccttttacgtggaaagatattcatggagccagctgaagaaattgctggcagacacccgaaagtaccacggatatatgatggctaaggcacctcatgatttcatgtttgtaaaacgtaatgatcctgacggtcctcatagtgatcgaatctattacctggccatgtctggggaaaaccgcgaaaacaccctgttctactccgagatccctaaaaccataaaccgcgcagcagtattgatgctgtcttggaagcccctactcgatctgttccaggccactctcgactacgggatgtattcccgtgaagaagaactgctgcgggagcggaaaaggattggaacagtcggcatagctagctacgactatcaccagggctctggaacctttctctttcaagcgggaagcggcatctaccatgtcaaagatggcggacctcaaggctttacccagcagcccctgcgcccaaatctggtggaaacctcttgcccgaatattcggatggatccaaagttgtgccccgctgaccctgactggatagcctttatacattcaaatgacatttggatcagtaatatcgtcacacgggaggagcgaaggctcacttatgttcacaacgaactggcaaatatggaagaggacgcaaggagtgcgggagttgcaacgttcgtgttacaggaggaattcgataggtacagtgggtactggtggtgccctaaagctgaaaccacacctagcggaggcaagatcttgagaatcctctacgaggaaaacgatgaaagcgaagtggagatcatccatgtaacctcacctatgctggaaaccaggagagccgactcatttagatatccaaaaacagggaccgccaaccccaaagtcacttttaagatgtcagagattatgattgacgcagaaggccgaataattgatgtgatcgataaggagctaatacagcccttcgagatcttatttgagggagtcgagtatatagcccgagccggatggacacccgaaggtaaatatgcgtggagcattctgctggatagatctcagacacggctgcagatagttttgatcagcccagagctctttatacctgtagaagacgatgtcatggaacgccaacggctaatcgagagcgtcccagattccgtgacacctctgattatctacgaagagacaaccgatatatggatcaatatccatgacatcttccatgtcttcccgcagagccacgaagaggagattgaatttatttttgccagcgagtgcaaaactgggtttcgccacctctacaaaattacgagtatcctgaaggagagcaagtataaacgctcaagcggaggtctcccagccccaagcgacttcaagtgccccataaaggaggaaatcgcaattacctctggcgaatgggaggtactggggcgacacggtagtaatatccaggtggacgaggtgagacggctggtatactttgaaggtacaaaagattcccccctggaacaccacctgtatgtcgttagttatgttaatcccggagaggtgacaagactcactgacagaggctacagccacagctgttgcatttcacaacactgtgatttcttcatttctaagtattctaatcagaagaatccccactgcgtaagcctgtacaaactgagttctcctgaggacgatcctacgtgtaaaaccaaagagttttgggccacaattttggacagtgcaggcccactgcccgactacacgcctccagagattttttcattcgaatctactaccggcttcacgctctacggcatgctatacaaacctcatgacctgcagccgggtaaaaaatatccaacagtcctcttcatttatggcggaccccaggtccagctcgttaataatagatttaaaggcgtcaaatacttccgtttgaacactctcgccagcctcgggtacgtggtggtcgttattgataaccggggaagctgccacagaggcctcaaattcgaaggagccttcaaatacaagatggggcagatcgaaatcgatgaccaggttgaagggctccaatacctagcctctcgttatgacttcatagatctggacagggttggcatccacggatggtcatatggtggatatctcagtcttatggcactgatgcaaagaagcgacatattccgcgtggccatcgctggcgctcctgttaccctgtggatcttctacgacacagggtacaccgagcgctatatgggacatccagaccagaatgagcaaggttattacctcggctcagtggcaatgcaggctgaaaaattcccttctgaacccaacaggctgctgctcctgcacggtttcctggacgaaaacgtgcattttgctcacacatcaatattattgtcctttcttgtgcgagcaggcaagccctacgacttgcagatatatccacaggagcgccactctatccgcgtgcctgagtcaggcgagcactatgaactgcacttactgcactatctccaggaaaacttggggtccaggattgccgctctgaaggtcatttag

SEQ ID NO: 258765 - DNA, 2649 bp, Artificial Sequence
  derived and/or modified sequence
atggccgccgccatggagaccgagcagctgggcgtggagatcttcgagaccgccgactgcgaggagaacatcgagagccaggacagacccaagctggagcccttctacgtggagagatacagctggagccagctgaagaagctgctggccgacaccagaaagtaccacggctacatgatggccaaggccccccacgacttcatgttcgtgaagagaaacgaccccgacggcccccacagcgacagaatctactacctggccatgagcggcgagaacagagagaacaccctgttctacagcgagatccccaagaccatcaacagagccgccgtgctgatgctgagctggaagcccctgctggacctgttccaggccaccctggactacggcatgtacagcagagaggaggagctgctgagagagagaaagagaatcggcaccgtgggcatcgccagctacgactaccaccagggcagcggcaccttcctgttccaggccggcagcggcatctaccacgtgaaggacggcggcccccagggcttcacccagcagcccctgagacccaacctggtggagaccagctgccccaacatcagaatggaccccaagctgtgccccgccgaccccgactggatcgccttcatccacagcaacgacatctggatcagcaacatcgtgaccagagaggagagaagactgacctacgtgcacaacgagctggccaacatggaggaggacgccagaagcgccggcgtggccaccttcgtgctgcaggaggagttcgacagatacagcggctactggtggtgccccaaggccgagaccacccccagcggcggcaagatcctgagaatcctgtacgaggagaacgacgagagcgaggtggagatcatccacgtgaccagccccatgctggagaccagaagagccgacagcttcagataccccaagaccggcaccgccaaccccaaggtgaccttcaagatgagcgagatcatgatcgacgccgagggcagaatcatcgacgtgatcgacaaggagctgatccagcccttcgagatcctgttcgagggcgtggagtacatcgccagagccggctggacccccgagggcaagtacgcctggagcatcctgctggacagaagccagaccagactgcagatcgtgctgatcagccccgagctgttcatccccgtggaggacgacgtgatggagagacagagactgatcgagagcgtgcccgacagcgtgacccccctgatcatctacgaggagaccaccgacatctggatcaacatccacgacatcttccacgtgttcccccagagccacgaggaggagatcgagttcatcttcgccagcgagtgcaagaccggcttcagacacctgtacaagatcaccagcatcctgaaggagagcaagtacaagagaagcagcggcggcctgcccgcccccagcgacttcaagtgccccatcaaggaggagatcgccatcaccagcggcgagtgggaggtgctgggcagacacggcagcaacatccaggtggacgaggtgagaagactggtgtacttcgagggcaccaaggacagccccctggagcaccacctgtacgtggtgagctacgtgaaccccggcgaggtgaccagactgaccgacagaggctacagccacagctgctgcatcagccagcactgcgacttcttcatcagcaagtacagcaaccagaagaacccccactgcgtgagcctgtacaagctgagcagccccgaggacgaccccacctgcaagaccaaggagttctgggccaccatcctggacagcgccggccccctgcccgactacaccccccccgagatcttcagcttcgagagcaccaccggcttcaccctgtacggcatgctgtacaagccccacgacctgcagcccggcaagaagtaccccaccgtgctgttcatctacggcggcccccaggtgcagctggtgaacaacagattcaagggcgtgaagtacttcagactgaacaccctggccagcctgggctacgtggtggtggtgatcgacaacagaggcagctgccacagaggcctgaagttcgagggcgccttcaagtacaagatgggccagatcgagatcgacgaccaggtggagggcctgcagtacctggccagcagatacgacttcatcgacctggacagagtgggcatccacggctggagctacggcggctacctgagcctgatggccctgatgcagagaagcgacatcttcagagtggccatcgccggcgcccccgtgaccctgtggatcttctacgacaccggctacaccgagagatacatgggccaccccgaccagaacgagcagggctactacctgggcagcgtggccatgcaggccgagaagttccccagcgagcccaacagactgctgctgctgcacggcttcctggacgagaacgtgcacttcgcccacaccagcatcctgctgagcttcctggtgagagccggcaagccctacgacctgcagatctacccccaggagagacacagcatcagagtgcccgagagcggcgagcactacgagctgcacctgctgcactacctgcaggagaacctgggcagcagaatcgccgccctgaaggtgatctag

SEQ ID NO: 258766 - DNA, 2550 bp, Artificial Sequence
  derived and/or modified sequence
atgtggaagagaagcgagcagatgaagatcaagagcggcaagtgcaacatggccgccgccatggagaccgagcagctgggcgtggagatcttcgagaccgccgactgcgaggagaacatcgagagccaggacagacccaagctggagcccttctacgtggagagatacagctggagccagctgaagaagctgctggccgacaccagaaagtaccacggctacatgatggccaaggccccccacgacttcatgttcgtgaagagaaacgaccccgacggcccccacagcgacagaatctactacctggccatgagcggcgagaacagagagaacaccctgttctacagcgagatccccaagaccatcaacagagccgccgtgctgatgctgagctggaagcccctgctggacctgttccaggccaccctggactacggcatgtacagcagagaggaggagctgctgagagagagaaagagaatcggcaccgtgggcatcgccagctacgactaccaccagggcagcggcaccttcctgttccaggccggcagcggcatctaccacgtgaaggacggcggcccccagggcttcacccagcagcccctgagacccaacctggtggagaccagctgccccaacatcagaatggaccccaagctgtgccccgccgaccccgactggatcgccttcatccacagcaacgacatctggatcagcaacatcgtgaccagagaggagagaagactgacctacgtgcacaacgagctggccaacatggaggaggacgccagaagcgccggcgtggccaccttcgtgctgcaggaggagttcgacagatacagcggctactggtggtgccccaaggccgagaccacccccagcggcggcaagatcctgagaatcctgtacgaggagaacgacgagagcgaggtggagatcatccacgtgaccagccccatgctggagaccagaagagccgacagcttcagataccccaagaccggcaccgccaaccccaaggtgaccttcaagatgagcgagatcatgatcgacgccgagggcagaatcatcgacgtgatcgacaaggagctgatccagcccttcgagatcctgttcgagggcgtggagtacatcgccagagccggctggacccccgagggcaagtacgcctggagcatcctgctggacagaagccagaccagactgcagatcgtgctgatcagccccgagctgttcatccccgtggaggacgacgtgatggagagacagagactgatcgagagcgtgcccgacagcgtgacccccctgatcatctacgaggagaccaccgacatctggatcaacatccacgacatcttccacgtgttcccccagagccacgaggaggagatcgagttcatcttcgccagcgagtgcaagaccggcttcagacacctgtacaagatcaccagcatcctgaaggagagcaagtacaagagaagcagcggcggcctgcccgcccccagcgacttcaagtgccccatcaaggaggagatcgccatcaccagcggcgagtgggaggtgctgggcagacacggcagcaacatccaggtggacgaggtgagaagactggtgtacttcgagggcaccaaggacagccccctggagcaccacctgtacgtggtgagctacgtgaaccccggcgaggtgaccagactgaccgacagaggctacagccacagctgctgcatcagccagcactgcgacttcttcatcagcaagtacagcaaccagaagaacccccactgcgtgagcctgtacaagctgagcagccccgaggacgaccccacctgcaagaccaaggagttctgggccaccatcctggacagcgccggccccctgcccgactacaccccccccgagatcttcagcttcgagagcaccaccggcttcaccctgtacggcatgctgtacaagccccacgacctgcagcccggcaagaagtaccccaccgtgctgttcatctacggcggcccccagggccagatcgagatcgacgaccaggtggagggcctgcagtacctggccagcagatacgacttcatcgacctggacagagtgggcatccacggctggagctacggcggctacctgagcctgatggccctgatgcagagaagcgacatcttcagagtggccatcgccggcgcccccgtgaccctgtggatcttctacgacaccggctacaccgagagatacatgggccaccccgaccagaacgagcagggctactacctgggcagcgtggccatgcaggccgagaagttccccagcgagcccaacagactgctgctgctgcacggcttcctggacgagaacgtgcacttcgcccacaccagcatcctgctgagcttcctggtgagagccggcaagccctacgacctgcagatctacccccaggagagacacagcatcagagtgcccgagagcggcgagcactacgagctgcacctgctgcactacctgcaggagaacctgggcagcagaatcgccgccctgaaggtgatctag

SEQ ID NO: 258767 - DNA, 2697 bp, Artificial Sequence
  derived and/or modified sequence
atgtggaagagaagcgagcagatgaagatcaagagcggcaagtgcaacatggccgccgccatggagaccgagcagctgggcgtggagatcttcgagaccgccgactgcgaggagaacatcgagagccaggacagacccaagctggagcccttctacgtggagagatacagctggagccagctgaagaagctgctggccgacaccagaaagtaccacggctacatgatggccaaggccccccacgacttcatgttcgtgaagagaaacgaccccgacggcccccacagcgacagaatctactacctggccatgagcggcgagaacagagagaacaccctgttctacagcgagatccccaagaccatcaacagagccgccgtgctgatgctgagctggaagcccctgctggacctgttccaggccaccctggactacggcatgtacagcagagaggaggagctgctgagagagagaaagagaatcggcaccgtgggcatcgccagctacgactaccaccagggcagcggcaccttcctgttccaggccggcagcggcatctaccacgtgaaggacggcggcccccagggcttcacccagcagcccctgagacccaacctggtggagaccagctgccccaacatcagaatggaccccaagctgtgccccgccgaccccgactggatcgccttcatccacagcaacgacatctggatcagcaacatcgtgaccagagaggagagaagactgacctacgtgcacaacgagctggccaacatggaggaggacgccagaagcgccggcgtggccaccttcgtgctgcaggaggagttcgacagatacagcggctactggtggtgccccaaggccgagaccacccccagcggcggcaagatcctgagaatcctgtacgaggagaacgacgagagcgaggtggagatcatccacgtgaccagccccatgctggagaccagaagagccgacagcttcagataccccaagaccggcaccgccaaccccaaggtgaccttcaagatgagcgagatcatgatcgacgccgagggcagaatcatcgacgtgatcgacaaggagctgatccagcccttcgagatcctgttcgagggcgtggagtacatcgccagagccggctggacccccgagggcaagtacgcctggagcatcctgctggacagaagccagaccagactgcagatcgtgctgatcagccccgagctgttcatccccgtggaggacgacgtgatggagagacagagactgatcgagagcgtgcccgacagcgtgacccccctgatcatctacgaggagaccaccgacatctggatcaacatccacgacatcttccacgtgttcccccagagccacgaggaggagatcgagttcatcttcgccagcgagtgcaagaccggcttcagacacctgtacaagatcaccagcatcctgaaggagagcaagtacaagagaagcagcggcggcctgcccgcccccagcgacttcaagtgccccatcaaggaggagatcgccatcaccagcggcgagtgggaggtgctgggcagacacggcagcaacatccaggtggacgaggtgagaagactggtgtacttcgagggcaccaaggacagccccctggagcaccacctgtacgtggtgagctacgtgaaccccggcgaggtgaccagactgaccgacagaggctacagccacagctgctgcatcagccagcactgcgacttcttcatcagcaagtacagcaaccagaagaacccccactgcgtgagcctgtacaagctgagcagccccgaggacgaccccacctgcaagaccaaggagttctgggccaccatcctggacagcgccggccccctgcccgactacaccccccccgagatcttcagcttcgagagcaccaccggcttcaccctgtacggcatgctgtacaagccccacgacctgcagcccggcaagaagtaccccaccgtgctgttcatctacggcggcccccaggtgcagctggtgaacaacagattcaagggcgtgaagtacttcagactgaacaccctggccagcctgggctacgtggtggtggtgatcgacaacagaggcagctgccacagaggcctgaagttcgagggcgccttcaagtacaagatgggccagatcgagatcgacgaccaggtggagggcctgcagtacctggccagcagatacgacttcatcgacctggacagagtgggcatccacggctggagctacggcggctacctgagcctgatggccctgatgcagagaagcgacatcttcagagtggccatcgccggcgcccccgtgaccctgtggatcttctacgacaccggctacaccgagagatacatgggccaccccgaccagaacgagcagggctactacctgggcagcgtggccatgcaggccgagaagttccccagcgagcccaacagactgctgctgctgcacggcttcctggacgagaacgtgcacttcgcccacaccagcatcctgctgagcttcctggtgagagccggcaagccctacgacctgcagatctacccccaggagagacacagcatcagagtgcccgagagcggcgagcactacgagctgcacctgctgcactacctgcaggagaacctgggcagcagaatcgccgccctgaaggtgatctag

SEQ ID NO: 258768 - DNA, 3139 bp, Artificial Sequence
  derived and/or modified sequence
gcaacgaaccggaagtgctaaagcctccgaggccaaggccgctgctactgccgccgctgcttcttagtgccgcgttcgccgcctgggttgtcaccggcgccgccgccgaggaagccactgcaaccaggaccggagtggaggcggcgcagcatgaagcggcgcaggcccgctccatagcgcacgtcgggacggtccgggcggggccggggggaaggaaaatgcaacatggcagcagcaatggaaacagaacagctgggtgttgagatatttgaaactgcggactgtgaggagaatattgaatcacaggatcggcctaaattggagcctttttatgttgagcggtattcctggagtcagcttaaaaagctgcttgccgataccagaaaatatcatggctacatgatggctaaggcaccacatgatttcatgtttgtgaagaggaatgatccagatggacctcattcagacagaatctattaccttgccatgtctggtgagaacagagaaaatacactgttttattctgaaattcccaaaactatcaatagagcagcagtcttaatgctctcttggaagcctcttttggatctttttcaggcaacactggactatggaatgtattctcgagaagaagaactattaagagaaagaaaacgcattggaacagtcggaattgcttcttacgattatcaccaaggaagtggaacatttctgtttcaagccggtagtggaatttatcacgtaaaagatggagggccacaaggatttacgcaacaacctttaaggcccaatctagtggaaactagttgtcccaacatacggatggatccaaaattatgccctgctgatccagactggattgcttttatacatagcaacgatatttggatatctaacatcgtaaccagagaagaaaggagactcacttatgtgcacaatgagctagccaacatggaagaagatgccagatcagctggagtcgctacctttgttctccaagaagaatttgatagatattctggctattggtggtgtccaaaagctgaaacaactcccagtggtggtaaaattcttagaattctatatgaagaaaatgatgaatctgaggtggaaattattcatgttacatcccctatgttggaaacaaggagggcagattcattccgttatcctaaaacaggtacagcaaatcctaaagtcacttttaagatgtcagaaataatgattgatgctgaaggaaggatcatagatgtcatagataaggaactaattcaaccttttgagattctatttgaaggagttgaatatattgccagagctggatggactcctgagggaaaatatgcttggtccatcctactagatcgctcccagactcgcctacagatagtgttgatctcacctgaattatttatcccagtagaagatgatgttatggaaaggcagagactcattgagtcagtgcctgattctgtgacgccactaattatctatgaagaaacaacagacatctggataaatatccatgacatctttcatgtttttccccaaagtcacgaagaggaaattgagtttatttttgcctctgaatgcaaaacaggtttccgtcatttatacaaaattacatctattttaaaggaaagcaaatataaacgatccagtggtgggctgcctgctccaagtgatttcaagtgtcctatcaaagaggagatagcaattaccagtggtgaatgggaagttcttggccggcatggatctaatatccaagttgatgaagtcagaaggctggtatattttgaaggcaccaaagactcccctttagagcatcacctgtacgtagtcagttacgtaaatcctggagaggtgacaaggctgactgaccgtggctactcacattcttgctgcatcagtcagcactgtgacttctttataagtaagtatagtaaccagaagaatccacactgtgtgtccctttacaagctatcaagtcctgaagatgacccaacttgcaaaacaaaggaattttgggccaccattttggattcagcaggtcctcttcctgactatactcctccagaaattttctcttttgaaagtactactggatttacattgtatgggatgctctacaagcctcatgatctacagcctggaaagaaatatcctactgtgctgttcatatatggtggtcctcaggtgcagttggtgaataatcggtttaaaggagtcaagtatttccgcttgaataccctagcctctctaggttatgtggttgtagtgatagacaacaggggatcctgtcaccgagggcttaaatttgaaggcgcctttaaatataaaatgggtcaaatagaaattgacgatcaggtggaaggactccaatatctagcttctcgatatgatttcattgacttagatcgtgtgggcatccacggctggtcctatggaggatacctctccctgatggcattaatgcagaggtcagatatcttcagggttgctattgctggggccccagtcactctgtggatcttctatgatacaggatacacggaacgttatatgggtcaccctgaccagaatgaacagggctattacttaggatctgtggccatgcaagcagaaaagttcccctctgaaccaaatcgtttactgctcttacatggtttcctggatgagaatgtccattttgcacataccagtatattactgagttttttagtgagggctggaaagccatatgatttacagatctatcctcaggagagacacagcataagagttcctgaatcgggagaacattatgaactgcatcttttgcactaccttcaagaaaaccttggatcacgtattgctgctctaaaagtgatataattttgacctgtgtagaactctctggtatacactggctatttaaccaaatgaggaggtttaatcaacagaaaacacagaattgatcatcacattttgatacctgccatgtaacatctactcctgaaaataaatgtggtgccatgcaggggtctacggtttgtggtagtaatctaataccttaaccccacatgctcaaaatcaaatgatacatattcctgagagacccagcaataccataagaattactaaaaaaaaaaaaaaaaaa

SEQ ID NO: 258769 - DNA, 3099 bp, Artificial Sequence
  derived and/or modified sequence
gaagtgctaaagcctccgaggccaaggccgctgctactgccgccgctgcttcttagtgccgcgttcgccgcctgggttgtcaccggcgccgccgccgaggaagccactgcaaccaggaccggagtggaggcggcgcagcatgaagcggcgcaggcccgctccatagcgcacgtcgggacggtccgggcggggccggggggaaggctttgatggtgaggaaaggaaagattcctgtgagaagagcaggatgagcagagggattctatgcttgaagtcgagtcacttgaaaaagatctctttgaatgtggaagagatctgagcagatgaaaataaaatcaggaaaatgcaacatggcagcagcaatggaaacagaacagctgggtgttgagatatttgaaactgcggactgtgaggagaatattgaatcacaggatcggcctaaattggagcctttttatgttgagcggtattcctggagtcagcttaaaaagctgcttgccgataccagaaaatatcatggctacatgatggctaaggcaccacatgatttcatgtttgtgaagaggaatgatccagatggacctcattcagacagaatctattaccttgccatgtctggtgagaacagagaaaatacactgttttattctgaaattcccaaaactatcaatagagcagcagtcttaatgctctcttggaagcctcttttggatctttttcaggcaacactggactatggaatgtattctcgagaagaagaactattaagagaaagaaaacgcattggaacagtcggaattgcttcttacgattatcaccaaggaagtggaacatttctgtttcaagccggtagtggaatttatcacgtaaaagatggagggccacaaggatttacgcaacaacctttaaggcccaatctagtggaaactagttgtcccaacatacggatggatccaaaattatgccctgctgatccagactggattgcttttatacatagcaacgatatttggatatctaacatcgtaaccagagaagaaaggagactcacttatgtgcacaatgagctagccaacatggaagaagatgccagatcagctggagtcgctacctttgttctccaagaagaatttgatagatattctggctattggtggtgtccaaaagctgaaacaactcccagtggtggtaaaattcttagaattctatatgaagaaaatgatgaatctgaggtggaaattattcatgttacatcccctatgttggaaacaaggagggcagattcattccgttatcctaaaacaggtacagcaaatcctaaagtcacttttaagatgtcagaaataatgattgatgctgaaggaaggatcatagatgtcatagataaggaactaattcaaccttttgagattctatttgaaggagttgaatatattgccagagctggatggactcctgagggaaaatatgcttggtccatcctactagatcgctcccagactcgcctacagatagtgttgatctcacctgaattatttatcccagtagaagatgatgttatggaaaggcagagactcattgagtcagtgcctgattctgtgacgccactaattatctatgaagaaacaacagacatctggataaatatccatgacatctttcatgtttttccccaaagtcacgaagaggaaattgagtttatttttgcctctgaatgcaaaacaggtttccgtcatttatacaaaattacatctattttaaaggaaagcaaatataaacgatccagtggtgggctgcctgctccaagtgatttcaagtgtcctatcaaagaggagatagcaattaccagtggtgaatgggaagttcttggccggcatggatctaatatccaagttgatgaagtcagaaggctggtatattttgaaggcaccaaagactcccctttagagcatcacctgtacgtagtcagttacgtaaatcctggagaggtgacaaggctgactgaccgtggctactcacattcttgctgcatcagtcagcactgtgacttctttataagtaagtatagtaaccagaagaatccacactgtgtgtccctttacaagctatcaagtcctgaagatgacccaacttgcaaaacaaaggaattttgggccaccattttggattcagcaggtcctcttcctgactatactcctccagaaattttctcttttgaaagtactactggatttacattgtatgggatgctctacaagcctcatgatctacagcctggaaagaaatatcctactgtgctgttcatatatggtggtcctcagggtcaaatagaaattgacgatcaggtggaaggactccaatatctagcttctcgatatgatttcattgacttagatcgtgtgggcatccacggctggtcctatggaggatacctctccctgatggcattaatgcagaggtcagatatcttcagggttgctattgctggggccccagtcactctgtggatcttctatgatacaggatacacggaacgttatatgggtcaccctgaccagaatgaacagggctattacttaggatctgtggccatgcaagcagaaaagttcccctctgaaccaaatcgtttactgctcttacatggtttcctggatgagaatgtccattttgcacataccagtatattactgagttttttagtgagggctggaaagccatatgatttacagatctatcctcaggagagacacagcataagagttcctgaatcgggagaacattatgaactgcatcttttgcactaccttcaagaaaaccttggatcacgtattgctgctctaaaagtgatataattttgacctgtgtagaactctctggtatacactggctatttaaccaaatgaggaggtttaatcaacagaaaacacagaattgatcatcacattttgatacctgccatgtaacatctactcctgaaaataaatgtggtgccatgcaggggtctacggtttgtggtagtaatctaataccttaaccccacatgctcaaaatcaaatgatacatattcctgagagacccagcaataccataagaattact

SEQ ID NO: 258770 - DNA, 8699 bp, Artificial Sequence
  derived and/or modified sequence
agattccgagtcaaccaccgttcactgggcgccccttgagctctgggcgctggcctcctggcttccacgtccgttatcttaattgagtctcgctggggttgggaggccgggtattgtcagcgcttacagatgaggaaacggaagcccacagaggcgaagggattttccttaagtccgacttggcagatgggcttcggcctcagattttctggtttttcagctggtggtcttttttctctcctgcctcatgctaggtcgattccctccctgctcactgccctctcccattctgttccacccactcgcagcaggacactttcctttcctgccacacctgtcttctcacacacttttcttctaagacttggcattcctcccatctctcttctcaatattctctgctatgcctctcctcttgttcctcattcatagtttttcaaggtctttgccccctctgtgctattgaatctctcaactaggtgtggaccctaaagaatgagatagctaggcttcagtgaggctttaggtgtttaagtggacggctgtttggcccttgagttaaaaattaaggaatttcacttgagtggatccaaactcaagagtcctaaagctattttctgagtcaacatgctctatttctgagtgaggggcttagtgctatgaggtgtcttgacatcttagtccattgttgctgtgctggcataacctcgctgtttttcctgcacttgccacttagcttttcccaccccatcccttcatcacctacttgggctatgggagcccaaaattaaaacttatagagtaacagatgtaatagcagaccttcctttttttttttttcctaagccagaatttcaacaagtttaatgcttctttttccagaaaagttacctatttaaattattctcagagtaatgcagcaagaaaatggaatgcacttaagatgaatagaaaattgtttatctcgtgaaaagtcttaagttattaaattcaagttaattccctttctgcaaaaatggcctgtaactcttactggctatcctcctgagttaattctatctccatccagcttgatatgacattattatgtaaaagaggaacaggaataggcacataaaaataaattttattaatcatatgccgtttttgatgatttgcaatagtcactgagtaacttcacatctgtatgccttttgtaactttttaaagcctttccatggttttcctttgtctggacaccaaagtttgctatgttaggatattcttttgactatattgggctacacatctctgaaataaaataattcttgaattctgataacataaaacgcagatacaaaataatgtaggcattatatattgccccaaaaagtgatattttggtatcagttttaactactattttggggcttctctttttggccacatatggtccatcttaatgatcaaagtcttatcttatttcattatcctggtgagcaggctttgatggtgaggaaaggaaagattcctgtgagaagagcaggatgagcagagggattctatgcttgaagtcgagtcacttgaaaaagatctctttgaatgtggaagagatctgagcagatgaaaataaaatcaggaaaatgcaacatggcagcagcaatggaaacagaacagctgggtgttgagatatttgaaactgcggactgtgaggagaatattgaatcacaggatcggcctaaattggagcctttttatgttgagcggtattcctggagtcagcttaaaaagctgcttgccgataccagaaaatatcatggctacatgatggctaaggcaccacatgatttcatgtttgtgaagaggaatgatccagatggacctcattcagacagaatctattaccttgccatgtctggtgagaacagagaaaatacactgttttattctgaaattcccaaaactatcaatagagcagcagtcttaatgctctcttggaagcctcttttggatctttttcaggcaacactggactatggaatgtattctcgagaagaagaactattaagagaaagaaaacgcattggaacagtcggaattgcttcttacgattatcaccaaggaagtggaacatttctgtttcaagccggtagtggaatttatcacgtaaaagatggagggccacaaggatttacgcaacaacctttaaggcccaatctagtggaaactagttgtcccaacatacggatggatccaaaattatgccctgctgatccagactggattgcttttatacatagcaacgatatttggatatctaacatcgtaaccagagaagaaaggagactcacttatgtgcacaatgagctagccaacatggaagaagatgccagatcagctggagtcgctacctttgttctccaagaagaatttgatagatattctggctattggtggtgtccaaaagctgaaacaactcccagtggtggtaaaattcttagaattctatatgaagaaaatgatgaatctgaggtggaaattattcatgttacatcccctatgttggaaacaaggagggcagattcattccgttatcctaaaacaggtacagcaaatcctaaagtcacttttaagatgtcagaaataatgattgatgctgaaggaaggatcatagatgtcatagataaggaactaattcaaccttttgagattctatttgaaggagttgaatatattgccagagctggatggactcctgagggaaaatatgcttggtccatcctactagatcgctcccagactcgcctacagatagtgttgatctcacctgaattatttatcccagtagaagatgatgttatggaaaggcagagactcattgagtcagtgcctgattctgtgacgccactaattatctatgaagaaacaacagacatctggataaatatccatgacatctttcatgtttttccccaaagtcacgaagaggaaattgagtttatttttgcctctgaatgcaaaacaggtttccgtcatttatacaaaattacatctattttaaaggaaagcaaatataaacgatccagtggtgggctgcctgctccaagtgatttcaagtgtcctatcaaagaggagatagcaattaccagtggtgaatgggaagttcttggccggcatggatctaatatccaagttgatgaagtcagaaggctggtatattttgaaggcaccaaagactcccctttagagcatcacctgtacgtagtcagttacgtaaatcctggagaggtgacaaggctgactgaccgtggctactcacattcttgctgcatcagtcagcactgtgacttctttataagtaagtatagtaaccagaagaatccacactgtgtgtccctttacaagctatcaagtcctgaagatgacccaacttgcaaaacaaaggaattttgggccaccattttggattcagcaggtcctcttcctgactatactcctccagaaattttctcttttgaaagtactactggatttacattgtatgggatgctctacaagcctcatgatctacagcctggaaagaaatatcctactgtgctgttcatatatggtggtcctcaggtgcagttggtgaataatcggtttaaaggagtcaagtatttccgcttgaataccctagcctctctaggttatgtggttgtagtgatagacaacaggggatcctgtcaccgagggcttaaatttgaaggcgcctttaaatataaaatgggtcaaatagaaattgacgatcaggtggaaggactccaatatctagcttctcgatatgatttcattgacttagatcgtgtgggcatccacggctggtcctatggaggatacctctccctgatggcattaatgcagaggtcagatatcttcagggttgctattgctggggccccagtcactctgtggatcttctatgatacaggatacacggaacgttatatgggtcaccctgaccagaatgaacagggctattacttaggatctgtggccatgcaagcagaaaagttcccctctgaaccaaatcgtttactgctcttacatggtttcctggatgagaatgtccattttgcacataccagtatattactgagttttttagtgagggctggaaagccatatgatttacagatctatcctcaggagagacacagcataagagttcctgaatcgggagaacattatgaactgcatcttttgcactaccttcaagaaaaccttggatcacgtattgctgctctaaaagtgatataattttgacctgtgtagaactctctggtatacactggctatttaaccaaatgaggaggtttaatcaacagaaaacacagaattgatcatcacattttgatacctgccatgtaacatctactcctgaaaataaatgtggtgccatgcaggggtctacggtttgtggtagtaatctaataccttaaccccacatgctcaaaatcaaatgatacatattcctgagagacccagcaataccataagaattactaaaaaaaaaaaaaaaaaaaagacattagcaccatgtattcatactaccctattttcacttttaatagtattataaacttcatgaacttaattagtgtatttttacagtatacttttgagtttgttaaaatatgatgatattagtgattggtttggttcagttccagaatctttgactagttacagatttgatagcacttaaatgtaattgaatagcttatgcttcattgcttgggcatatccagcatgttatgaactaataactattaaacttgacttaaccagtcattcattaataatttttcaaggataacttagtggcctcctaaagacacttgttttggcactgaccagtttttagccaatttaatctgtatctagtataaataattctcatttttctttgatgatattaacagagtgggcttttccttttgcataaaggctagtaactgtatatgtagcatggatttaattagtcatgatattgataattacaggcagaaaatttttaatcaaatgattagagcttaaatatttgcaggcaagtttttttttttcctttaagaaaaggaaaaagtacacattcactagaattcttcagaaaatttagtggtgccagtttccatttggtatttccttattaaaatattctagaattttaaggagattgaagggaatcacagtggggtggggagacctgggtttggggaatgacagagagaagaggtggtgagggcctgattaaaaactaagcagaagtagttttaacaaaaatactcatgaaaatgtttggaaactgaaatttaaacaactgtaatattaaggaaaccagaatcaataaatcactgtcttgccagcacagctacagagtaacatgattcaggggaggaaaagttccttagagttacttttataattctttttttttttcctcttaggtttagaaatcttacaaatttaaactttatccttttaaaattatttgaacataatttagatattgtaagcttaaaatacaaatgtttatagataacctctttaccataaactaatccctggcaagccatggctctctttttttttttggtgtttaaagcctgtaaacagtttttctgaatgatcatgaacttttcttggtttagcactaggatttagctatgaagagagctcataggctttcaggtgctaattgagatctgccctgttagagtcttggggtgctagattggtcacattgacaccagtggcagggaaggcatctatgagtttgatgctttttatcacacacttcagtgtttagaaagttattaccaatacttttaaacaacactccaagaaaatttgctatatttctttctcatcactacagagagagtagatttccccatagagagcacagcctccattagtaaggttggtgactattggtaagaggtggacttcattgacaccaagtgggaggtagggaaagcccagaaatggcaggatgatatggtggttctgtcgttgggaaaggtattgggttttgctgtttgtatttatactgtataatagataccacgctttttcttattatctgtatatgtattgcttttcatgtttgatattttcccatgccaagatttgtttatatatattttcaatgttaaattaaattgatttgggtaactttcttccccaagaaagtattttcccccttaagtatatatctgactgtggagggtgttttgttttgttttgttttgttttgtttggactaactggcctcgaaggatctatccttataatatatgcaaagtagaaatggtatacagtagcttttaagcagctactccattgaaacctctcacccattaaggctgtttcttcaaagtggcatctcttattttaccgaaacaaacttagaaaacttcatgtactctggagttcacaggtgttttccttttgcatgttgccttctcctttcctcctatcacaaagaatgcttctattatcactcccagtcacttaaatgccattctgcttctttagcaggaaaaaatacctgaatgaattctcttacagaaagacagtttgactgaatttgctttttacaatcagtgtggaaaatatcatagtcaattgaggcaatcagtagaaatctcactaaaagtttgtaccccctgagtatgggtaacagcttaaacggcaagaatatataaaagtagcaacagtttagtgggagccaaaaagcactaggttaaatatcatactacgtttttaaagacttgataaatgtgtacacttgaacaaccatccagagggatagttacttgagcattacagagtagtggaactcaaaatctaagattcatctgggatacttctaaaagaaatgtagagttttgaatctcactcttaaaaatgtgtattcccaggctaggcatggtggctcacgcctgtaatcctagcactttgggaggccaaggcgggtgaatcacttgaagtcaggagatcaagaccagcttggtcgacatggtgaaaccccgtctctactaaaagtacaaaaaaattagctgggcatgatggcgtgtgcctataatcccacctactcgggaggctgaggcaggagaatcgcttgaacctgggaggcggaagttgcagtgagccgagatggcgccactgtagtccagtctgggcgacagagtgagattctgcctcaaaataaataaataaataaaaatttgtattccattgatttgggtagacaccaggaatgtgcatttctaacaagctttccaggcgatcctatagtaagtcatctgtggactactttaagaaactcttctatagagaatggagttggattaataataggtgattttttacactggactgattcacaagaacctaaacagtagtccatgaagctgctcatctgtggtaactatttggccccgtctcactctgaaagcagcaggagatgttgtttactttgtttctatcccctttgtctggagattaattttggaatgaaagtttttctctctatgccattcctggttcttttccaaagcctcatacaagaggattaggtcacaatgcatgcattaccttttaaaagaatgcgatattgataccgatgcttacttttttttttttactacttgttttattcctt[450 bp omitted]cttccttggtatagtggaggatttgaggattggaatatagagtagagtgcttgcttaagcctgggagcccatctttatagctatttgatgtaagaaaagagacatggccatttctaaactatataaggtgagtgtgtctattcccagcagatataaaggaaaaaggaaacttttttgattcccaccttcccagcctcacctagccatcttccagcctcaaatatagagatgttagtgcaaggtcctgggctctaggtgatcatttcataagtcctttacagataaagaaaaagtagtgtttgtatgtttgtttttaagtaaccccaaaacaaatttatattgtattcagcaaaattggaattcaggtgtttaattttagaacatgaagtgcctgctgttttaagcattgacttgtataaaaagaattgcatgtctccagtaagcttatgggttttctcatttttaggtatatggcttttaatcatgtaaagtgaaacattagttttcttgcattttattacaggttctttgttgcaataaagatgctgctgaaattaattga

SEQ ID NO: 258771 - DNA, 2953 bp, Artificial Sequence
  derived and/or modified sequence
tcctggtgagcaggctttgatggtgaggaaaggaaagattcctgtgagaagagcaggatgagcagagggattctatgcttgaagtcgagtcacttgaaaaagatctctttgaatgtggaagagatctgagcagatgaaaataaaatcaggaaaatgcaacatggcagcagcaatggaaacagaacagctgggtgttgagatatttgaaactgcggactgtgaggagaatattgaatcacaggatcggcctaaattggagcctttttatgttgagcggtattcctggagtcagcttaaaaagctgcttgccgataccagaaaatatcatggctacatgatggctaaggcaccacatgatttcatgtttgtgaagaggaatgatccagatggacctcattcagacagaatctattaccttgccatgtctggtgagaacagagaaaatacactgttttattctgaaattcccaaaactatcaatagagcagcagtcttaatgctctcttggaagcctcttttggatctttttcaggcaacactggactatggaatgtattctcgagaagaagaactattaagagaaagaaaacgcattggaacagtcggaattgcttcttacgattatcaccaaggaagtggaacatttctgtttcaagccggtagtggaatttatcacgtaaaagatggagggccacaaggatttacgcaacaacctttaaggcccaatctagtggaaactagttgtcccaacatacggatggatccaaaattatgccctgctgatccagactggattgcttttatacatagcaacgatatttggatatctaacatcgtaaccagagaagaaaggagactcacttatgtgcacaatgagctagccaacatggaagaagatgccagatcagctggagtcgctacctttgttctccaagaagaatttgatagatattctggctattggtggtgtccaaaagctgaaacaactcccagtggtggtaaaattcttagaattctatatgaagaaaatgatgaatctgaggtggaaattattcatgttacatcccctatgttggaaacaaggagggcagattcattccgttatcctaaaacaggtacagcaaatcctaaagtcacttttaagatgtcagaaataatgattgatgctgaaggaaggatcatagatgtcatagataaggaactaattcaaccttttgagattctatttgaaggagttgaatatattgccagagctggatggactcctgagggaaaatatgcttggtccatcctactagatcgctcccagactcgcctacagatagtgttgatctcacctgaattatttatcccagtagaagatgatgttatggaaaggcagagactcattgagtcagtgcctgattctgtgacgccactaattatctatgaagaaacaacagacatctggataaatatccatgacatctttcatgtttttccccaaagtcacgaagaggaaattgagtttatttttgcctctgaatgcaaaacaggtttccgtcatttatacaaaattacatctattttaaaggaaagcaaatataaacgatccagtggtgggctgcctgctccaagtgatttcaagtgtcctatcaaagaggagatagcaattaccagtggtgaatgggaagttcttggccggcatggatctaatatccaagttgatgaagtcagaaggctggtatattttgaaggcaccaaagactcccctttagagcatcacctgtacgtagtcagttacgtaaatcctggagaggtgacaaggctgactgaccgtggctactcacattcttgctgcatcagtcagcactgtgacttctttataagtaagtatagtaaccagaagaatccacactgtgtgtccctttacaagctatcaagtcctgaagatgacccaacttgcaaaacaaaggaattttgggccaccattttggattcagcaggtcctcttcctgactatactcctccagaaattttctcttttgaaagtactactggatttacattgtatgggatgctctacaagcctcatgatctacagcctggaaagaaatatcctactgtgctgttcatatatggtggtcctcaggtgcagttggtgaataatcggtttaaaggagtcaagtatttccgcttgaataccctagcctctctaggttatgtggttgtagtgatagacaacaggggatcctgtcaccgagggcttaaatttgaaggcgcctttaaatataaaatgggtcaaatagaaattgacgatcaggtggaaggactccaatatctagcttctcgatatgatttcattgacttagatcgtgtgggcatccacggctggtcctatggaggatacctctccctgatggcattaatgcagaggtcagatatcttcagggttgctattgctggggccccagtcactctgtggatcttctatgatacaggatacacggaacgttatatgggtcaccctgaccagaatgaacagggctattacttaggatctgtggccatgcaagcagaaaagttcccctctgaaccaaatcgtttactgctcttacatggtttcctggatgagaatgtccattttgcacataccagtatattactgagttttttagtgagggctggaaagccatatgatttacagatctatcctcaggagagacacagcataagagttcctgaatcgggagaacattatgaactgcatcttttgcactaccttcaagaaaaccttggatcacgtattgctgctctaaaagtgatataattttgacctgtgtagaactctctggtatacactggctatttaaccaaatgaggaggtttaatcaacagaaaacacagaattgatcatcacattttgatacctgccatgtaacatctactcctgaaaataaatgtggtgccatgc

SEQ ID NO: 258772 - protein, 847 aa, Artificial Sequence
  derived and/or modified sequence
MWKRSEQMKIKSGKCNMAAAMETEQLGVEIFETADCEENIESQDRPKLEPFYVERYSWSQLKKLLADTRKYHGYMMAKAPHDFMFVKRNDPDGPHSDRIYYLAMSGENRENTLFYSEIPKTINRAAVLMLSWKPLLDLFQATLDYGMYSREEELLRERKRIGTVGIASYDYHQGSGTFLFQAGSGIYHVKDGGPQGFTQQPLRPNLVETSCPNIRMDPKLCPADPDWIAFIHSNDIWISNIVTREERRLTYVHNELANMEEDARSAGVATFVLQEEFDRYSGYWWCPKAETTPSGGKILRILYEENDESEVEIIHVTSPMLETRRADSFRYPKTGTANPKVTFKMSEIMIDAEGRIIDVIDKELIQPFEILFEGVEYIARAGWTPEGKYAWSILLDRSQTRLQIVLISPELFIPVEDDVMERQRLIESVPDSVTPLIIYEETTDIWINIHDIFHVFPQSHEEEIEFIFASECKTGFRHLYKITSILKESKYKRSSGGLPAPSDFKCPIKEEIAITSGEWEVLGRHGSNIQVDEVRRLVYFEGTKDSPLEHHLYVVSYVNPGEVTRLTDRGYSHSCCISQHCDFFISKYSNQKNPHCVSLYKLSSPEDDPTCKTKEFWATILDSAGPLPDYTPPEIFSFESTTGFTLYGMLYKPHDLQPGKKYPTVLFIYGGPQVQLVNNRFKGVKYFRLNTLASLGYVVVVIDNRGSCHRGLKFEGAFKYKMVAIAGAPVTLWIFYDTGYTERYMGHPDQNEQGYYLGSVAMQAEKFPSEPNRLLLLHGFLDENVHFAHTSILLSFLVRAGKPYDLQIYPQERHSIRVPESGEHYELHLLHYLQENLGSRIAALKVI

SEQ ID NO: 258773 - DNA, 2544 bp, Artificial Sequence
  derived and/or modified sequence
atgtggaagaggtccgagcagatgaaaattaaatctggaaaatgcaacatggcagctgccatggagaccgagcagcttggagtcgagatatttgaaacagcggattgcgaggaaaatatagaaagccaggacagaccaaaactcgagcctttctacgtggagaggtattcctggtcacagctaaagaagctgctggcagacaccaggaagtatcatgggtatatgatggccaaggcccctcatgacttcatgtttgttaaacgtaatgatcccgatgggccacattccgacaggatttattatctagccatgtcaggagagaacagggagaatactctcttttatagcgaaattcctaaaaccattaacagagcagccgtgctgatgctgtcctggaagccattactggatctcttccaggcgacgcttgactatgggatgtactccagagaagaagaactgctccgcgaaaggaagcgcatcggcacagtgggaatcgcgtcctatgactaccatcaaggcagcggtactttcctattccaagctgggagtgggatttaccatgtgaaggatggtgggcctcaggggttcacacagcagcccttaagacccaacctggtcgagactagctgtccaaatattagaatggaccctaagctgtgtcctgccgaccctgactggattgccttcatacactctaacgacatctggatctctaacatagtaacgcgggaggagaggaggctcacctatgtccataacgagctggccaacatggaggaagacgcgcgctccgcaggtgtggcgacattcgtccttcaggaggaatttgatcgctattccgggtactggtggtgtcccaaagccgaaacaactcccagcggagggaaaatcttgagaattctttatgaagaaaatgatgagtctgaagttgagatcatacatgtgaccagtcccatgctggaaactagaagggcggacagtttcaggtatcccaagaccggaactgccaatcctaaggtgacttttaaaatgagtgagataatgatcgacgccgaaggtcgcatcatcgacgtgattgacaaggagttaatccagccttttgagatcctgttcgagggggtcgagtatatcgctagggcaggctggaccccagagggtaaatacgcctggtccattcttcttgacaggagtcagaccaggctccagattgttctcatctcaccggagctgttcatcccagtggaggacgatgtaatggagaggcagcgactgattgagagcgttccagacagtgtaaccccactgatcatatacgaagaaactacagatatttggatcaacatccatgatatctttcacgttttcccgcagtcacacgaggaggagattgagttcatttttgctagtgagtgcaaaacaggattccgacatctgtataagatcacatctatattgaaagagagcaagtataaaaggtcctccggaggactgcccgcccccagtgacttcaagtgcccaattaaggaggagattgcaattacctcaggagagtgggaagtgttgggaaggcacgggtccaacattcaggtggatgaggtgagaagacttgtgtactttgaaggcactaaggacagccccctggaacaccacctgtatgtggtaagctacgttaacccgggcgaggtcacacggctaacggatcgaggctatagccactcatgttgcatctcacagcattgtgactttttcatatcaaagtacagcaaccagaagaacccccactgcgtgagcttgtataagttgtcctcccccgaggacgatcctacgtgcaagactaaggaattctgggccaccatcctcgatagcgccggaccactgccagactacacaccgcctgagatcttctcgttcgaatccacgaccgggtttacactgtacggcatgctatacaaaccacatgacctccagcccggcaagaagtatccgaccgtcttgtttatctatggcggtcctcaggtgcaactagttaacaacagatttaaaggagtgaaatactttcgcctaaatacactcgcctcgctgggatacgtagtcgtggtgatcgataaccgcggctcttgccaccgaggcctgaaattcgaaggcgcgttcaagtataaaatggtggctattgccggtgctcctgttactctgtggattttctatgataccgggtatacggagcggtacatggggcaccccgatcagaacgagcaggggtactatctcgggtccgtcgccatgcaggccgaaaaatttccctctgagcccaatcgcttgttactcctccatggctttctggatgaaaacgtgcatttcgcccatacatcaatcctgctgagtttccttgttcgagccggcaaaccgtacgacttgcagatttacccccaggagcgccatagcatcagggtacccgagagtggggagcattacgagctccacctgctacattacctgcaggaaaatctgggaagcaggatcgcagccctgaaggtaatctag

SEQ ID NO: 258774 - DNA, 2544 bp, Artificial Sequence
  derived and/or modified sequence
atgtggaagaggtctgagcagatgaagatcaagagcggcaagtgcaacatggctgctgccatggagacagagcagctgggcgtggagatctttgaaacagctgactgtgaggagaacatcgagagccaggaccggcccaagctggagcccttctacgtggagcgctacagctggagccagctgaagaagctgctggccgacaccaggaagtaccacggctacatgatggccaaggcccctcatgacttcatgtttgtgaagagaaatgaccctgatggcccccacagcgaccgcatctactacctggccatgtctggagaaaatcgggagaacaccctcttctacagcgagatccccaagaccatcaacagagctgctgtgctgatgctgtcctggaagcccctgctggacctcttccaggccaccctggactatggcatgtacagccgggaggaggagctgctgcgggagaggaagagaattggaacagtgggcatcgccagctatgactaccaccagggcagcggcaccttcctgttccaggccggcagcggcatctaccacgtgaaggatggcggcccccagggcttcacccagcagcccctgcggcccaacctggtggagaccagctgccccaacatccgcatggaccccaagctgtgcccagctgaccctgactggatcgccttcatccacagcaatgacatctggatcagcaacatcgtgacccgggaggagcggcggctgacctacgtgcacaatgagctggccaacatggaggaggatgcccggtctgctggggtggccacctttgtgctgcaggaggagtttgaccgctacagcggctactggtggtgccccaaggccgagaccacccccagcggcggcaagatcctgcgcatcctgtatgaagaaaatgatgaaagtgaggtggagatcatccacgtgaccagccccatgctggagacccggcgggctgacagcttccgctaccccaagacaggaacagccaaccccaaggtgaccttcaagatgtctgagatcatgattgatgctgagggccgcatcattgatgtgattgacaaggagctgatccagccctttgagatcctgtttgagggcgtggagtacatcgcccgggccggctggaccccagagggcaagtatgcctggagcatcctgctggacaggagccagacccggctgcagatcgtgctgatcagccctgagctgttcatccctgtggaggatgatgtgatggagcggcagaggctcatcgagagcgtgcctgacagcgtgacccccctcatcatctatgaggagaccacagacatctggatcaacatccatgacatcttccacgtgttcccccagagccatgaggaggagattgagttcatctttgccagcgagtgcaagacaggcttccgccacctgtacaagatcaccagcatcctgaaggagagcaagtacaagaggagcagcggcggcctgcctgcccccagcgacttcaagtgccccatcaaggaggagatcgccatcaccagcggggagtgggaggtgctgggcagacatggcagcaacatccaggtggatgaggtgcggcggctggtgtactttgagggcaccaaggacagccccctggagcaccacctgtatgtggtgtcctatgtgaaccctggagaggtgacccggctgacagaccggggctacagccacagctgctgcatcagccagcactgtgacttcttcatcagcaagtacagcaaccagaagaacccccactgtgtgtccctgtacaagctgagcagcccagaagatgaccccacctgcaagaccaaggagttctgggccaccatcctggacagcgctggccccctgcctgactacaccccacctgagatcttctcctttgagagcaccaccggcttcaccctgtatggcatgctgtacaagccccatgacctgcagcccgggaagaagtaccccaccgtgctcttcatctatggaggcccccaggtgcagctggtgaacaaccgcttcaagggcgtgaagtacttccggctgaacaccctggccagcctgggctacgtggtggtggtgattgacaacagaggcagctgccaccggggcctgaagtttgagggcgccttcaagtacaagatggtggccatcgccggggcccctgtgaccctgtggatcttctatgacaccggctacacagagcgctacatgggccacccagaccagaatgagcagggctactacctgggctctgtggccatgcaggccgagaagttccccagcgagcccaaccggctgctgctgctgcacggcttcctggatgaaaatgtgcactttgcccacaccagcatcctgctgtccttcctggtgcgggccggcaagccctatgacctgcagatctacccccaggagcggcacagcatccgggtgcctgagagcggggagcactatgagctgcacctgctgcactacctgcaggagaacctgggcagcagaattgctgccctgaaggtgatctag

SEQ ID NO: 258775 - DNA, 2544 bp, Artificial Sequence
  derived and/or modified sequence
atgtggaagcggagcgagcagatgaagatcaagagcggcaagtgcaatatggccgcagctatggagacagagcagctcggcgtggagattttcgagactgccgactgtgaggagaacattgagtcccaggaccgtcccaagctcgagcccttctacgtggaacgttatagttggtcgcagctgaagaaacttttagctgacacccggaagtaccatggatacatgatggctaaggcacctcatgatttcatgtttgttaagaggaatgatccagacggaccgcatagcgataggatctattacctggcaatgtcaggtgagaacagggagaatacgttgttttattcggagattcccaaaacgattaatagggctgctgtactgatgctgagctggaaaccgttgcttgacctgttccaggcaacacttgattacgggatgtacagtcgtgaagaggaactcctcagagaacggaagcgtatcggcacggtagggatcgcctcatatgattatcaccaaggatcaggcactttcttatttcaggctggctccggcatctaccacgtaaaggatggcggcccacaggggttcacacagcagccactccgcccaaatctggtggaaaccagctgcccgaacatacgcatggatcccaagctgtgtccagctgatcccgactggatcgcatttattcacagtaatgatatctggatcagcaacattgttacacgtgaggagcggcgcctgacatatgtgcataacgagctggctaatatggaggaagacgcaagatcagccggagtcgcaactttcgtgctgcaggaggagttcgaccggtactctggttattggtggtgcccaaaagctgaaaccacaccttccggcggcaagatcctgaggatactgtacgaagaaaacgatgagagtgaggtggaaatcatccacgtgacgtccccaatgctggaaaccagacgggccgactcgtttcgttatccaaaaaccggaacagctaacccgaaagtcacgttcaagatgtccgaaattatgatagatgctgaggggagaattattgatgttatcgacaaggaactaatacaacctttcgaaatcctcttcgagggggtggaatacatcgctagagcaggctggacccctgagggcaagtacgcatggtcaatcctgctggaccgcagtcagacacggctgcagattgtgttgatctcacccgaactctttatacctgtggaggacgacgtgatggagcggcagcggctaatcgagagtgtgcccgatagcgtcacaccgctgataatttatgaggagacaacagatatctggattaatatacacgatattttccacgtgtttccccaatcacatgaggaagaaatcgagtttatcttcgctagcgaatgtaagacaggctttcggcatctgtacaagattactagcatacttaaggagtcgaagtataagcgctcttctggaggtctccccgcaccctcagattttaaatgtccaatcaaggaggaaatagccatcaccagtggcgagtgggaggtgctgggacggcacggttctaatatacaggttgacgaggttaggaggctggtgtatttcgagggcacaaaagactccccactggaacatcacttgtacgtggtttcttacgtgaaccctggcgaggtgacacgcctcacagatcggggttactctcattcatgctgtatatcgcagcattgtgatttctttattagtaagtatagtaatcagaagaaccctcactgtgttagtttatacaagctctccagtccagaggacgaccccacttgtaagacaaaagagttctgggctacaatcctggatagtgctggaccactgcccgactacaccccccccgagatcttctcatttgaatccactactggatttaccctgtatggcatgttatacaaacctcacgacctacagcctggaaaaaaataccccaccgtgttgttcatatatggaggacctcaagtacagctagttaacaaccgctttaaaggtgtcaagtatttccggttgaacaccctcgcatccctcgggtatgttgtggtcgtcatcgacaaccgaggatcttgccaccgcgggctcaaatttgagggcgcttttaagtacaagatggttgcgatcgcaggcgctccagttaccttgtggatcttttacgacactgggtatacggagaggtatatgggccacccagaccaaaacgagcagggttactacctaggttctgtggcgatgcaggccgagaagtttccatccgaacctaaccggctgctgcttctgcacggctttctagatgagaatgtgcatttcgcccacacatcgatcctgctgtcctttctggtgcgggccgggaagccttatgatcttcagatttacccgcaggagagacattcaattcgggtacctgagagtggagagcattacgaactgcatcttcttcactatctccaggagaacctcgggagccgtatagcagccctcaaagtgatctag

SEQ ID NO: 258776 - DNA, 2544 bp, Artificial Sequence
  derived and/or modified sequence
atgtggaagcgatctgagcagatgaaaattaagtccggcaagtgtaatatggctgcggctatggaaaccgaacaactgggagtagagattttcgaaacagccgattgcgaagaaaatattgagtcccaggatcggccaaaactggagcctttttatgttgaacgttactcttggagccaactaaagaagcttcttgcagacacgcggaaatatcatggttacatgatggccaaggcccctcatgatttcatgttcgtaaagcgcaacgacccggatggccctcattccgacaggatttattacctggccatgagtggcgagaacagggaaaatacactgttctattcagagattcccaaaaccatcaatcgggctgcagtactgatgttaagctggaagccccttctagacctttttcaggctaccctggactatgggatgtactcaagagaggaggagctgctgcgcgagaggaagcgcatcgggacggtagggatcgcctcctatgactaccaccaggggagcgggactttcctgtttcaggccggatcagggatctatcacgtcaaagacggaggcccacaaggcttcacgcagcaacccctgaggccgaatctcgtagagacgtcctgccccaatatcaggatggacccaaaactgtgtcctgcagatccagattggattgcgttcatacacagtaatgacatctggatctccaatattgttacacgagaggaaagaagactcacctatgtccataacgagttggctaacatggaagaagacgctaggtccgctggcgttgccacatttgtactgcaggaggagtttgatcgctacagcggctactggtggtgcccaaaagccgaaacaactccgtccgggggaaaaattctccgcattctttacgaggagaacgacgaaagcgaagttgaaataatacacgtgacttcacctatgctggagaccagacgggcagattctttcaggtaccctaaaaccgggactgctaatcccaaagtgacttttaagatgagcgagattatgatcgacgcggagggacgtatcatagacgtgatcgacaaggagctgattcagccatttgaaattctctttgaaggagtcgagtatattgccagggccggatggacccctgaaggaaagtatgcctggtctattctgctcgatcggagccagacacgtctgcaaattgttctgatctcaccagaactgttcattcccgtggaagatgatgtaatggagagacagagattaattgaaagcgttccagattcagtcaccccactcataatttacgaggagacaacggacatctggatcaatatccacgatatctttcatgtgtttccccagagccacgaagaggaaattgaattcatcttcgctagcgaatgtaaaacagggttcaggcatctttataagatcacctccattctgaaggaaagcaaatacaaacgctcctctggcggattgccagcaccatctgatttcaaatgccctattaaagaggaaattgccattacctcaggggagtgggaggtcttgggccgacacggatctaacattcaggttgatgaggttcgaaggttagtttactttgaggggacaaaggatagtcccttagagcaccatctttatgtcgtctcctacgttaacccgggtgaagtgaccaggctgaccgatcggggatacagccatagctgttgcatctcccaacactgcgacttcttcatcagcaagtatagcaaccagaagaaccctcactgcgttagcctgtataagctctcctcgccggaagacgatccgacctgtaaaaccaaggagttttgggccacaattttagacagcgcaggcccactgccagattacacaccacccgagatttttagtttcgaatccacaacagggtttacgctctatggcatgttgtacaagcctcatgacctgcagcctgggaagaaatatcccacggtactgttcatttacggtggacctcaagtgcaactggtgaacaaccggttcaagggagtaaaatattttcggctcaacacgttagccagcctcggatatgtggtcgtggtgatagataacaggggcagctgccaccgaggtctgaaattcgagggtgcatttaaatacaaaatggtagcaatcgccggagctcctgtgacattgtggatcttctatgatacaggctacacagagcggtacatgggacatccagaccaaaatgagcaggggtactacctgggatcagttgcaatgcaggctgagaagttcccttccgagccaaaccgtctgcttctacttcatggcttcctcgatgagaatgtacactttgcacacacctccatcctactcagcttcctggtcagagcgggaaaaccctatgatctgcaaatctatccccaggaacgccatagtataagagtcccggagtcaggagagcattacgagcttcacctcctccactatttacaggaaaacctgggctcccgcatcgcagctttgaaggtcatctag

SEQ ID NO: 258777 - DNA, 2544 bp, Artificial Sequence
  derived and/or modified sequence
atgtggaagagaagcgagcagatgaagatcaagagcggcaagtgcaacatggccgccgccatggagaccgagcagctgggcgtggagatcttcgagaccgccgactgcgaggagaacatcgagagccaggacagacccaagctggagcccttctacgtggagagatacagctggagccagctgaagaagctgctggccgacaccagaaagtaccacggctacatgatggccaaggccccccacgacttcatgttcgtgaagagaaacgaccccgacggcccccacagcgacagaatctactacctggccatgagcggcgagaacagagagaacaccctgttctacagcgagatccccaagaccatcaacagagccgccgtgctgatgctgagctggaagcccctgctggacctgttccaggccaccctggactacggcatgtacagcagagaggaggagctgctgagagagagaaagagaatcggcaccgtgggcatcgccagctacgactaccaccagggcagcggcaccttcctgttccaggccggcagcggcatctaccacgtgaaggacggcggcccccagggcttcacccagcagcccctgagacccaacctggtggagaccagctgccccaacatcagaatggaccccaagctgtgccccgccgaccccgactggatcgccttcatccacagcaacgacatctggatcagcaacatcgtgaccagagaggagagaagactgacctacgtgcacaacgagctggccaacatggaggaggacgccagaagcgccggcgtggccaccttcgtgctgcaggaggagttcgacagatacagcggctactggtggtgccccaaggccgagaccacccccagcggcggcaagatcctgagaatcctgtacgaggagaacgacgagagcgaggtggagatcatccacgtgaccagccccatgctggagaccagaagagccgacagcttcagataccccaagaccggcaccgccaaccccaaggtgaccttcaagatgagcgagatcatgatcgacgccgagggcagaatcatcgacgtgatcgacaaggagctgatccagcccttcgagatcctgttcgagggcgtggagtacatcgccagagccggctggacccccgagggcaagtacgcctggagcatcctgctggacagaagccagaccagactgcagatcgtgctgatcagccccgagctgttcatccccgtggaggacgacgtgatggagagacagagactgatcgagagcgtgcccgacagcgtgacccccctgatcatctacgaggagaccaccgacatctggatcaacatccacgacatcttccacgtgttcccccagagccacgaggaggagatcgagttcatcttcgccagcgagtgcaagaccggcttcagacacctgtacaagatcaccagcatcctgaaggagagcaagtacaagagaagcagcggcggcctgcccgcccccagcgacttcaagtgccccatcaaggaggagatcgccatcaccagcggcgagtgggaggtgctgggcagacacggcagcaacatccaggtggacgaggtgagaagactggtgtacttcgagggcaccaaggacagccccctggagcaccacctgtacgtggtgagctacgtgaaccccggcgaggtgaccagactgaccgacagaggctacagccacagctgctgcatcagccagcactgcgacttcttcatcagcaagtacagcaaccagaagaacccccactgcgtgagcctgtacaagctgagcagccccgaggacgaccccacctgcaagaccaaggagttctgggccaccatcctggacagcgccggccccctgcccgactacaccccccccgagatcttcagcttcgagagcaccaccggcttcaccctgtacggcatgctgtacaagccccacgacctgcagcccggcaagaagtaccccaccgtgctgttcatctacggcggcccccaggtgcagctggtgaacaacagattcaagggcgtgaagtacttcagactgaacaccctggccagcctgggctacgtggtggtggtgatcgacaacagaggcagctgccacagaggcctgaagttcgagggcgccttcaagtacaagatggtggccatcgccggcgcccccgtgaccctgtggatcttctacgacaccggctacaccgagagatacatgggccaccccgaccagaacgagcagggctactacctgggcagcgtggccatgcaggccgagaagttccccagcgagcccaacagactgctgctgctgcacggcttcctggacgagaacgtgcacttcgcccacaccagcatcctgctgagcttcctggtgagagccggcaagccctacgacctgcagatctacccccaggagagacacagcatcagagtgcccgagagcggcgagcactacgagctgcacctgctgcactacctgcaggagaacctgggcagcagaatcgccgccctgaaggtgatctag

SEQ ID NO: 258778 - DNA, 3125 bp, Artificial Sequence
  derived and/or modified sequence
ggatcgcaacgaaccggaagtgctaaagcctccgaggccaaggccgctgctactgccgccgctgcttcttagtgccgcgttcgccgcctgggttgtcaccggcgccgccgccgaggaagccactgcaaccaggaccggagtggaggcggcgcagcatgaagcggcgcaggcccgctccatagcgcacgtcgggacggtccgggcggggccggggggaaggctttgatggtgaggaaaggaaagattcctgtgagaagagcaggatgagcagagggattctatgcttgaagtcgagtcacttgaaaaagatctctttgaatgtggaagagatctgagcagatgaaaataaaatcaggaaaatgcaacatggcagcagcaatggaaacagaacagctgggtgttgagatatttgaaactgcggactgtgaggagaatattgaatcacaggatcggcctaaattggagcctttttatgttgagcggtattcctggagtcagcttaaaaagctgcttgccgataccagaaaatatcatggctacatgatggctaaggcaccacatgatttcatgtttgtgaagaggaatgatccagatggacctcattcagacagaatctattaccttgccatgtctggtgagaacagagaaaatacactgttttattctgaaattcccaaaactatcaatagagcagcagtcttaatgctctcttggaagcctcttttggatctttttcaggcaacactggactatggaatgtattctcgagaagaagaactattaagagaaagaaaacgcattggaacagtcggaattgcttcttacgattatcaccaaggaagtggaacatttctgtttcaagccggtagtggaatttatcacgtaaaagatggagggccacaaggatttacgcaacaacctttaaggcccaatctagtggaaactagttgtcccaacatacggatggatccaaaattatgccctgctgatccagactggattgcttttatacatagcaacgatatttggatatctaacatcgtaaccagagaagaaaggagactcacttatgtgcacaatgagctagccaacatggaagaagatgccagatcagctggagtcgctacctttgttctccaagaagaatttgatagatattctggctattggtggtgtccaaaagctgaaacaactcccagtggtggtaaaattcttagaattctatatgaagaaaatgatgaatctgaggtggaaattattcatgttacatcccctatgttggaaacaaggagggcagattcattccgttatcctaaaacaggtacagcaaatcctaaagtcacttttaagatgtcagaaataatgattgatgctgaaggaaggatcatagatgtcatagataaggaactaattcaaccttttgagattctatttgaaggagttgaatatattgccagagctggatggactcctgagggaaaatatgcttggtccatcctactagatcgctcccagactcgcctacagatagtgttgatctcacctgaattatttatcccagtagaagatgatgttatggaaaggcagagactcattgagtcagtgcctgattctgtgacgccactaattatctatgaagaaacaacagacatctggataaatatccatgacatctttcatgtttttccccaaagtcacgaagaggaaattgagtttatttttgcctctgaatgcaaaacaggtttccgtcatttatacaaaattacatctattttaaaggaaagcaaatataaacgatccagtggtgggctgcctgctccaagtgatttcaagtgtcctatcaaagaggagatagcaattaccagtggtgaatgggaagttcttggccggcatggatctaatatccaagttgatgaagtcagaaggctggtatattttgaaggcaccaaagactcccctttagagcatcacctgtacgtagtcagttacgtaaatcctggagaggtgacaaggctgactgaccgtggctactcacattcttgctgcatcagtcagcactgtgacttctttataagtaagtatagtaaccagaagaatccacactgtgtgtccctttacaagctatcaagtcctgaagatgacccaacttgcaaaacaaaggaattttgggccaccattttggattcagcaggtcctcttcctgactatactcctccagaaattttctcttttgaaagtactactggatttacattgtatgggatgctctacaagcctcatgatctacagcctggaaagaaatatcctactgtgctgttcatatatggtggtcctcaggtgcagttggtgaataatcggtttaaaggagtcaagtatttccgcttgaataccctagcctctctaggttatgtggttgtagtgatagacaacaggggatcctgtcaccgagggcttaaatttgaaggcgcctttaaatataaaatggttgctattgctggggccccagtcactctgtggatcttctatgatacaggatacacggaacgttatatgggtcaccctgaccagaatgaacagggctattacttaggatctgtggccatgcaagcagaaaagttcccctctgaaccaaatcgtttactgctcttacatggtttcctggatgagaatgtccattttgcacataccagtatattactgagttttttagtgagggctggaaagccatatgatttacagatctatcctcaggagagacacagcataagagttcctgaatcgggagaacattatgaactgcatcttttgcactaccttcaagaaaaccttggatcacgtattgctgctctaaaagtgatataattttgacctgtgtagaactctctggtatacactggctatttaaccaaatgaggaggtttaatcaacagaaaacacagaattgatcatcacattttgatacctgccatgtaacatctactcctgaaaataaatgtggtgccatgcaggggtctacggtttgtggtagtaatctaataccttaaccccacatgctcaaaatcaaatgatacatattcctgagagacccagcaataccataagaattactaaaaaaaaaaaaaaaa

SEQ ID NO: 258779 - protein, 164 aa, Artificial Sequence
  derived and/or modified sequence
MIWRRAALAGTRLVWSRSGSAGWLDRAAGAAGAAAAAASGMESNTSSSLENLATAPVNQIQETISDNCVVIFSKTSCSYCTMAKKLFHDMNVNYKVVELDLLEYGNQFQDALYKMTGERTVPRIFVNGTFIGGATDTHRLHKEGKLLPLVHQCYLKKSKRKEFQ

SEQ ID NO: 258780 - DNA, 495 bp, Artificial Sequence
  derived and/or modified sequence
atgatctggagacgagccgcgttggcaggcaccaggctagtgtggagtcgctctggtagcgcggggtggctcgaccgcgccgctggagctgcaggggcagcagccgcagccgcaagcggcatggagagtaacacatctagttctctggagaacttggctacggcacccgtcaatcagatccaagaaacgatttcagacaactgcgtcgttattttttcaaagacctcttgcagctactgtaccatggccaagaagctgtttcatgatatgaacgttaactacaaggtggtagagctcgacctgctcgagtatggcaatcagtttcaggacgccctgtacaagatgactggcgaaagaaccgttcctcgaatatttgtgaatggaacctttattggtggagctaccgatacccaccgcctccacaaagaggggaaacttctcccactggttcaccagtgctacctcaaaaagtcaaagcgaaaagaattccagtag

SEQ ID NO: 258781 - DNA, 701 bp, Artificial Sequence
  derived and/or modified sequence
gatccgcggtgtccggcagtagagctcgctgcagatccgggctctgaccatgatttggcgccgcgcggcgctggcggggacgcggctggtttggagcaggagcggctcggcaggctggcttgacagggcggcgggagctgcgggagctgcggcagctgcggcctctgggatggagagcaatacatcatcatctttggagaatttagcgacggcgcctgtgaaccagatccaagaaacaatttctgataattgtgtggtgattttctcaaaaacatcctgttcttactgtacaatggcaaaaaagcttttccatgacatgaatgttaactataaagtggtggaactggacctgcttgaatatggaaaccagttccaagatgctctttacaaaatgactggtgaaagaactgttccaagaatatttgtcaatggtacttttattggaggtgcaactgacactcataggcttcacaaagaaggaaaattgctcccactagttcatcagtgttatttaaaaaaaagtaagaggaaagaatttcagtgatgtttatactaataagtttgctagtacagtgtcagttatttaaagtggtaatgcccgataatgtcttttaaatgtttgaggatgttttaaatacatgcattgtcttcacgaagaagatgtaaaaataatgaacaataaattgcggtggaaacctctt

SEQ ID NO: 258782 - DNA, 495 bp, Artificial Sequence
  derived and/or modified sequence
atgatctggaggcgggccgccctggccggcacccggctggtgtggagccgcagcggcagcgctggctggctggacagagctgctggagctgctggagctgctgctgctgctgccagcggcatggagagcaacaccagcagcagcctggagaacctggccacagcccctgtgaaccagatccaggagaccatcagtgacaactgtgtggtgatcttcagcaagaccagctgcagctactgcaccatggccaagaagctgttccatgacatgaatgtgaactacaaggtggtggagctggacctgctggagtatggcaaccagttccaggatgccctgtacaagatgaccggggagaggacagtgccccgcatctttgtgaatggcaccttcatcggcggggccacagacacccaccggctgcacaaggagggcaagctgctgcccctggtgcaccagtgctacctgaagaagagcaagaggaaggagttccagtag

SEQ ID NO: 258783 - DNA, 495 bp, Artificial Sequence
  derived and/or modified sequence
atgatctggcggcgggccgccctggccggcacccggctggtgtggagccgcagcgggtcagctggctggctggatcgggccgctggagcggccggagccgctgccgccgctgcctccgggatggagagtaacacttcctcgagcctggaaaacctcgcaaccgcaccggtgaatcagatccaggagaccattagcgataattgcgtcgtcatattctccaagacatcctgttcctactgtactatggcaaagaaactgtttcacgacatgaacgtcaactacaaagtcgtagaactagacttgctggagtacggtaaccaatttcaggatgcactgtacaagatgaccggcgagcgtactgtgcctaggatcttcgtgaacggcacatttattggcggcgctactgacacccacaggttgcataaggagggaaagctgctgccactggtgcaccaatgttacctcaaaaagtctaagcgcaaggagttccagtag

SEQ ID NO: 258784 - DNA, 495 bp, Artificial Sequence
  derived and/or modified sequence
atgatctggagaagggccgctctggcaggcactcggcttgtgtggagtcgctccggtagcgccggttggctcgaccgagcagctggggcagctggcgctgccgcagcagcagcctccggtatggagtctaacacaagcagctcattggaaaacctcgcaactgcgccagttaaccagatacaggagacaatttcagataactgcgtggtcatcttctccaagactagctgttcttactgcaccatggccaaaaaattgtttcacgatatgaatgtgaactacaaagtggtcgagctggatctcctggaatacggaaatcaattccaggacgctctgtataagatgacgggcgagcgcaccgttccaaggatttttgtcaacggtacattcatcggcggtgcaaccgatactcaccgtctccataaggaaggaaaactcctccccctagttcatcaatgctatctcaaaaagagcaagagaaaggaattccaatag

SEQ ID NO: 258785 - DNA, 495 bp, Artificial Sequence
  derived and/or modified sequence
atgatctggagaagagccgccctggccggcaccagactggtgtggagcagaagcggcagcgccggctggctggacagagccgccggcgccgccggcgccgccgccgccgccgccagcggcatggagagcaacaccagcagcagcctggagaacctggccaccgcccccgtgaaccagatccaggagaccatcagcgacaactgcgtggtgatcttcagcaagaccagctgcagctactgcaccatggccaagaagctgttccacgacatgaacgtgaactacaaggtggtggagctggacctgctggagtacggcaaccagttccaggacgccctgtacaagatgaccggcgagagaaccgtgcccagaatcttcgtgaacggcaccttcatcggcggcgccaccgacacccacagactgcacaaggagggcaagctgctgcccctggtgcaccagtgctacctgaagaagagcaagagaaaggagttccagtag

SEQ ID NO: 258786 - protein, 377 aa, Artificial Sequence
  derived and/or modified sequence
MRANCSSSSACPANSSEEELPVGLEVHGNLELVFTVVSTVMMGLLMFSLGCSVEIRKLWSHIRRPWGIAVGLLCQFGLMPFTAYLLAISFSLKPVQAIAVLIMGCCPGGTISNIFTFWVDGDMDLSISMTTCSTVAALGMMPLCIYLYTWSWSLQQNLTIPYQNIGITLVCLTIPVAFGVYVNYRWPKQSKIILKIGAVVGGVLLLVVAVAGVVLAKGSWNSDITLLTISFIFPLIGHVTGFLLALFTHQSWQRCRTISLETGAQNIQMCITMLQLSFTAEHLVQMLSFPLAYGLFQLIDGFLIVAAYQTYKRRLKNKHGKKNSGCTEVCHTRKSTSSRETNAFLEVNEEGAITPGPPGPMDCHRALEPVGHITSCE

SEQ ID NO: 258787 - DNA, 1134 bp, Artificial Sequence
  derived and/or modified sequence
atgagggctaattgctcaagttcctccgcatgccccgctaacagctcggaggaagaattacccgtcggactggaggtccacggtaacctggaactcgttttcacagtcgtgtcaacagtaatgatgggcctgctgatgttcagtttgggttgcagcgtcgagatcagaaagttatggtctcatattcggagaccctgggggatcgccgtagggctgctgtgtcagttcggcttgatgccatttacagcttatctgttagccatctctttcagccttaagcctgtgcaggccatcgcagttctgatcatgggatgttgtccaggcgggacaatcagtaatatctttaccttctgggtcgacggagacatggacctgtcgatcagcatgaccacctgcagcaccgtagcagcacttggaatgatgcccctgtgcatatatttgtacacctggagctggagcctgcaacagaatcttacaatcccataccaaaacataggcatcacacttgtttgcctgacgattcctgttgcatttggagtatatgtaaattaccggtggccgaaacagtccaaaataatattgaaaatcggcgcagttgtggggggggtactcctcctggttgttgcagtggccggcgtggtcttggcaaaagggagctggaatagtgatattaccctgttgaccatttcatttatcttcccactgatcggtcatgtgacggggtttctgctcgcacttttcacccaccagagctggcagagatgccgaactatttccctggaaacgggagcccaaaatattcagatgtgcatcaccatgctccagctgtcattcactgccgaacacctggtccaaatgttgtcctttcccttggcatacgggcttttccaacttattgacgggtttctgatcgtggccgcataccaaacttacaaacgccgtctcaagaataaacacgggaagaagaactctggttgcaccgaggtttgccatacccgtaaaagcaccagctcaagagagactaacgctttccttgaagtgaacgaagagggagccatcactccaggacccccgggccccatggattgtcaccgcgctttggaacctgtcggacatatcacatcgtgtgaatag

SEQ ID NO: 258788 - DNA, 1134 bp, Artificial Sequence
  derived and/or modified sequence
atgagggccaactgcagcagcagcagcgcctgcccagccaacagcagcgaggaggagctgcctgtgggcctggaggtgcacggcaacctggagctggtgttcaccgtggtgtccacagtgatgatgggcctgctgatgttcagcctgggctgcagcgtggagatcaggaagctgtggagccacatcagaagaccctggggcattgctgtgggcctgctgtgccagtttggcctgatgcccttcaccgcctacctgctggccatctccttcagcctgaagcctgtgcaggccatcgctgtgctgatcatgggctgctgccctgggggcaccatcagcaacatcttcaccttctgggtggatggagacatggacctgagcatctccatgaccacctgcagcacagtggccgccctgggcatgatgcccctgtgcatctacctgtacacctggagctggagcctgcagcagaacctgaccatcccctaccagaacatcggcatcaccctggtgtgcctgaccatccctgtggccttcggcgtgtatgtgaactaccgctggcccaagcagagcaagatcatcctgaagatcggggctgtggtgggcggcgtgctgctgctggtggtggccgtggccggcgtggtgctggccaagggctcctggaacagcgacatcaccctgctgaccatctccttcatcttccccctcatcggccacgtgacaggcttcctgctggccctcttcacccaccagagctggcagcgctgcaggaccatcagcctggagaccggggcccagaacatccagatgtgcatcaccatgctgcagctgtccttcaccgctgagcacctggtgcagatgctgtccttccccctggcctacggcctcttccagctgattgatggcttcctgattgtggccgcctaccagacctacaagaggcggctgaagaacaagcacggcaagaagaacagcggctgcacagaggtgtgccacaccaggaagagcaccagcagccgggagaccaatgccttcctggaggtgaatgaggagggcgccatcaccccaggccccccaggccccatggactgccaccgggccctggagcctgtgggccacatcaccagctgtgagtag

SEQ ID NO: 258789 - DNA, 1134 bp, Artificial Sequence
  derived and/or modified sequence
atgcgggccaactgcagcagcagcagcgcctgccccgccaacagctccgaggaggaactccccgttggactggaggttcatggcaatttggagttggtgttcaccgttgtgagtacggtgatgatggggctgctgatgtttagcctggggtgtagtgtcgagatcaggaagctctggtcccacatccgtagaccatggggcatcgccgtggggctcctttgtcagttcggtttgatgccctttacagcttacctcttagcaatatccttttctttgaagccagtgcaagccatcgcagtgctgataatggggtgttgccctggtggtacaatttcaaacatttttacattctgggttgacggtgatatggacctctcgatctcaatgactacttgttctactgttgccgctctcggcatgatgcccctatgtatttacctttacacctggagctggagcctccaacagaatttgaccattccctaccagaatataggtataacacttgtgtgcctcacaatacccgtggcatttggcgtttatgtcaactatcgctggcccaaacagtcaaagatcatactgaaaattggcgccgtggtcgggggagtacttctgcttgttgtggccgtggcgggagtagtgttggccaagggtagctggaactcagacatcacactgctgactatctcatttatattccctctgatcgggcatgtcacagggttcttactggcattgttcacacaccagagttggcagcggtgtcgcacaatcagtttagagactggagctcaaaatatacagatgtgcatcacgatgctgcagctctcctttactgccgagcacctagtgcaaatgttgagctttccccttgcttatggcttattccagctgatcgatgggttcctcattgtggccgcgtatcagacctacaaacgccggctgaagaacaagcacggaaagaaaaactccggttgcacggaggtttgtcatacacgcaagtctacttcttctcgggagacaaatgcttttctcgaagtgaacgaagaaggagccattacaccaggcccccccggtcctatggactgtcatcgagccctagaacctgtcggtcacatcacatcgtgtgaatag

SEQ ID NO: 258790 - DNA, 1134 bp, Artificial Sequence
  derived and/or modified sequence
atgcgcgctaattgctcctctagctctgcatgtccagcaaattcttccgaggaagagcttcccgtcggtctagaagtccatggaaatctagagctcgtgtttacggtcgtttccactgtaatgatgggccttctcatgttttccctgggctgctctgtcgaaatccgcaaattgtggtcccacatccgtcggccatggggtattgcggtggggctcctgtgtcagttcggattgatgcccttcacagcgtatctgctggccataagctttagtctgaagcccgttcaagccattgccgttctgatcatggggtgttgtcctgggggaacaatatccaatatctttactttctgggttgatggagacatggacttgtcaatttccatgaccacatgctccacagtggctgccctggggatgatgccactctgcatctacctgtacacgtggtcctggtctttgcagcagaacttgaccattccctaccaaaatattggcattacgcttgtgtgtttaacgatccctgtggcttttggagtttacgtgaactacagatggcccaagcagtctaaaattatactgaagattggcgctgttgtgggaggagttcttctgctcgtggtggctgttgcaggcgtggttctcgctaaggggagctggaacagcgatatcacattgctgaccatttcctttatctttcctcttattggacacgttaccggatttctactcgcgttgttcacacaccagtcctggcaacgctgcagaactatctcgctggagacaggagctcaaaatatccagatgtgtatcaccatgttacagctctctttcacagccgagcacctggtgcagatgctttcctttcccctggcttacgggctgtttcagctgatcgacggctttctgattgtagctgcttaccagacatataagaggcggctcaagaataagcacggcaagaaaaattccggatgcacagaagtatgtcacacccgcaagtccacatcatctagggagaccaacgcattcctagaggtgaacgaggaaggggcaatcactcccggaccaccgggacctatggactgccaccgggcattggaaccagtaggccacataacctcttgcgagtag

SEQ ID NO: 258791 - DNA, 1502 bp, Artificial Sequence
  derived and/or modified sequence
ttaggatgaatcaccttgctggccaacagttattggaatgattctccatgtgtgacttcgttgcactattacaaaatgtggcaggatagacctgcccagccattgttgccgatgttcatttgtaatgctgccttaaggagatgaggagatgagagccaattgttccagcagctcagcctgccctgccaacagttcagaggaggagctgccagtgggactggaggtgcatggaaacctggagctcgttttcacagtggtgtccactgtgatgatggggctgctcatgttctctttgggatgttccgtggagatccggaagctgtggtcgcacatcaggagaccctggggcattgctgtgggactgctctgccagtttgggctcatgccttttacagcttatctcctggccattagcttttctctgaagccagtccaagctattgctgttctcatcatgggctgctgcccggggggcaccatctctaacattttcaccttctgggttgatggagatatggatctcagcatcagtatgacaacctgttccaccgtggccgccctgggaatgatgccactctgcatttatctctacacctggtcctggagtcttcagcagaatctcaccattccttatcagaacataggaattacccttgtgtgcctgaccattcctgtggcctttggtgtctatgtgaattacagatggccaaaacaatccaaaatcattctcaagattggggccgttgttggtggggtcctccttctggtggtcgcagttgctggtgtggtcctggcgaaaggatcttggaattcagacatcacccttctgaccatcagtttcatctttcctttgattggccatgtcacgggttttctgctggcactttttacccaccagtcttggcaaaggtgcaggacaatttccttagaaactggagctcagaatattcagatgtgcatcaccatgctccagttatctttcactgctgagcacttggtccagatgttgagtttcccactggcctatggactcttccagctgatagatggatttcttattgttgcagcatatcagacgtacaagaggagattgaagaacaaacatggaaaaaagaactcaggttgcacagaagtctgccatacgaggaaatcgacttcttccagagagaccaatgccttcttggaggtgaatgaagaaggtgccatcactcctgggccaccagggccaatggattgccacagggctctcgagccagttggccacatcacttcatgtgaatagcagggactagctggctggactggcccccttctttttcagtggccagtaaagacagtgtgcagctgacacatgaatcttgttggtagggccagtgtgaatatttaagtgttcaatgttagaatatttatattttcatgtggattgtgaattgtgatgggatcacttttggagattcccatttcagggagtttcttctgggggttaacataacgtatcaatg

SEQ ID NO: 258792 - DNA, 1134 bp, Artificial Sequence
  derived and/or modified sequence
atgagagccaactgcagcagcagcagcgcctgccccgccaacagcagcgaggaggagctgcccgtgggcctggaggtgcacggcaacctggagctggtgttcaccgtggtgagcaccgtgatgatgggcctgctgatgttcagcctgggctgcagcgtggagatcagaaagctgtggagccacatcagaagaccctggggcatcgccgtgggcctgctgtgccagttcggcctgatgcccttcaccgcctacctgctggccatcagcttcagcctgaagcccgtgcaggccatcgccgtgctgatcatgggctgctgccccggcggcaccatcagcaacatcttcaccttctgggtggacggcgacatggacctgagcatcagcatgaccacctgcagcaccgtggccgccctgggcatgatgcccctgtgcatctacctgtacacctggagctggagcctgcagcagaacctgaccatcccctaccagaacatcggcatcaccctggtgtgcctgaccatccccgtggccttcggcgtgtacgtgaactacagatggcccaagcagagcaagatcatcctgaagatcggcgccgtggtgggcggcgtgctgctgctggtggtggccgtggccggcgtggtgctggccaagggcagctggaacagcgacatcaccctgctgaccatcagcttcatcttccccctgatcggccacgtgaccggcttcctgctggccctgttcacccaccagagctggcagagatgcagaaccatcagcctggagaccggcgcccagaacatccagatgtgcatcaccatgctgcagctgagcttcaccgccgagcacctggtgcagatgctgagcttccccctggcctacggcctgttccagctgatcgacggcttcctgatcgtggccgcctaccagacctacaagagaagactgaagaacaagcacggcaagaagaacagcggctgcaccgaggtgtgccacaccagaaagagcaccagcagcagagagaccaacgccttcctggaggtgaacgaggagggcgccatcacccccggcccccccggccccatggactgccacagagccctggagcccgtgggccacatcaccagctgcgagtag

SEQ ID NO: 258793 - protein, 241 aa, Artificial Sequence
  derived and/or modified sequence
MCSGAGVMMARWAARGRAGWRSTVRILSPLGHCEPGVSRSCRAAQAMDCEVNNGSSLRDECITNLLVFGFLQSCSDNSFRRELDALGHELPVLAPQWEGYDELQTDGNRSSHSRLGRIEADSESQEDIIRNIARHLAQVGDSMDRSIPPGLVNGLALQLRNTSRSEEDRNRDLATALEQLLQAYPRDMEKEKTMLVLALLLAKKVASHTPSLLRDVFHTTVNFINQNLRTYVRSLARNGMD

SEQ ID NO: 258794 - protein, 99 aa, Artificial Sequence
  derived and/or modified sequence
MDRSIPPGLVNGLALQLRNTSRSEEDRNRDLATALEQLLQAYPRDMEKEKTMLVLALLLAKKVASHTPSLLRDVFHTTVNFINQNLRTYVRSLARNGMD

SEQ ID NO: 258795 - protein, 171 aa, Artificial Sequence
  derived and/or modified sequence
LQSCSDNSFRRELDALGHELPVLAPQWEGYDELQTDGNRSSHSRLGRIEADSESQEDIIRNIARHLAQVGDSMDRSIPPGLVNGLALQLRNTSRSEEDRNRDLATALEQLLQAYPRDMEKEKTMLVLALLLAKKVASHTPSLLRDVFHTTVNFINQNLRTYVRSLARNGMD

SEQ ID NO: 258796 - protein, 136 aa, Artificial Sequence
  derived and/or modified sequence
DGNRSSHSRLGRIEADSESQEDIIRNIARHLAQVGDSMDRSIPPGLVNGLALQLRNTSRSEEDRNRDLATALEQLLQAYPRDMEKEKTMLVLALLLAKKVASHTPSLLRDVFHTTVNFINQNLRTYVRSLARNGMD

SEQ ID NO: 258797 - DNA, 726 bp, Artificial Sequence
  derived and/or modified sequence
atgtgcagcggggccggtgtgatgatggcccgctgggcggctaggggtcgagccggatggcgatctacagtgcggatcctaagccccctgggtcactgcgagccaggagtttcgaggtcctgcagagccgcccaggccatggattgcgaggtgaacaatggatcgtcactccgcgacgaatgcataaccaatctgcttgtctttgggtttctgcagagttgttctgacaacagctttcgaagggaattggatgccctagggcacgaactgccagtgttggccccgcagtgggaaggctacgatgaacttcaaacagacggaaatcggtcctcccacagcaggctcggacgaatagaagctgattccgagtcccaagaggacatcatccggaacatcgctcgtcacctggctcaggtcggtgactcaatggatagatccatccccccgggactggttaacggtttggcccttcagctgaggaataccagccggagtgaggaagacaggaaccgcgacctggccacagctctagagcagctcctccaggcctatccgcgagacatggagaaagagaagaccatgctagtccttgcactgctgcttgctaagaaagtggcatcacatacgccgtcattgctgagagatgtctttcacaccactgttaatttcatcaatcagaacctccggacctatgtgagatcccttgctcggaatggtatggactag

SEQ ID NO: 258798 - DNA, 726 bp, Artificial Sequence
  derived and/or modified sequence
atgtgcagcggggccggcgtgatgatggcccgctgggccgcccggggccgggccggctggaggagcacagtgcgcatcctgagccccctgggccactgtgagcccggggtgagccgcagctgcagagctgcccaggccatggactgtgaggtgaacaacggcagcagcctgagagatgagtgcatcaccaacctgctggtgtttggcttcctgcagagctgcagcgacaacagcttccggcgggagctggatgccctgggccacgagctgcctgtgctggccccccagtgggagggctatgatgagctgcagacagatggcaacagaagcagccacagccggctgggccgcatcgaggccgacagcgagagccaggaggacatcatccggaacatcgcccggcacctggcccaggtgggggacagcatggacaggagcatccccccaggcctggtgaatggcctggccctgcagctgaggaacaccagccgctcagaagaagatagaaacagagacctggccacagccctggagcagctgctgcaggcctacccccgggacatggagaaggagaagaccatgctggtgctggccctgctgctggccaagaaggtggccagccacacccccagcctgctgagagatgtgttccacaccaccgtgaacttcatcaaccagaacctgcggacctacgtgcgcagcctggccagaaatggcatggactag

SEQ ID NO: 258799 - DNA, 726 bp, Artificial Sequence
  derived and/or modified sequence
atgtgcagcggcgccggcgtgatgatggcccggtgggccgcccgggggcgcgccggttggagatcaactgttagaatcctgagtcccctgggccattgcgagcccggtgtgagccgttcctgccgtgccgcccaggctatggactgcgaggtcaataacggatccagcttaagagatgagtgtattacaaacctcctggtctttggcttcctccagtcgtgttcagacaattcatttcgacgcgaacttgatgcgttaggccacgagcttcccgtccttgcgccacaatgggagggatatgatgagctgcagacagatggaaatagatcttctcattcccggcttggaaggatcgaggcagactctgagtcgcaggaagatatcataagaaacattgccagacatctggctcaagtaggtgattctatggatagatcaattcctcccggtctggtcaatggcctggccctgcagcttcgtaacacctccagaagcgaggaggataggaatcgtgatctcgccacagcattagaacagctcctccaggcctacccacgggacatggaaaaggagaagaccatgcttgtccttgctctgctgctggccaagaaggtcgccagccacaccccgtcattgttaagagatgtgtttcataccacagtgaactttatcaaccaaaatcttagaacttatgtcaggtctctggccagaaacgggatggattag

SEQ ID NO: 258800 - DNA, 726 bp, Artificial Sequence
  derived and/or modified sequence
atgtgctcaggcgctggggtaatgatggcaagatgggccgcacggggacgggcaggttggcgttcgactgtcaggatcctcagtccactcggccactgcgaaccaggcgttagtaggtcttgtcgagccgctcaggccatggattgcgaggtgaacaacgggtcaagcctcagagatgagtgcattaccaaccttctcgtgttcggctttctccagagttgcagtgataatagtttccggagagaactggatgctctgggtcacgaattgcccgtgttggctccccaatgggaagggtatgatgagctgcagaccgatggcaaccgatcctcccattcgaggctaggaaggatcgaagctgacagcgagtcccaggaagatattattagaaacattgccaggcacctagcccaggtgggtgacagtatggacagatccattcctccaggattggtaaacggactggcccttcagctccggaacacctctaggtctgaagaagatcggaaccgggatttggcaaccgctctcgaacaactgctgcaggcgtacccgagagatatggaaaaggagaagaccatgctggtgctggcccttctgctggccaaaaaggtggcaagccacaccccgtctttgctacgtgacgtgttccacaccacagtgaattttattaaccagaacctgcgaacatatgtcagatcccttgcccgtaacggcatggactag

SEQ ID NO: 258801 - DNA, 2493 bp, Artificial Sequence
  derived and/or modified sequence
gagaaaacccgcgggcctggccgggtgcaggccacccttgccggcggatcggaatccccgcccacaccgtggtctttccagcaccgcagacacctgccggctcctcccgagcggagctcagggctgacaaagcgcggtcagagcggccgcttactggggctcgcccgctccttagagcactggcaatgatgtgcggatcctcgctgctgctgctgggaaactgttgagtggctgaatgaccccaggggaccctgggagagctctgaagccctcagccaccaagtggctgggctggcaagggttcattcattcattcaacaaatacgaatgtgcagcggtgctggggtcatgatggctcggtgggcagcgaggggccgggccggctggaggagcacagtgcggattctgtcgccactgggacactgtgaaccaggagtgagtcggagctgccgcgctgcccaggccatggactgtgaggtcaacaacggttccagcctcagggatgagtgcatcacaaacctactggtgtttggcttcctccaaagctgttctgacaacagcttccgcagagagctggacgcactgggccacgagctgccagtgctggctccccagtgggagggctacgatgagctgcagactgatggcaaccgcagcagccactcccgcttgggaagaatagaggcagattctgaaagtcaagaagacatcatccggaatattgccaggcacctcgcccaggtcggggacagcatggaccgtagcatccctccgggcctggtgaacggcctggccctgcagctcaggaacaccagccggtcggaggaggaccggaacagggacctggccactgccctggagcagctgctgcaggcctaccctagagacatggagaaggagaagaccatgctggtgctggccctgctgctggccaagaaggtggccagtcacacgccgtccttgctccgtgatgtctttcacacaacagtgaattttattaaccagaacctacgcacctacgtgaggagcttagccagaaatgggatggactgaacggacagttccagaagtgtgactggctaaagctcgatgtggtcacagctgtatagctgcttccagtgtagacggagccctggcatgtcaacagcgttcctagagaagacaggctggaagatagctgtgacttctattttaaagacaatgttaaacttataacccactttaaaatatctacattaatatacttgaatgaaaatgtccatttacacgtatttgaatggccttcatatcatccacacatgaatctgcacatctgtaaatctacacacggtgcctttatttccactgtgcaggttcccacttaaaaattaaattggaaagcaggtttcaaggaagtagaaacaaaatacaatttttttggtaaaaaaaaattactgtttattaaagtacaaccatagaggatggtcttacagcaggcagtatcctgtttgaggaaagcaagaatcagagaaggaacataccccttacaaatgaaaaattccactcaaaatagggactatctatcttaatactaaggaaccaacaatcttcctgtttaaaaaaccacatggcacagagattctgaactaaagtgctgcactcaaatgatgggaagtccggccccagtacacaggggcttgactttttcaacttcgtttcctttgttggagtcaaaaagaaccacttgtggttctaaaaggtgtgaaggtgatttaagggcccaggtcagccactgtttgtttacaaaatcaggtaactaactgcatacactttttctctttccatgacatcaagactttgctaaagacatgaagccacgggtgccagaagctactgcgatgccccgggagttagccccctggtaatagctgtaaacttccaatttctagccatacgctcagctcatccatgcctcagaagtgcatctggagagaacaggtttctaagcataaaagatgaaagagcagttggactttttaaaaattcagcaaagtggttccctctcttagggacagtcaaaaccaagtcacttaggtagtaccaaaataaataaggaaaagcttagctttagaaacagtgcaacactggtctgctgttccagtggtaagctatgtcccaggaatcagtttaaaagcacgacagtggatgctgggtccatatcacacacattgctgtgaacaggaaactcctgtgaccacaacatgaggccactggagacgcatatgagtaagggcactgacggactcatgatttcttcttaccagatgctttcctgttctttaagagtttaaaatcatcagaaaggaaaaacaaactctatattgttcagcatgcaatacataccacgctagggctggctcaattgaaagtgggcaaaagcttacaaatactaaaaagaagtgctgccgcgcagtgtggaggccactgtttggaaataaatcttcctaacactac

SEQ ID NO: 258802 - DNA, 854 bp, Artificial Sequence
  derived and/or modified sequence
ggacgcgcccgcgcccccgcggctggagggtggtcgccactgggacactgtgaaccaggagtgagtcggagctgccgcgctgcccaggccatggactgtgaggtcaacaacggttccagcctcagggatgagtgcatcacaaacctactggtgtttggcttcctccaaagctgttctgacaacagcttccgcagagagctggacgcactgggccacgagctgccagtgctggctccccagtgggagggctacgatgagctgcagactgatggcaaccgcagcagccactcccgcttgggaagaatagaggcaggggcgtcagacaataacacagcaagtgctgaggaagaaacggaggcggcagggagcgtggcagttgagcgtggccttcatggagctgcgacagtgattctgaaagtcaagaagacatcatccggaatattgccaggcacctcgcccaggtcggggacagcatggaccgtagcatccctccgggcctggtgaacggcctggccctgcagctcaggaacaccagccggtcggaggaggaccggaacagggacctggccactgccctggagcagctgctgcaggcctaccctagagacatggagaaggagaagaccatgctggtgctggccctgctgctggccaagaaggtggccagtcacacgccgtccttgctccgtgatgtctttcacacaacagtgaattttattaaccagaacctacgcacctacgtgaggagcttagccagaaatgggatggactgaacggacagttccagaagtgtgactggctaaagctcgatgtggtcacagctgtatagctgcttccagtgtagacggagccct

SEQ ID NO: 258803 - DNA, 2167 bp, Artificial Sequence
  derived and/or modified sequence
ggaggaagcgcgcggggcgccataaggaggaagcgggtagtcgaccgtgtccgcgcgcctgggagacgctgcctcggcccggacgcgcccgcgcccccgcggctggagggtggtcgccactgggacactgtgaaccaggagtgagtcggagctgccgcgctgcccaggccatggactgtgaggtcaacaacggttccagcctcagggatgagtgcatcacaaacctactggtgtttggcttcctccaaagctgttctgacaacagcttccgcagagagctggacgcactgggccacgagctgccagtgctggctccccagtgggagggctacgatgagctgcagactgatggcaaccgcagcagccactcccgcttgggaagaatagaggcagattctgaaagtcaagaagacatcatccggaatattgccaggcacctcgcccaggtcggggacagcatggaccgtagcatccctccgggcctggtgaacggcctggccctgcagctcaggaacaccagccggtcggaggaggaccggaacagggacctggccactgccctggagcagctgctgcaggcctaccctagagacatggagaaggagaagaccatgctggtgctggccctgctgctggccaagaaggtggccagtcacacgccgtccttgctccgtgatgtctttcacacaacagtgaattttattaaccagaacctacgcacctacgtgaggagcttagccagaaatgggatggactgaacggacagttccagaagtgtgactggctaaagctcgatgtggtcacagctgtatagctgcttccagtgtagacggagccctggcatgtcaacagcgttcctagagaagacaggctggaagatagctgtgacttctattttaaagacaatgttaaacttataacccactttaaaatatctacattaatatacttgaatgaaaatgtccatttacacgtatttgaatggccttcatatcatccacacatgaatctgcacatctgtaaatctacacacggtgcctttatttccactgtgcaggttcccacttaaaaattaaattggaaagcaggtttcaaggaagtagaaacaaaatacaatttttttggtaaaaaaaaattactgtttattaaagtacaaccatagaggatggtcttacagcaggcagtatcctgtttgaggaaagcaagaatcagagaaggaacataccccttacaaatgaaaaattccactcaaaatagggactatctatcttaatactaaggaaccaacaatcttcctgtttaaaaaaccacatggcacagagattctgaactaaagtgctgcactcaaatgatgggaagtccggccccagtacacaggggcttgactttttcaacttcgtttcctttgttggagtcaaaaagaaccacttgtggttctaaaaggtgtgaaggtgatttaagggcccaggtcagccactgtttgtttacaaaatcaggtaactaactgcatacactttttctctttccatgacatcaagactttgctaaagacatgaagccacgggtgccagaagctactgcgatgccccgggagttagccccctggtaatagctgtaaacttccaatttctagccatacgctcagctcatccatgcctcagaagtgcatctggagagaacaggtttctaagcataaaagatgaaagagcagttggactttttaaaaattcagcaaagtggttccctctcttagggacagtcaaaaccaagtcacttaggtagtaccaaaataaataaggaaaagcttagctttagaaacagtgcaacactggtctgctgttccagtggtaagctatgtcccaggaatcagtttaaaagcacgacagtggatgctgggtccatatcacacacattgctgtgaacaggaaactcctgtgaccacaacatgaggccactggagacgcatatgagtaagggcactgacggactcatgatttcttcttaccagatgctttcctgttctttaagagtttaaaatcatcagaaaggaaaaacaaactctatattgttcagcatgcaatacataccacgctagggctggctcaattgaaagtgggcaaaagcttacaaatactaaaaagaagtgctgccgcgcagtgtggaggcc

SEQ ID NO: 258804 - DNA, 700 bp, Artificial Sequence
  derived and/or modified sequence
cactgtctgaaacagtcgcgtaaggggtcgccactgggacactgtgaaccaggagtgagtcggagctgccgcgctgcccaggccatggactgtgaggtcaacaacggttccagcctcagggatgagtgcatcacaaacctactggtgtttggcttcctccaaagctgttctgacaacagcttccgcagagagctggacgcactgggccacgagctgccagtgctggctccccagtgggagggctacgatgagctgcagactgatggcaaccgcagcagccactcccgcttgggaagaatagaggcagattctgaaagtcaagaagacatcatccggaatattgccaggcacctcgcccaggtcggggacagcatggaccgtagcatccctccgggcctggtgaacggcctggccctgcagctcaggaacaccagccggtcggaggaggaccggaacagggacctggccactgccctggagcagctgctgcaggcctaccctagagacatggagaaggagaagaccatgctggtgctggccctgctgctggccaagaaggtggccagtcacacgccgtccttgctccgtgatgtctttcacacaacagtgaattttattaaccagaacctacgcacctacgtgaggagcttagccagaaatgggatggactgaacggacagttccagaagtgtgactggct

SEQ ID NO: 258805 - DNA, 726 bp, Artificial Sequence
  derived and/or modified sequence
atgtgcagcggcgccggcgtgatgatggccagatgggccgccagaggcagagccggctggagaagcaccgtgagaatcctgagccccctgggccactgcgagcccggcgtgagcagaagctgcagagccgcccaggccatggactgcgaggtgaacaacggcagcagcctgagagacgagtgcatcaccaacctgctggtgttcggcttcctgcagagctgcagcgacaacagcttcagaagagagctggacgccctgggccacgagctgcccgtgctggccccccagtgggagggctacgacgagctgcagaccgacggcaacagaagcagccacagcagactgggcagaatcgaggccgacagcgagagccaggaggacatcatcagaaacatcgccagacacctggcccaggtgggcgacagcatggacagaagcatcccccccggcctggtgaacggcctggccctgcagctgagaaacaccagcagaagcgaggaggacagaaacagagacctggccaccgccctggagcagctgctgcaggcctaccccagagacatggagaaggagaagaccatgctggtgctggccctgctgctggccaagaaggtggccagccacacccccagcctgctgagagacgtgttccacaccaccgtgaacttcatcaaccagaacctgagaacctacgtgagaagcctggccagaaacggcatggactag

SEQ ID NO: 258806 - protein, 295 aa, Artificial Sequence
  derived and/or modified sequence
METESGPQTSNQMQTDSLSPSPNPVSPVPLNNPTSAPRYGTVIPNRIFVGGIDFKTNESDLRKFFSQYGSVKEVKIVNDRAGVSKGYGFVTFETQEDAQKILQEAEKLNYKDKKLNIGPAIRKQQVGIPRSSIMPAAGTMYLTTSTGYPYTYHNGVAYFHTPEVTSVPPPWPSRSVCSSPVMVAQPIYQQPAYHYQATTQYLPGQWQWSVPQPSASSAPFLYLQPSEVIYQPVEIAQDGGCVPPPLSLMETSVPEPYSDHGVQATYHQVYAPSAITMPAPVMQPEPIKTVWSIHY

SEQ ID NO: 258807 - protein, 283 aa, Artificial Sequence
  derived and/or modified sequence
MQTDSLSPSPNPVSPVPLNNPTSAPRYGTVIPNRIFVGGIDFKTNESDLRKFFSQYGSVKEVKIVNDRAGVSKGYGFVTFETQEDAQKILQEAEKLNYKDKKLNIGPAIRKQQVGIPRSSIMPAAGTMYLTTSTGYPYTYHNGVAYFHTPEVTSVPPPWPSRSVCSSPVMVAQPIYQQPAYHYQATTQYLPGQWQWSVPQPSASSAPFLYLQPSEVIYQPVEIAQDGGCVPPPLSLMETSVPEPYSDHGVQATYHQVYAPSAITMPAPVMQPEPIKTVWSIHY

SEQ ID NO: 258808 - DNA, 888 bp, Artificial Sequence
  derived and/or modified sequence
atggagaccgaatctggaccacagacgtcaaaccagatgcagacagactcgctaagcccctcgccaaatccagtctcacccgttccgctgaacaacccaacaagtgcgcccagatatgggaccgtgatcccaaatcgcatcttcgtgggcggcatcgactttaagaccaatgaaagtgatctgcgcaaatttttcagccagtatggtagtgtgaaagaggtcaagattgttaacgacagagccggagtaagcaaaggctatggcttcgtaactttcgaaacacaagaggacgcacagaagattctgcaagaggcagaaaagctaaactacaaggataaaaagctcaatattggcccagctatcagaaaacaacaggttggcatccctcgatctagcatcatgcctgcagccgggacaatgtacctcaccacatctacaggatacccatacacttatcacaatggggtggcctacttccacacacctgaggtgacatccgttccacccccctggcccagccggagcgtgtgttcatctcctgttatggtggctcagcccatttaccaacagccagcgtatcattaccaagctacaacacagtacctgcccggacagtggcaatggagtgtgcctcaaccatcggcaagttctgccccgttcctctatctgcaaccaagtgaggtaatctatcagcccgtagagattgcccaagatggcgggtgcgtacccccacctctgtccttgatggaaacaagcgtgccagagccatactcagatcacggcgtccaggctacataccatcaagtgtacgcccccagcgccatcaccatgcctgcaccagtgatgcagcccgagcccatcaagaccgtatggtctatccactattag

SEQ ID NO: 258809 - DNA, 888 bp, Artificial Sequence
  derived and/or modified sequence
atggagacagaaagtggcccccagaccagcaaccagatgcagacagacagcctgagccccagccccaaccctgtgtcccctgtgcccctgaacaaccccaccagcgcccccaggtatggaacagtcatccccaaccgcatctttgtgggcggcatcgacttcaagaccaatgaaagtgacctgaggaagttcttcagccagtatggctctgtgaaggaggtgaagatcgtgaatgacagagctggggtgtccaagggctacggctttgtgacctttgagacccaggaggatgcccagaagatcctgcaggaggccgagaagctgaactacaaggacaagaagctgaacatcggccctgccatcaggaagcagcaggtgggcatccccaggagcagcatcatgcctgctgctggcaccatgtacctgaccaccagcacaggctacccctacacctaccacaacggggtggcctacttccacaccccagaggtgacctctgtgcccccaccctggcccagccgctctgtgtgcagcagccctgtgatggtggcccagcccatctaccagcagcctgcctaccactaccaggccaccacccagtacctgcccggccagtggcagtggagcgtgccccagcccagcgccagcagcgcccccttcctgtacctgcagcccagcgaggtgatctaccagcctgtggagatcgcccaggacggcggctgtgtgcccccacccctgagcctgatggagacctctgtgcctgagccctacagcgaccacggcgtgcaggccacctaccaccaggtgtatgcccccagcgccatcaccatgcctgcccctgtgatgcagcctgagcccatcaagacagtgtggagcatccactactag

SEQ ID NO: 258810 - DNA, 888 bp, Artificial Sequence
  derived and/or modified sequence
atggagaccgagagcggcccccagaccagcaaccagatgcagaccgacagtttgtcacctagcccgaatccagtatctcccgttccactgaataatcccacatccgcccctcggtacggcacagtgatccccaatcggattttcgtcggagggatcgactttaaaaccaacgagtcagatctcaggaaatttttttcacagtacggcagcgtcaaggaagttaaaatcgtcaatgatagagccggtgtgagtaaaggctatggattcgtgacgtttgaaacacaggaagacgcgcagaagatattacaggaagcagagaagttaaattacaaagataagaagttgaacatcggccctgctatccggaagcagcaggttggaattccaagaagctctatcatgccagccgccggaaccatgtacctcaccacaagcacagggtatccgtatacataccataatggtgtagcttacttccacacccccgaggtcacatcagtgccccctccctggccttcacgaagtgtgtgcagctctccagttatggttgctcagcccatttaccagcagcccgcttaccactatcaagctaccacgcaatatcttccgggtcagtggcagtggtcagtaccacagccctcagcctcttcagccccctttctgtatctccagccctctgaagtcatctaccagcccgttgagatagctcaggacgggggttgtgtgcccccacctttgtctttgatggagacatctgtgccggagccgtattcagatcacggcgtacaggccacctaccaccaggtttacgctccgtccgctatcactatgccagcccctgtgatgcaaccagagcctattaaaactgtctggtccattcactattag

SEQ ID NO: 258811 - DNA, 888 bp, Artificial Sequence
  derived and/or modified sequence
atggaaacagagagcggtccccaaacttcaaaccagatgcagacagatagcctgtctccctcgcccaatcctgtaagccccgtcccactgaacaatcctacatctgccccacggtacggaaccgtgatcccaaatagaatatttgtgggaggtatagacttcaagaccaacgaaagcgacctcagaaaattcttcagccaatacgggtcggtcaaggaagtcaaaatagttaacgaccgggctggcgtctctaagggctatggatttgtgaccttcgaaacccaggaggacgcgcagaaaatcctccaagaggccgagaaattgaactataaagacaagaagttaaacattggaccggcaattcgaaagcagcaagtagggatccctcgaagtagcatcatgcccgctgccggtactatgtacctgactactagcaccggatacccatatacgtaccataacggagtcgcctattttcacacaccggaagtaacatccgttcctccgccatggccctcccgaagcgtgtgctcctcacctgtaatggttgcccagccaatctatcagcagcctgcctaccactatcaggctacaacacagtacctcccgggacagtggcagtggtccgttccccagccatctgcatcatcagctccattcctgtacctgcagccctctgaagttatctaccagcccgtggagatcgcacaggatggagggtgcgtccccccacctttatctttaatggagacatctgtgccagagccttatagtgatcacggggtgcaggcaacttaccatcaggtgtatgctccctccgcaattacaatgccagcacctgttatgcagccggagccaattaagaccgtgtggagcatccactattag

SEQ ID NO: 258812 - DNA, 3135 bp, Artificial Sequence
  derived and/or modified sequence
acaccagtcttcggaagtcgcccgtcaaccggcttcttctacctcagtaaagccttaaggtcacctcaacctctcgaaacccaccagtcccagaggccgactcttctcaagtggaggagaggggaaggcgtgcatggagctttgcctgaccgctcgctctctcctccccagccgtctgagagaaggcgagaggggtcccagaaccgagccctcgctccgcacgccccacgcccgccccgctgtgccgtgcgctctgcccctgagacgccccggctcggagtcccagggccacagccgaaactcgccctcccgcgcccctctccggcttgcagcgcccgcccgcaccgccacctgccacccgaggcgacgcagtccgcttctccccacccgccaggtggcaggttcagggccggggtccgagcctgcttccctgcagctgccacagccaccctcgccgccagggggcgagagtcccaggcaggacaagcagcgctgctgccttggcgtgaaggtggtttcaaactttaggcttcttttccctaccccgcgtctctgaagagcagagaggaagatggaaaccgagtccgggccgcaaacatcaaaccagatgcaaacagattcattatctccatcccctaatcctgtgtcacctgtgcctttgaataacccaacaagtgccccaagatatggaacagtgatccctaatcgcatctttgtaggaggaattgattttaagacaaacgaaagtgatttaagaaaatttttttcccagtatgggtctgtgaaagaagtgaagattgtaaatgacagagctggagtatccaaagggtatggtttcgtcacttttgaaacacaagaagatgcacaaaaaattttacaagaggctgaaaaacttaattataaggataagaagctgaacattggtccagcaataagaaaacaacaagtagggatccctcgttctagtataatgccagcagctggaacaatgtatctaacaacttcaactggatatccttatacttaccataatggtgttgcttattttcatactccagaggtaacttcggtcccaccgccttggccttcacgttctgtatgtagctcccctgtgatggtagctcagcccatttatcagcaacctgcatatcactaccaggccaccacacagtatttaccaggacagtggcagtggagtgttcctcagccttctgcctcttctgctccattcttatacctgcaaccttctgaggttatttatcaaccagtggaaattgcacaggatggtggatgtgttcctcctccactgtctctgatggaaacttcagttccagagccttattctgatcatggagttcaagcaacatatcaccaggtttatgctccaagtgccatcactatgcctgcgcctgtgatgcagcctgagccaattaaaacagtgtggagcattcattattaagacaattgggcagctctattccagctcaactgatttcttgtccaatgatccttgcgtggccgagatccagcttcaacgaaccagctagaagctgcccgttgtgaaacttagtgttagttaatacctcaccatactcagttattccactataagctgtctaaatttgatgaaatttgctttttcagctgttctacaaaattatttaggtagatgtggcatgttggttttttatgtgctaacctaactgtaatgaccttttctacaacatgttttatccattccataaataataaccacattgggaatagtgaggtgtcttttattttctctgctttgtgttattttttcttatcaaacaattagatgttatgtttcatattatttgatatttattttcatatttaggataagaatcatttttaattataatacttttaatactttcatatattttacaacagtatactatttaatattaatgacaattctatttttgctttgctgttttgtcatttaatatgcttttgtctaatttttaattcatttattactgttactccttatttaattttgcgtctgccatggttttcagaatctgaatagtatttatacttcttttttataacattttccaaatattagaaataccatcaacatgatcagtattcttgccttttcatgtaatttgactatattaaattttttctccagtgtttgagacaatattgaaatcttcctataacataatttatttggtatcaaattttataaaatatggatccacctttggaattttgataaaagggttcatctctgacatgatcccataacactgactgaaattccaccaaattactgttctttgaatgctttaatccttaaaccttttcttctgatatgcaaccaatatattcaattatatatgtgattaatttttaaaaggacaattgttttcataaaatgcaaaactattttttacaccaaaggaaaattttagattctgattctaaatccgatttttactataaaattggaaaatagatgggaggggtgtcattcattgttcaaaaggtacagaacaaatcataggggtttttaatctctaaaatttctacagtagtacaggaaatattcctctttacattcatttgcagttctttcactgacctcctaattttaggtggagggggcagggggagccataaaagttggtattaccctaataaatctatctctttcctcccctgtttcaaccccacatgtattccatgctcagcagcagcagcagaaatagtaggatatagatcacaaaggtttttctggtgagtcaaatagggtgttttcttttgaaactgtaatgaatatgtttgccagtcaaatggcttcatgagaacagtagaaccttatgaatgtatactagcatacaaggatctcaaatacattaattattctcagttttaggaatgtaaatagattaagtcccacaatgaaatttcagaagtttttgttctgtaagtaaaaaattactaaccactgatgttcaagattttcttttaatagcactatccttgagaaccaaaaagtttatgttttgattttcaaatgttaaacaagatgctaaacaaatcctggactgttaataaaaattaattatgtattattggataaggaatttt

SEQ ID NO: 258813 - DNA, 2838 bp, Artificial Sequence
  derived and/or modified sequence
aatcagggagcgccgcgcgagggtggggaccagctgcgcacgaggccagcggcggggtcgctgccgttgaggcttcccgccactgctgctggcggatttgtggggcaaaatttctcgctggctagccttcttttccctcccgcactttggtggggagggggtggatcctcgtttcggtgcccaagttcacgatgacccgagagaactcgaggaagttgtcgccgcggccatttcccccagtgccgcaacttgctggccttggagggggaggagcgccgaggcagtgactgcgacgcaaacatcaaaccagatgcaaacagattcattatctccatcccctaatcctgtgtcacctgtgcctttgaataacccaacaagtgccccaagatatggaacagtgatccctaatcgcatctttgtaggaggaattgattttaagacaaacgaaagtgatttaagaaaatttttttcccagtatgggtctgtgaaagaagtgaagattgtaaatgacagagctggagtatccaaagggtatggtttcgtcacttttgaaacacaagaagatgcacaaaaaattttacaagaggctgaaaaacttaattataaggataagaagctgaacattggtccagcaataagaaaacaacaagtagggatccctcgttctagtataatgccagcagctggaacaatgtatctaacaacttcaactggatatccttatacttaccataatggtgttgcttattttcatactccagaggtaacttcggtcccaccgccttggccttcacgttctgtatgtagctcccctgtgatggtagctcagcccatttatcagcaacctgcatatcactaccaggccaccacacagtatttaccaggacagtggcagtggagtgttcctcagccttctgcctcttctgctccattcttatacctgcaaccttctgaggttatttatcaaccagtggaaattgcacaggatggtggatgtgttcctcctccactgtctctgatggaaacttcagttccagagccttattctgatcatggagttcaagcaacatatcaccaggtttatgctccaagtgccatcactatgcctgcgcctgtgatgcagcctgagccaattaaaacagtgtggagcattcattattaagacaattgggcagctctattccagctcaactgatttcttgtccaatgatccttgcgtggccgagatccagcttcaacgaaccagctagaagctgcccgttgtgaaacttagtgttagttaatacctcaccatactcagttattccactataagctgtctaaatttgatgaaatttgctttttcagctgttctacaaaattatttaggtagatgtggcatgttggttttttatgtgctaacctaactgtaatgaccttttctacaacatgttttatccattccataaataataaccacattgggaatagtgaggtgtcttttattttctctgctttgtgttattttttcttatcaaacaattagatgttatgtttcatattatttgatatttattttcatatttaggataagaatcatttttaattataatacttttaatactttcatatattttacaacagtatactatttaatattaatgacaattctatttttgctttgctgttttgtcatttaatatgcttttgtctaatttttaattcatttattactgttactccttatttaattttgcgtctgccatggttttcagaatctgaatagtatttatacttcttttttataacattttccaaatattagaaataccatcaacatgatcagtattcttgccttttcatgtaatttgactatattaaattttttctccagtgtttgagacaatattgaaatcttcctataacataatttatttggtatcaaattttataaaatatggatccacctttggaattttgataaaagggttcatctctgacatgatcccataacactgactgaaattccaccaaattactgttctttgaatgctttaatccttaaaccttttcttctgatatgcaaccaatatattcaattatatatgtgattaatttttaaaaggacaattgttttcataaaatgcaaaactattttttacaccaaaggaaaattttagattctgattctaaatccgatttttactataaaattggaaaatagatgggaggggtgtcattcattgttcaaaaggtacagaacaaatcataggggtttttaatctctaaaatttctacagtagtacaggaaatattcctctttacattcatttgcagttctttcactgacctcctaattttaggtggagggggcagggggagccataaaagttggtattaccctaataaatctatctctttcctcccctgtttcaaccccacatgtattccatgctcagcagcagcagcagaaatagtaggatatagatcacaaaggtttttctggtgagtcaaatagggtgttttcttttgaaactgtaatgaatatgtttgccagtcaaatggcttcatgagaacagtagaaccttatgaatgtatactagcatacaaggatctcaaatacattaattattctcagttttaggaatgtaaatagattaagtcccacaatgaaatttcagaagtttttgttctgtaagtaaaaaattactaaccactgatgttcaagattttcttttaatagcactatccttgagaaccaaaaagtttatgttttgattttcaaatgttaaacaagatgctaaacaaatcctggactgttaataaaaattaattatgtattattggataaggaatttt

SEQ ID NO: 258814 - DNA, 888 bp, Artificial Sequence
  derived and/or modified sequence
atggagaccgagagcggcccccagaccagcaaccagatgcagaccgacagcctgagccccagccccaaccccgtgagccccgtgcccctgaacaaccccaccagcgcccccagatacggcaccgtgatccccaacagaatcttcgtgggcggcatcgacttcaagaccaacgagagcgacctgagaaagttcttcagccagtacggcagcgtgaaggaggtgaagatcgtgaacgacagagccggcgtgagcaagggctacggcttcgtgaccttcgagacccaggaggacgcccagaagatcctgcaggaggccgagaagctgaactacaaggacaagaagctgaacatcggccccgccatcagaaagcagcaggtgggcatccccagaagcagcatcatgcccgccgccggcaccatgtacctgaccaccagcaccggctacccctacacctaccacaacggcgtggcctacttccacacccccgaggtgaccagcgtgccccccccctggcccagcagaagcgtgtgcagcagccccgtgatggtggcccagcccatctaccagcagcccgcctaccactaccaggccaccacccagtacctgcccggccagtggcagtggagcgtgccccagcccagcgccagcagcgcccccttcctgtacctgcagcccagcgaggtgatctaccagcccgtggagatcgcccaggacggcggctgcgtgcccccccccctgagcctgatggagaccagcgtgcccgagccctacagcgaccacggcgtgcaggccacctaccaccaggtgtacgcccccagcgccatcaccatgcccgcccccgtgatgcagcccgagcccatcaagaccgtgtggagcatccactactag

SEQ ID NO: 258815 - DNA, 1023 bp, Artificial Sequence
  derived and/or modified sequence
atgcatgacgtgaagaaccaccgcacttttctgaaaaggacaaagtatgacaacctgcaccttgaagatctgttcattgggaacaaggtgaatgtattcagcaggcagctggtgttgatagattacggagatcagtacactgctaggcagctgggttccagaaaagagaaaacccttgcacttattaagccggacgcaatcagcaaggccggggaaatcattgagattatcaacaaagcaggctttaccatcactaagctcaagatgatgatgctgagtaggaaggaggcacttgactttcacgtggaccaccaatctcggcctttttttaacgaactgattcaatttattacaaccgggccgatcatcgctatggagatcctgagagatgacgccatctgcgaatggaagaggctgctggggcctgccaactcaggtgtggctcggactgacgcttccgagtcaattcgggcgctatttgggacagacggtattagaaacgccgcccatggtcccgatagttttgcctcagctgcccgcgaaatggaactcttctttccatcctctggggggtgcggaccagctaacaccgccaagttcacgaattgcacatgttgcattgtaaagcctcacgccgtgagcgaaggactcctcggtaaaatactgatggccatcagggatgcaggttttgagattagtgcgatgcagatgttcaacatggatcgagttaacgtggaggaattctacgaagtatataagggcgtggtgacagaatatcacgatatggttaccgagatgtattcggggccatgtgtcgcgatggaaatccagcagaacaacgccactaagacattccgagaattttgtggacctgctgatcccgaaatcgctcggcacttaagacctggcacattgcgggctatttttggcaagacgaagatccagaacgcagttcactgcacagacctgcctgaggatgggcttctcgaagtgcaatacttctttaaaatcctcgacaactag

SEQ ID NO: 258816 - DNA, 1023 bp, Artificial Sequence
  derived and/or modified sequence
atgcatgatgtgaagaaccacaggaccttcctgaagaggaccaagtatgacaacctgcacctggaggacctcttcatcggcaacaaggtgaatgtgttcagccggcagctggtgctgattgattatggagaccagtacacagcccggcagctgggcagcaggaaggagaagaccctggccctgatcaagccagatgccatcagcaaggccggggagatcatcgagatcatcaacaaggccggcttcaccatcaccaagctgaagatgatgatgctgagcaggaaggaggccctggacttccacgtggaccaccagagccggcccttcttcaatgaactcatccagttcatcaccaccggccccatcatcgccatggagatcctgagagatgatgccatctgtgagtggaagaggctgctgggccctgccaacagcggcgtggccaggacagatgccagcgagagcatccgggccctgtttggaacagatggcatcagaaatgctgcccacggccctgacagctttgccagcgctgcccgggagatggagctgttcttccccagcagcggcggctgcggccctgccaacacagccaagttcaccaactgcacctgctgcatcgtgaagccccatgctgtgtctgagggcctgctgggcaagatcctgatggccatcagagatgctggctttgagatcagcgccatgcagatgttcaacatggacagagtgaatgtggaggagttctatgaggtgtacaagggcgtggtgacagagtaccatgacatggtgacagagatgtacagcggcccctgtgtggccatggagatccagcagaacaatgccaccaagaccttccgggagttctgtggccctgctgaccctgagatcgcccggcacctgcggcccggcaccctgcgggccatctttgggaagaccaagatccagaatgctgtgcactgcacagacctgcctgaagatggcctgctggaggtgcagtacttcttcaagatcctggacaactag

SEQ ID NO: 258817 - DNA, 1023 bp, Artificial Sequence
  derived and/or modified sequence
atgcacgacgtgaagaaccaccggaccttcctgaagcggaccaagtatgataacctgcacctggaggacctgtttataggcaataaggtgaatgtgtttagtaggcagttagtgctcatcgattacggtgaccagtatacagcccgacagctcggctcgcgcaaggagaagacactggctctgatcaaacctgacgcaatatccaaggccggcgaaatcatcgaaatcatcaacaaagccggcttcacaatcacaaaactaaagatgatgatgctcagtcggaaggaggcgttggatttccacgttgaccaccagtcccggcctttcttcaacgagctgattcaattcataactacggggcctattattgctatggagatactacgtgatgatgccatctgcgaatggaaacggctgctgggcccggccaacagtggtgtcgcacgcacagacgcgtccgagtccatccgagccctgtttggtaccgacgggatacgaaatgccgctcacgggcctgattcattcgcgagtgcagcacgcgaaatggagttgttctttccaagcagcggtggttgtggccccgctaataccgccaagtttaccaactgtacttgttgcatcgtcaaaccccatgctgtcagcgaagggttactggggaaaatccttatggccataagggacgctgggtttgagatatctgccatgcaaatgtttaacatggatcgggtcaatgtagaagaattctacgaggtttacaaaggggtggtgacggagtatcatgacatggtgactgagatgtactctggcccatgtgtggccatggaaatccaacagaacaatgcgaccaagacctttcgagagttctgcggacctgctgaccccgagattgcaagacacctcaggcctggcactctgcgagctattttcggcaaaacaaagatccagaatgccgttcactgcacagacttgccagaagacggcctgctagaggtccagtacttcttcaagattctggacaattag

SEQ ID NO: 258818 - DNA, 1023 bp, Artificial Sequence
  derived and/or modified sequence
atgcacgacgtgaagaatcatcgtacctttctgaaacgcacaaagtatgacaatctgcatctggaagacctcttcattggaaataaggttaatgtcttctccaggcaactggtgcttattgactacggggaccagtacacagcacggcagctggggagtcgaaaggagaagactttggctctgattaaacctgatgctatatcgaaagctggagagattatcgagattataaacaaagccggatttaccattaccaagttgaagatgatgatgctgtcaagaaaggaagcactggatttccatgtcgatcaccagtcacgccctttcttcaatgagctgatccagttcataacgacgggcccaatcattgctatggaaatcctgcgcgacgatgccatatgtgagtggaaacggttgttaggtcccgctaatagtggggtggctcgcactgatgcaagcgaatccatccgcgcattgtttggaaccgacgggataagaaacgccgcacatggacccgattcttttgcaagcgccgcaagagagatggagttgtttttcccatcctccggcggatgcggcccagcaaacactgccaaattcaccaattgcacttgctgtattgtgaaacctcatgcagtgtccgaaggcctactcgggaagattttgatggcgatccgagatgcaggatttgagatttctgccatgcagatgtttaacatggacagggttaacgtggaagaattctatgaagtttataagggagtcgtcaccgagtaccatgatatggtgacagagatgtattcagggccatgcgtggctatggagattcagcagaataacgcgacgaagacttttcgtgagttctgcggtcctgcggacccagagattgcacgacacctgcgcccaggtaccctgcgagccatcttcgggaaaaccaaaatacagaacgcggtgcattgcaccgacttgcctgaagacggcctgctggaggttcagtatttttttaaaatcttagacaactag

SEQ ID NO: 258819 - DNA, 1023 bp, Artificial Sequence
  derived and/or modified sequence
atgcacgacgtgaagaaccacagaaccttcctgaagagaaccaagtacgacaacctgcacctggaggacctgttcatcggcaacaaggtgaacgtgttcagcagacagctggtgctgatcgactacggcgaccagtacaccgccagacagctgggcagcagaaaggagaagaccctggccctgatcaagcccgacgccatcagcaaggccggcgagatcatcgagatcatcaacaaggccggcttcaccatcaccaagctgaagatgatgatgctgagcagaaaggaggccctggacttccacgtggaccaccagagcagacccttcttcaacgagctgatccagttcatcaccaccggccccatcatcgccatggagatcctgagagacgacgccatctgcgagtggaagagactgctgggccccgccaacagcggcgtggccagaaccgacgccagcgagagcatcagagccctgttcggcaccgacggcatcagaaacgccgcccacggccccgacagcttcgccagcgccgccagagagatggagctgttcttccccagcagcggcggctgcggccccgccaacaccgccaagttcaccaactgcacctgctgcatcgtgaagccccacgccgtgagcgagggcctgctgggcaagatcctgatggccatcagagacgccggcttcgagatcagcgccatgcagatgttcaacatggacagagtgaacgtggaggagttctacgaggtgtacaagggcgtggtgaccgagtaccacgacatggtgaccgagatgtacagcggcccctgcgtggccatggagatccagcagaacaacgccaccaagaccttcagagagttctgcggccccgccgaccccgagatcgccagacacctgagacccggcaccctgagagccatcttcggcaagaccaagatccagaacgccgtgcactgcaccgacctgcccgaggacggcctgctggaggtgcagtacttcttcaagatcctggacaactag

SEQ ID NO: 258820 - protein, 535 aa, Artificial Sequence
  derived and/or modified sequence
MVGEDADLPCHLFPTMSAETMELRWVSSSLRQVVNVYADGKEVEDRQSAPYRGRTSILRDGITAGKAALRIHNVTASDSGKYLCYFQDGDFYEKALVELKVAALGSDLHIEVKGYEDGGIHLECRSTGWYPQPQIKWSDTKGENIPAVEAPVVADGVGLYAVAASVIMRGSSGGGVSCIIRNSLLGLEKTASISIADPFFRSAQPWIAALAGTLPISLLLLAGASYFLWRQQKEKIALSRETEREREMKEMGYAATEQEISLREWRKIQYMARGEKSLAYHEWKMALFKPADVILDPDTANAILLVSEDQRSVQRAEEPRDLPDNPERFEWRYCVLGCENFTSGRHYWEVEVGDRKEWHIGVCSKNVERKKGWVKMTPENGYWTMGLTDGNKYRALTEPRTNLKLPEPPRKVGIFLDYETGEISFYNATDGSHIYTFPHASFSEPLYPVFRILTLEPTALTICPIPKEVESSPDPDLVPDHSLETPLTPGLANESGEPQAEVTSLLLPAHPGAEVSPSATTNQNHKLQARTEALY

SEQ ID NO: 258821 - DNA, 1608 bp, Artificial Sequence
  derived and/or modified sequence
atggttggtgaagacgctgatctgccctgtcaccttttccccacgatgagcgctgagaccatggaattgaggtgggtgtcttcttcacttcgccaagtagttaacgtttatgcagacggcaaagaggtcgaggaccgacagagcgctccctacaggggccggacatccatcctccgggatggaatcactgccgggaaggcagccctgcgcatccacaacgtcaccgccagcgactccggtaagtacctgtgctatttccaggatggagatttctacgagaaggcccttgtggaactgaaagtggcggcactcggatctgacctccacatcgaggtcaaaggctatgaagacgggggaatccacctagagtgccggtcaacggggtggtacccacagcctcagatcaagtggtcagatactaagggcgagaacattcctgccgtggaggccccggtggtggcagacggcgtagggctgtatgcagtagccgccagtgtcattatgaggggcagttctggggggggtgtttcttgcataattaggaattccctgctgggcttggagaaaacagcaagcatttcaatagcagacccattcttccggagcgctcagccatggatcgccgcactggccggaaccctgccaatctcacttcttttactcgctggtgcctcctacttcctctggcgtcagcagaaggagaagattgcactgtctcgagagacagaacgtgagagagaaatgaaggaaatggggtacgccgcaaccgagcaggaaatcagcctgcgagagtggcgcaagattcagtacatggcacgaggtgagaagtccctggcgtaccatgagtggaagatggccctgtttaaaccagcagacgtgatcctggaccccgacacggcgaacgccatcctgctggtaagtgaagaccagagatctgtacagagagctgaagagcccagggacctcccagacaacccagaacgctttgaatggcgttattgcgtgctgggatgcgagaactttacgagcggcaggcactactgggaggttgaggtgggggaccggaaagaatggcacattggcgtatgctccaagaacgtcgaaaggaagaagggctgggtgaagatgacgcctgagaacggctattggaccatgggactgaccgatggcaataaatacagggctctgacggagcctcgcactaatcttaaactgcccgagccaccccggaaggtggggatctttctggattatgaaaccggggaaatctccttttacaacgccaccgacgggtcccacatatacactttcccacacgccagtttcagcgagcccctttaccccgtatttaggatattgacactggaacctactgccctcacaatctgccccatcccaaaggaggtcgagtccagccccgaccccgatctagttcctgaccatagcttggagacacccctgacccctggcctcgctaatgagagtggtgagcctcaggccgaagttacttcattgctgttacctgcgcatcccggcgctgaggtctcaccgagcgctacaaccaaccagaaccataaacttcaagcgagaaccgaggccctgtattag

SEQ ID NO: 258822 - DNA, 1608 bp, Artificial Sequence
  derived and/or modified sequence
atggtgggggaggatgctgacctgccctgccacctgttccccaccatgtctgctgagaccatggagctgcgctgggtgagcagcagcctgcggcaggtggtgaatgtgtatgcagatggcaaggaggtggaggaccggcagagcgccccctaccggggccgcaccagcatcctgagagatggcatcacagctgggaaggccgccctgcgcatccacaacgtgacagccagtgacagcggcaagtacctgtgctacttccaggatggagacttctatgagaaggccctggtggagctgaaggtggccgccctgggcagtgacctgcacatcgaggtgaagggctatgaagatggcggcatccacctggagtgccgcagcacaggctggtacccccagccccagatcaagtggagcgacaccaagggggagaacatcccagctgtggaggcccctgtggtggctgatggagtgggcctgtatgctgtggccgccagcgtcatcatgaggggcagcagcggcggcggcgtgtcctgcatcatccggaacagcctgctgggcctggagaagacagccagcatcagcattgctgaccccttcttccgcagcgcccagccctggattgctgccctggccggcaccctgcccatcagcctgctgctgctggccggggccagctacttcctgtggaggcagcagaaggagaagatcgccctgagccgggagacagagcgggagcgggagatgaaggagatgggctacgccgccacagagcaggagatcagcctgcgggagtggaggaagatccagtacatggcccggggggagaagagcctggcctaccacgagtggaagatggccctcttcaagccagcagatgtgatcctggaccctgacacagccaatgccatcctgctggtgtctgaggaccagaggtctgtgcagagagctgaggagccccgggacctgcctgacaaccctgagagatttgagtggagatactgtgtgctgggctgtgagaacttcaccagcggccgccactactgggaggtggaggtgggggacaggaaggagtggcacatcggcgtgtgcagcaagaatgtggagaggaagaagggctgggtgaagatgaccccagaaaatggctactggaccatgggcctgacagatggcaacaagtaccgggccctgacagagcccaggaccaacctgaagctgcctgagccccccaggaaggtgggcatcttcctggactatgagaccggggagatctccttctacaatgccacagatggcagccacatctacaccttcccccacgccagcttcagcgagcccctgtaccctgtgttccgcatcctgaccctggagcccacagccctgaccatctgccccatccccaaggaggtggagagcagcccagaccctgacctggtgcctgaccacagcctggagacccccctgaccccaggcctggccaatgaaagtggagagccccaggccgaggtgaccagcctgctgctgcctgcccaccctggagctgaggtgagccccagcgccaccaccaaccagaaccacaagctgcaggccaggacagaggccctgtactag

SEQ ID NO: 258823 - DNA, 1608 bp, Artificial Sequence
  derived and/or modified sequence
atggtgggcgaggacgccgacctgccctgccacctgttccccaccatgagcgccgaaacgatggagttacgttgggtttcaagctctttgaggcaggttgtgaacgtgtacgcagacggcaaggaagtggaagaccgccagagtgccccttacaggggcagaacaagcatcctccgtgatgggattactgctgggaaagcggccctgagaatccataacgtcacagcatctgacagcggcaagtacttgtgctattttcaggacggcgacttttatgaaaaggccttggtcgagctgaaagtagccgcgctgggttctgatctgcacatagaggtcaagggatatgaggacggaggaattcacctcgaatgtcgtagcaccggttggtacccgcagccccagattaagtggagcgacacaaagggagagaatatccccgctgtagaggccccagttgtcgcagacggcgttgggctgtatgcagtggcagcaagcgtgatcatgcgaggcagtagtggtggaggcgtgtcctgtattattagaaattcactgctgggccttgaaaaaaccgcgtccatttccatcgcggacccttttttccggtccgcacagccgtggatcgccgcactcgctgggacactcccaataagtctgcttctgctggctggcgccagctacttcctgtggcgacagcagaaggaaaagatcgctttgagcagggaaaccgaacgagagcgcgaaatgaaggaaatgggctacgcagccacagaacaggagatttccctcagagagtggcggaaaatacaatatatggcccgcggggaaaagtccctggcttaccacgagtggaaaatggctcttttcaaacccgcagacgttattctggacccagatacagctaatgccattctcctggtttctgaggatcagcgaagtgtgcaaagggctgaagaaccacgggatttacccgacaacccggaacgcttcgaatggcgctactgtgtgctaggttgtgaaaattttacatccggaaggcattattgggaggtggaggtgggcgatcgtaaggagtggcacattggcgtttgctcgaaaaacgtggagcgcaagaaggggtgggtgaaaatgacgccagagaacgggtactggaccatgggcttaactgatggaaacaaatacagggctctgaccgaacctcggactaacctaaagctgcctgagcctccaaggaaagtcgggatttttttggactacgaaaccggcgagatctcattctacaatgccactgatggcagccatatttatacattccctcatgcatccttcagcgaacccttgtaccctgtcttccgaatattaacgctagaaccaacggctctgacaatctgccccatacccaaggaagtagagtctagtcctgacccagatctggtacccgatcatagtttggagacgccattgacacccggtctggctaatgagtctggcgaaccacaggccgaagtgacaagtcttctgttgcccgcccacccgggggctgaagtgagccctagtgctaccaccaaccagaaccataagctgcaagcccggacggaggccctatactag

SEQ ID NO: 258824 - DNA, 1608 bp, Artificial Sequence
  derived and/or modified sequence
atggtcggcgaggatgccgacctgccctgccacctcttcccaacgatgagcgctgagactatggaactgcgctgggtgtcgtcatcgctgcgacaagtcgtgaacgtgtatgctgatggtaaggaagtggaggaccgtcagagcgcaccctatcggggaaggacttcaattcttagagatggcatcacggccggaaaggccgcactgcgcattcacaacgttacagcctctgatagcggaaagtatctgtgttattttcaggatggcgatttttacgaaaaagcactggtggaacttaaagtggctgcactcggttccgatttacatatcgaggtcaaagggtatgaggatgggggtatccacctggagtgcagatccaccgggtggtatccccaacctcagatcaaatggtccgacacgaaaggagagaacatccccgctgtggaggctccagtcgtggccgatggggttggactgtatgcagtggccgcttcggtcatcatgagaggttctagcggcggaggcgtaagctgtattatccgcaactcccttctgggccttgaaaagacggccagcatttcaatcgcagacccattcttcagaagcgctcagccctggattgcggcacttgccggtacgcttcctataagcttacttctgttggcaggagcctcttactttctctggaggcagcagaaagagaagattgccttaagccgggagaccgagagggagagagagatgaaagaaatgggctacgcagccaccgaacaggaaatctctctccgggagtggaggaaaatacagtacatggccaggggtgagaaatcccttgcatatcacgaatggaaaatggccctgtttaagcctgctgacgtgatactggaccctgataccgctaacgccatattgctcgtctccgaagaccaacggtcagtccaaagagccgaagagccacgcgacctgcccgacaacccggagagattcgagtggcgatactgtgtcctcgggtgtgaaaatttcacaagcggccgacattattgggaggttgaggttggggacaggaaagaatggcacatcggcgtttgtagcaaaaatgtcgaacgaaaaaaagggtgggtgaagatgacgcccgagaatgggtattggaccatggggctgaccgacggaaacaagtacagagcccttacggaacccagaacgaacttaaagttgcctgaacctcccaggaaagtgggaatttttcttgattacgagactggagaaatttctttttataacgctacagatggttctcacatttatacattccctcacgcaagcttctcggaaccattgtaccccgtgtttcggatcctcactctggaaccgacggccctaacaatttgtcctatacccaaggaggtcgaatcaagccccgatccagatcttgtgcctgaccactccctggaaactcccctcacaccaggactagctaacgagagtggcgaaccacaagcagaggtgacgtccctgctcctcccagctcatcccggagccgaagttagcccaagtgccaccactaatcaaaatcacaagctccaggcacggacagaagctctgtactag

SEQ ID NO: 258825 - DNA, 1608 bp, Artificial Sequence
  derived and/or modified sequence
atggtgggcgaggacgccgacctgccctgccacctgttccccaccatgagcgccgagaccatggagctgagatgggtgagcagcagcctgagacaggtggtgaacgtgtacgccgacggcaaggaggtggaggacagacagagcgccccctacagaggcagaaccagcatcctgagagacggcatcaccgccggcaaggccgccctgagaatccacaacgtgaccgccagcgacagcggcaagtacctgtgctacttccaggacggcgacttctacgagaaggccctggtggagctgaaggtggccgccctgggcagcgacctgcacatcgaggtgaagggctacgaggacggcggcatccacctggagtgcagaagcaccggctggtacccccagccccagatcaagtggagcgacaccaagggcgagaacatccccgccgtggaggcccccgtggtggccgacggcgtgggcctgtacgccgtggccgccagcgtgatcatgagaggcagcagcggcggcggcgtgagctgcatcatcagaaacagcctgctgggcctggagaagaccgccagcatcagcatcgccgaccccttcttcagaagcgcccagccctggatcgccgccctggccggcaccctgcccatcagcctgctgctgctggccggcgccagctacttcctgtggagacagcagaaggagaagatcgccctgagcagagagaccgagagagagagagagatgaaggagatgggctacgccgccaccgagcaggagatcagcctgagagagtggagaaagatccagtacatggccagaggcgagaagagcctggcctaccacgagtggaagatggccctgttcaagcccgccgacgtgatcctggaccccgacaccgccaacgccatcctgctggtgagcgaggaccagagaagcgtgcagagagccgaggagcccagagacctgcccgacaaccccgagagattcgagtggagatactgcgtgctgggctgcgagaacttcaccagcggcagacactactgggaggtggaggtgggcgacagaaaggagtggcacatcggcgtgtgcagcaagaacgtggagagaaagaagggctgggtgaagatgacccccgagaacggctactggaccatgggcctgaccgacggcaacaagtacagagccctgaccgagcccagaaccaacctgaagctgcccgagccccccagaaaggtgggcatcttcctggactacgagaccggcgagatcagcttctacaacgccaccgacggcagccacatctacaccttcccccacgccagcttcagcgagcccctgtaccccgtgttcagaatcctgaccctggagcccaccgccctgaccatctgccccatccccaaggaggtggagagcagccccgaccccgacctggtgcccgaccacagcctggagacccccctgacccccggcctggccaacgagagcggcgagccccaggccgaggtgaccagcctgctgctgcccgcccaccccggcgccgaggtgagccccagcgccaccaccaaccagaaccacaagctgcaggccagaaccgaggccctgtactag

SEQ ID NO: 258826 - DNA, 444 bp, Artificial Sequence
  derived and/or modified sequence
atgtggaagttccccggcggcctgagcgagcccgaggaggacatcggcgacaccgccgtgagagaggtgttcgaggagaccggcatcaagagcgagttcagaagcgtgctgagcatcagacagcagcacaccaaccccggcgccttcggcaagagcgacatgtacatcatctgcagactgaagccctacagcttcaccatcaacttctgccaggaggagtgcctgagatgcgagtggatggacctgaacgacctggccaagaccgagaacaccacccccatcaccagcagagtggccagactgctgctgtacggctacagagagggcttcgacaagatcgacctgaccgtggaggagctgcccgccgtgtacaccggcctgttctacaagctgtaccacaaggagctgcccgagaactacaagaccatgaagggcatcgactag

SEQ ID NO: 258827 - DNA, 444 bp, Artificial Sequence
  derived and/or modified sequence
atgtggaaatttccaggggggctgagcgagcctgaagaagacattggcgataccgccgtccgagaggtgttcgaggaaaccgggatcaagtctgagtttcgcagtgtgctatcaattcgccagcagcataccaacccaggtgcatttggaaagtctgatatgtatatcatctgtcgactgaagccatattcgttcacaattaacttctgccaggaggagtgcttgcggtgtgaatggatggacctcaatgacttggccaaaacagaaaacacaacacctattacctccagagtagcgcgtctgctgctctacggttacagggaagggttcgataaaatcgatctgaccgtggaggagctccccgctgtgtatacggggcttttttataagctttaccataaggaattgcccgagaattacaaaacaatgaaaggcattgactag

SEQ ID NO: 258828 - DNA, 444 bp, Artificial Sequence
  derived and/or modified sequence
atgtggaagtttcccggggggttgtctgagcccgaggaagacattggggacactgccgtgagagaggtgttcgaggaaaccggcattaagtctgagttccgttccgtgctgtctatccgccagcagcatacgaatcctggagctttcggtaagtccgacatgtacatcatttgtcgactcaagccttactcctttaccatcaatttttgccaggaggagtgcctccgctgtgaatggatggacttgaacgacctggcaaaaaccgagaacactacgcctataacctctagggttgcacggctgttgttgtacgggtacagggaggggtttgacaagatcgatctcactgtagaggaacttcccgccgtttacactgggctgttttataaactatatcacaaagagctccctgagaactacaaaaccatgaagggtatcgactag

SEQ ID NO: 258829 - DNA, 444 bp, Artificial Sequence
  derived and/or modified sequence
atgtggaagtttcctgggggcctgtctgagccagaagaagatattggagacacagctgtgcgggaggtgtttgaggagaccggcatcaagtctgagttccgctctgtgctgagcatccggcagcagcacaccaaccctggggccttcggcaagagtgacatgtacatcatctgccgcctgaagccctacagcttcaccatcaacttctgccaggaggagtgcctgcgctgtgagtggatggacctgaatgacctggccaagacagagaacaccacccccatcaccagccgggtggcccggctgctgctgtatggctaccgggagggctttgacaagattgacctgactgtggaggagctgcctgctgtgtacacaggcctcttctacaagctgtaccacaaggagctgcctgagaactacaagaccatgaagggcatcgactag

SEQ ID NO: 258830 - DNA, 444 bp, Artificial Sequence
  derived and/or modified sequence
atgtggaagttccccggcggcctgagcgagcccgaggaggacatcggtgacaccgcagtccgtgaagtgttcgaggagacaggtattaaaagcgaattccgctccgtactgtctattcgccagcagcacacaaaccccggggccttcggtaagtctgatatgtacatcatttgtaggctaaagccatatagttttactatcaacttctgccaagaggaatgcctgcgatgcgaatggatggatctgaacgatctggccaagacggagaatactaccccaatcacttccagagtcgcaagactactcctttatgggtacagagaaggctttgataaaattgacttaacagttgaagaactccccgcggtctacaccggcctattctataagctgtatcacaaagagctccccgagaattataaaactatgaagggcatcgactag

SEQ ID NO: 258831 - DNA, 444 bp, Artificial Sequence
  derived and/or modified sequence
atgtggaagttccccggcggcctgagcgagcccgaggaggacatcggtgataccgccgtaagagaggtgtttgaagagaccggcatcaagtccgagtttcgaagcgtgcttagtattcgccagcagcacacaaatcccggcgccttcggcaaaagcgatatgtacataatctgtagattgaaaccatattcatttaccattaatttctgtcaagaggagtgcctgcgatgtgagtggatggacctcaatgatctggccaagacagaaaatacaaccccgatcacatccagggtggcgcgattgctcttgtatggctaccgcgagggctttgacaaaattgatcttactgttgaggaactccccgctgtgtatactgggctgttctacaaattgtaccacaaggaattgcccgagaattataagaccatgaaggggatcgactag

SEQ ID NO: 258832 - DNA, 444 bp, Artificial Sequence
  derived and/or modified sequence
atgtggaaatttccaggtgggctgtctgagcccgaggaagatataggggataccgctgttagggaagtgttcgaagagactggtataaaatcagaattccggtctgtcttatccatcagacagcaacacacaaaccctggggcatttggtaaaagcgacatgtatatcatttgccgcctgaaaccttacagctttacaataaatttctgccaggaggagtgcctgcgatgcgagtggatggacttaaatgacctggccaagaccgaaaacacaactcctatcacaagccgagttgctcggctgctgctgtatggctaccgcgaaggattcgacaaaatcgacctcaccgtggaagagctcccggcagtgtacactggcctgttttacaaattataccataaggagctccccgagaattacaaaactatgaagggtatcgactag

SEQ ID NO: 258833 - DNA, 444 bp, Artificial Sequence
  derived and/or modified sequence
atgtggaagtttcctgggggattatctgagccagaggaggatattggagacacagccgtgcgggaggtgtttgaagagacggggattaagtcggaattcagaagtgtgctaagtatccggcaacagcacaccaatcctggtgccttcggtaaaagtgacatgtacattatatgccgactgaagccctattccttcacgatcaatttctgtcaggaggaatgtctcagatgtgagtggatggacttgaatgacttagccaagactgagaacactactccaatcaccagccgggtggcgagactgctgctttatgggtatagggagggcttcgataagatcgacctgaccgttgaagagctgcctgctgtttataccggcctcttctataagctttaccataaagaactgcccgaaaattacaagactatgaagggaattgactag

SEQ ID NO: 258834 - protein, 278 aa, Artificial Sequence
  derived and/or modified sequence
MALTVDVAGPAPWGFRITGGRDFHTPIMVTKVAERGKAKDADLRPGDIIVAINGESAEGMLHAEAQSKIRQSPSPLRLQLDRSQATSPGQTNGDSSLEVLATRFQGSVRTYTESQSSLRSSYSSPTSLSPRAGSPFSPPPSSSSLTGEAAISRSFQSLACSPGLPAADRLSYSGRPGSRQAGLGRAGDSAVLVLPPSPGPRSSRPSMDSEGGSLLLDEDSEVFKMLQENREGRAAPRQSSSFRLLQEALEAEERGTRLCASRRAGTATPAATPVPTVG

SEQ ID NO: 258835 - protein, 224 aa, Artificial Sequence
  derived and/or modified sequence
MALTVDVAGPAPWGFRITGGRDFHTPIMVTKVAERGKAKDADLRPGDIIVAINGESAEGMLHAEAQSKIRQSPSPLRLQLDRSQATSPGQTNGDSSLEVLATRFQGSVRTYTESQSSLRSSYSSPTSLSPRAGSPFSPPPSSSSLTGEAAISRSRPRPRWRLGGAGAAAFPGPSFLQAQHGLGRGKPPPGRGLGSLQDAAGKSRGTGGPPTVQLLSALAGSPGG

SEQ ID NO: 258836 - DNA, 837 bp, Artificial Sequence
  derived and/or modified sequence
atggcactgacagtagatgttgccggtcctgccccctggggtttccgcattactggcgggcgagactttcataccccaataatggtgacgaaagtcgccgagaggggaaaagccaaagacgccgatctgcgaccaggagatattatagtggctataaacggggagtcagcagaaggaatgcttcacgctgaagcacagagcaaaatcaggcaatccccaagccccctgagactccagctggacaggtcgcaggccaccagtccgggacagactaacggagatagttctctagaggtcctagccactcgcttccagggcagtgtgagaacttataccgaaagccagtcctctcttcgatctagctactcttcaccaacttccctaagcccacgggcagggagcccatttagtccccctccttcgagtagcagtttgactggggaagctgctataagccgatccttccagagcctggcctgcagtcctgggttgccagccgctgataggcttagttattctggtcgccctgggagcaggcaggccggtttaggcagagcaggggatagtgctgtgctcgtgctccctccctcgcccgggcccaggagctcccgtccctccatggacagcgagggaggatccctgctgctcgatgaagatagcgaggtgttcaaaatgctgcaggaaaatcgcgaggggcgggctgccccacgccagagttcaagtttcagactccttcaggaagccctggaggctgaagagcgcgggacgagactgtgtgcatctaggcgggccggaaccgcgactcccgctgccacacccgtgcctactgtgggatag

SEQ ID NO: 258837 - DNA, 675 bp, Artificial Sequence
  derived and/or modified sequence
atggccctgactgttgatgtggccggcccagccccatgggggttcagaatcacgggaggaagagacttccacacccctatcatggtgaccaaagtagccgagcggggcaaggctaaagacgctgacctgcggccaggtgacattatcgtggcgatcaatggcgaatccgcagagggtatgctgcacgctgaagctcagtctaaaattcgccagtctcctagtcccctgcgactccaattagacaggtcccaagccacatcccccggacagacgaacggtgacagtagtctcgaagtattggccactcggtttcagggcagcgtcagaacatatactgaaagccaaagcagccttcggtcatcctacagcagtccaacaagcctgtcaccccgagctggcagccctttctcccctccacctagcagctcctccctcactggcgaagcagcaatttcaagatctcgcccccggcctagatggcgacttgggggagccggcgctgccgcttttcctggcccgagcttcctgcaggcccaacacggcctcggtagaggtaagccccctcccggtcgtggcttgggctctctccaagacgccgctggtaaaagtcgtgggaccggcggaccaccaacggttcaactcctaagtgcactcgctggctcacctggcggctag

SEQ ID NO: 258838 - DNA, 837 bp, Artificial Sequence
  derived and/or modified sequence
atggcactgactgtcgatgtagccggtcctgccccttgggggttccgaatcacaggcggcagggacttccacaccccaatcatggtgacgaaggtggcagaaagaggtaaggcaaaggacgccgatctcaggcctggagatataatcgttgctatcaatggggaaagtgccgagggaatgctacatgctgaagcacaatcaaaaatccgccagagcccctctcccctgcgactgcagttggacagatcacaggctactagtcccggacagaccaatggggacagttcgctagaggtgttggctacccgattccaaggcagcgtgaggacatacactgaatcacaaagtagcctgaggagctcctactcttcaccgacgtccctgtcccctcgggcggggagcccttttagcccgccccctagcagtagctctctgacgggtgaggcggctatctcccgttctttccaatctctggcttgctcccccggactgcctgcagctgacaggctgagctattccggtcggccaggctcacgccaagccggactgggccgcgcgggcgatagcgctgttctggtgctgccacctagtccaggtccaagaagctccaggccaagtatggattctgaaggcgggtctctcctcttggacgaagatagcgaagtatttaagatgctgcaggagaatagggaaggacgggccgccccccggcagtcttcctcctttcggcttttgcaggaagccctggaagcagaggaacgcgggactcgactgtgtgcctcccggcgggccggaaccgctactccagcagcaacacctgtgcctacagtcggctag

SEQ ID NO: 258839 - DNA, 837 bp, Artificial Sequence
  derived and/or modified sequence
atggccctgactgtggatgtggccggccctgccccctggggcttccgcatcaccggcggccgggacttccacacccccatcatggtgaccaaggtggccgagcggggcaaggccaaggatgctgacctgcggcctggggacatcatcgtggccatcaatggagagagcgctgagggcatgctgcatgctgaggcccagagcaagatccggcagagccccagccccctgcggctgcagctggacaggagccaggccaccagccctggccagaccaacggggacagcagcctggaggtgctggccacccgcttccagggctctgtgaggacctacacagagagccagagcagcctgcggagcagctacagcagccccaccagcctgagcccccgggccggcagccccttcagccccccacccagcagcagcagcctgaccggggaggccgccatcagccgctccttccagagcctggcctgcagccctggcctgcctgctgctgaccggctgagctacagcggccggcccggcagccggcaggccggcctgggccgggccggggacagcgctgtgctggtgctgccccccagccctggccccaggagcagccggcccagcatggattctgagggcggcagcctgctgctggatgaggacagcgaggtgttcaagatgctgcaggagaaccgggagggccgggccgccccccggcagagcagcagcttccggctgctgcaggaggccctggaggccgaggagcggggcacccggctgtgtgccagccggcgggccggcacagccaccccagctgccacccctgtgcccaccgtgggctag

SEQ ID NO: 258840 - DNA, 675 bp, Artificial Sequence
  derived and/or modified sequence
atggccctgactgtggatgtggccggccctgccccctggggcttccgcatcaccggcggccgggacttccacacccccatcatggtgaccaaggtggccgagcggggcaaggccaaggatgctgacctgcggcctggggacatcatcgtggccatcaatggagagagcgctgagggcatgctgcatgctgaggcccagagcaagatccggcagagccccagccccctgcggctgcagctggacaggagccaggccaccagccctggccagaccaacggggacagcagcctggaggtgctggccacccgcttccagggctctgtgaggacctacacagagagccagagcagcctgcggagcagctacagcagccccaccagcctgagcccccgggccggcagccccttcagccccccacccagcagcagcagcctgaccggggaggccgccatcagccgcagccggccccggccccgctggaggctgggcggggccggggccgccgccttccctggccccagcttcctgcaggcccagcacggcctgggccggggcaagcccccacctggccggggcctgggcagcctgcaggatgctgctgggaagagccggggcaccggcggccccccaacagtgcagctgctgagcgccctggccggcagccctgggggctag

SEQ ID NO: 258841 - DNA, 837 bp, Artificial Sequence
  derived and/or modified sequence
atggccctgaccgtggacgtggccggccccgccccctggggcttccggatcacagggggcagagatttccacacgccaataatggtgacaaaagtggctgagcgggggaaagcgaaggacgcagaccttagacccggcgatatcatcgtagctatcaatggagagtccgccgagggcatgctgcatgccgaagcacagagtaaaattagacaaagtccgtcccctttacgactccagctggatcgctctcaggctacttccccaggacagacaaatggtgattccagtctggaggtgctggctaccaggttccagggtagtgtgcggacttataccgagtcccagtccagcctcagatcttcttacagctctcctacttcgctgagtccaagggctgggtcaccattttctccaccaccaagcagtagcagcctgaccggcgaggcagcaatcagcagatctttccagtcactcgcctgtagccccggattacctgctgccgatagactgtcatacagcggaaggcctgggagcagacaggcaggactgggacgggctggcgacagtgctgtgttggtgctgcctccaagtcctggacctagatcttcacggccgagcatggacagcgagggagggtcactgctgctggacgaggactccgaagttttcaaaatgttacaagagaatagagagggtagggcggctccccggcaatctagttctttccgcttgctgcaggaagccttagaggccgaagaaagagggaccaggttgtgtgccagccgcagagccggtactgctactccagctgctacaccagtgcccaccgtgggttag

SEQ ID NO: 258842 - DNA, 675 bp, Artificial Sequence
  derived and/or modified sequence
atggccctgaccgtggacgtggccggccccgccccctggggcttcaggatcactgggggccgtgatttccacacaccaatcatggttacaaaggtcgctgagaggggcaaagccaaagatgcggatctgaggccaggggatataatcgtcgccattaatggagagtctgctgaaggcatgttacatgctgaagctcagagtaaaattagacagtcccccagtccgctcaggctgcagctcgatcgaagccaggccacaagccccgggcagacaaatggcgactcctctctcgaagtgctcgctactcgttttcaaggatcagtgaggacctatacagagtctcagtcatccctgcgatcatcatactcttcccccacaagcctgtccccaagagccggatccccgtttagcccaccaccaagcagctcttcgcttacaggcgaggctgcaatatcgcggagtcgacctagaccacgctggagattaggcggcgccggagccgctgcctttcccgggccctcctttttgcaggcccagcacggtttaggtcgcgggaaaccccccccaggacgcggccttggtagcctgcaggacgctgctgggaagagccgggggaccggtggacctccaacggtccagctgctgtccgctcttgctgggtctcccggtggttag

SEQ ID NO: 258843 - DNA, 837 bp, Artificial Sequence
  derived and/or modified sequence
atggccctgaccgtggacgtggccggccccgccccctggggcttccgaatcaccggtggtcgggattttcacacgccaatcatggtgacaaaagtggctgaacggggcaaggccaaagatgccgatctgaggccgggcgatatcattgtcgcaatcaatggtgagtcagctgagggtatgctccatgccgaagctcaaagtaaaattcgacaaagcccctcacctttacggctccagttggataggtctcaggctacctctccagggcaaaccaatggggactcatctctagaggtgctagccacacgtttccaaggatcagtacggacatacactgaaagtcaaagtagcctgcgaagttcctactcgagccccacatccctgtctcctagggccggatctccattctccccccctccctccagctcttcgctgacaggtgaggctgccatctcccggagctttcagtctctggcatgctcccccgggctacctgcagctgacagactctcttactcgggccggcctggaagccgccaggctggattggggagagccggagatagtgcagtgctggtgctgccccccagccctggtcccaggagctcaagaccgagcatggacagtgaaggtggctcactgctcctagacgaggactccgaagtttttaaaatgctgcaggaaaaccgggaaggcagagccgcccccaggcaatcctccagcttcaggcttctgcaggaagcgttggaagcagaggagcgcggtacccgactgtgtgccagcagacgcgccggtacagcaacacccgctgcgactccagtccctaccgtggggtag

SEQ ID NO: 258844 - DNA, 837 bp, Artificial Sequence
  derived and/or modified sequence
atggcactcactgtggatgtagctgggccagccccatggggcttccgtattaccggtggcagggatttccacaccccgatcatggtgaccaaagttgcagagagggggaaggcaaaagatgctgatttaagacccggagacatcatcgtggctattaacggtgaaagtgctgaagggatgcttcacgcagaagcgcaatcaaagattaggcaaagccctagcccactgcgcctccagctcgatagatcccaggcgaccagtccgggacagacaaacggtgacagcagcctcgaagtcttagccacaaggttccaaggcagcgtcagaacctacaccgaaagccagagctccctgcgttcaagttattccagccctacatctctgtcccccagagccggaagccccttctccccccctccttcaagtagctccttaacaggagaggccgctatttcgcggtccttccaaagtctcgcctgttcgcctggtctgcccgctgcggaccggctcagctacagcggccgacctggctcaagacaagccggacttggtcgagcaggggactccgctgtgctggtgttacccccaagtcccggacccagatctagtcgcccatccatggactctgaaggaggcagccttctgctggatgaggattcggaggtcttcaagatgctacaggagaatcgggagggtagggctgccccacggcagtcctcatcatttaggcttttacaggaagcattagaggcggaagagagagggaccagactttgtgcttccagacgagccggaacagctacccccgctgccacaccggttcccacagtggggtag

SEQ ID NO: 258845 - DNA, 675 bp, Artificial Sequence
  derived and/or modified sequence
atggcgctgacagtagacgtggctgggccagccccatggggatttagaataacagggggtagagactttcatacccctatcatggtgactaaggtcgctgagcgcggaaaggcaaaggatgctgatctgcgccctggcgacattatcgtagccattaacggggagagtgccgagggcatgctacatgcagaggcacagtccaagattcggcagtctcctagccctctgcgtctccagctcgaccggagccaggccaccagccctggacagaccaatggagactcctcactcgaagtcttagctacgagattccaaggatcggtccggacctatacagagtctcagagttcgttgcggagctcgtactctagccctactagcctgtcccccagagccggtagtccctttagcccaccaccctcctcatctagtcttaccggggaggccgctatttctaggtcgcgcccacgcccacgttggcgattgggcggagccggagccgctgccttccctggaccatcgtttcttcaagctcagcacgggcttggtagaggaaagcctccccctggacgaggtcttggtagcctccaagatgctgccggaaagtctcggggaactggtgggccacccaccgtgcagctgttaagcgccctggccggatcgcccggaggctag

SEQ ID NO: 258846 - DNA, 837 bp, Artificial Sequence
  derived and/or modified sequence
atggccctcaccgtggatgtagcaggacctgccccatggggatttagaataacaggcggacgggactttcatacaccaatcatggtgaccaaggtggcagaacggggtaaagcaaaagatgcagacctcagacctggagacatcatcgtggctatcaacggtgaatccgccgagggtatgttgcatgcagaggcccagtccaagattcgacagtcaccttcgcccctccgactgcagcttgatcgctcacaagccacctcgcccggtcagacaaacggagactcttcccttgaggtgctggccaccaggttccaggggtctgtaaggacctataccgagtcacagtcttcactgaggtcctcatattctagccccacttctttatcccctagagctggctcccccttctctccaccaccatcttcctcatcgctgactggggaggccgcaattagcaggtccttccaatctcttgcttgctctcctggcctgcctgctgcggaccgcctgtcctattctgggagacctggttctaggcaggccggtttgggtcgggctggcgacagcgctgtcctagttctgccaccttccccaggacctcgttcatcaaggccaagcatggatagcgagggaggaagcctgcttttggatgaagattccgaagtgttcaaaatgctccaggagaaccgagaaggccgagctgccccacgacagtctagtagcttcaggcttctacaggaggcactggaggccgaagagagaggcacccgcctttgcgctagtaggcgcgcagggactgccacacccgcagccacccccgtgccgacagtggggtag

SEQ ID NO: 258847 - DNA, 837 bp, Artificial Sequence
  derived and/or modified sequence
atggccctgaccgtggacgtggccggccccgccccctggggcttcagaatcaccggcggcagagacttccacacccccatcatggtgaccaaggtggccgagagaggcaaggccaaggacgccgacctgagacccggcgacatcatcgtggccatcaacggcgagagcgccgagggcatgctgcacgccgaggcccagagcaagatcagacagagccccagccccctgagactgcagctggacagaagccaggccaccagccccggccagaccaacggcgacagcagcctggaggtgctggccaccagattccagggcagcgtgagaacctacaccgagagccagagcagcctgagaagcagctacagcagccccaccagcctgagccccagagccggcagccccttcagccccccccccagcagcagcagcctgaccggcgaggccgccatcagcagaagcttccagagcctggcctgcagccccggcctgcccgccgccgacagactgagctacagcggcagacccggcagcagacaggccggcctgggcagagccggcgacagcgccgtgctggtgctgccccccagccccggccccagaagcagcagacccagcatggacagcgagggcggcagcctgctgctggacgaggacagcgaggtgttcaagatgctgcaggagaacagagagggcagagccgcccccagacagagcagcagcttcagactgctgcaggaggccctggaggccgaggagagaggcaccagactgtgcgccagcagaagagccggcaccgccacccccgccgccacccccgtgcccaccgtgggctag

SEQ ID NO: 258848 - DNA, 675 bp, Artificial Sequence
  derived and/or modified sequence
atggccctgaccgtggacgtggccggccccgccccctggggcttcagaatcaccggcggcagagacttccacacccccatcatggtgaccaaggtggccgagagaggcaaggccaaggacgccgacctgagacccggcgacatcatcgtggccatcaacggcgagagcgccgagggcatgctgcacgccgaggcccagagcaagatcagacagagccccagccccctgagactgcagctggacagaagccaggccaccagccccggccagaccaacggcgacagcagcctggaggtgctggccaccagattccagggcagcgtgagaacctacaccgagagccagagcagcctgagaagcagctacagcagccccaccagcctgagccccagagccggcagccccttcagccccccccccagcagcagcagcctgaccggcgaggccgccatcagcagaagcagacccagacccagatggagactgggcggcgccggcgccgccgccttccccggccccagcttcctgcaggcccagcacggcctgggcagaggcaagcccccccccggcagaggcctgggcagcctgcaggacgccgccggcaagagcagaggcaccggcggcccccccaccgtgcagctgctgagcgccctggccggcagccccggcggctag

SEQ ID NO: 258849 - protein, 338 aa, Artificial Sequence
  derived and/or modified sequence
MGQREMWRLMSRFNAFKRTNTILHHLRMSKHTDAAEEVLLEKKGCTGVITLNRPKFLNALTLNMIRQIYPQLKKWEQDPETFLIIIKGAGGKAFCAGGDIRVISEAEKAKQKIAPVFFREEYMLNNAVGSCQKPYVALIHGITMGGGVGLSVHGQFRVATEKCLFAMPETAIGLFPDVGGGYFLPRLQGKLGYFLALTGFRLKGRDVYRAGIATHFVDSEKLAMLEEDLLALKSPSKENIASVLENYHTESKIDRDKSFILEEHMDKINSCFSANTVEEIIENLQQDGSSFALEQLKVINKMSPTSLKITLRQLMEGSSKTLQEVLTMEYRLSQACMF

SEQ ID NO: 258850 - DNA, 1017 bp, Artificial Sequence
  derived and/or modified sequence
atgggccagcgcgagatgtggcgactgatgagccgctttaacgcgtttaagagaacaaacaccattcttcaccatctgaggatgtcaaagcacactgacgcagcagaagaggttctcctcgaaaagaaaggttgcaccggggtgataacattaaatcggcctaagtttctcaatgctctgacactcaatatgatcaggcagatttatccccagcttaaaaagtgggaacaggatcctgagactttcctgattatcattaagggagctggtggcaaagcattctgtgctggcggtgacattcgggtcataagtgaggctgagaaagctaaacaaaagattgctccggtcttctttcgtgaagagtatatgctcaataatgctgtcggcagctgccagaagccttatgtcgccttaatccacggtatcaccatggggggaggggtgggcctcagcgtccacggccagttccgggtagcaaccgagaagtgcttattcgcaatgccagagaccgccatcggacttttccccgacgtgggcggcggatactttctgccgcgtctccagggcaaactgggctactttctggcactaactggtttccggctgaagggtagggatgtctacagggccgggattgccacacacttcgttgacagcgagaagttagcaatgcttgaggaggacctcttagctctcaaatcccctagcaaagagaatatcgcttccgtcctggagaattatcatacagaaagtaagatcgaccgggacaaatcattcattttggaggagcacatggacaaaataaattcctgtttttccgctaacactgttgaggaaataattgaaaacttgcagcaggacggctcgagtttcgccctggaacagctcaaggtgatcaataagatgagtcctaccagcttgaagatcactttgcgacaactgatggaggggtcatctaaaacactgcaggaggtcctcaccatggaataccgactctcgcaggcgtgcatgttttag

SEQ ID NO: 258851 - DNA, 1017 bp, Artificial Sequence
  derived and/or modified sequence
atgggccagcgggagatgtggaggctgatgagccgcttcaatgccttcaagaggaccaacaccatcctgcaccacctgaggatgagcaagcacacagatgctgctgaggaggtgctgctggagaagaagggctgcaccggggtcatcaccctgaaccggcccaagttcctgaatgccctgaccctgaacatgatccggcagatctacccccagctgaagaagtgggagcaggaccctgagaccttcctgatcatcatcaagggagctgggggcaaggccttctgtgccggcggggacatccgggtcatcagcgaggccgagaaggccaagcagaagatcgcccctgtgttcttccgggaggagtacatgctgaacaatgctgtgggcagctgccagaagccctacgtggccctgatccacggcatcaccatgggcggcggcgtgggcctgtctgtgcacggccagttccgggtggccacagagaagtgcctgtttgccatgcctgagacagccatcggcctcttcccagatgtgggcggcggctacttcctgccccggctgcagggcaagctgggctacttcctggccctgaccggcttccggctgaagggcagagatgtgtaccgggccggcatcgccacccactttgtggacagcgagaagctggccatgctggaggaggacctgctggccctgaagagccccagcaaggagaacatcgcctctgtgctggagaactaccacacagagagcaagattgaccgggacaagagcttcatcctggaggagcacatggacaagatcaacagctgcttcagcgccaacacagtggaggagatcatcgagaacctgcagcaggacggcagcagctttgccctggagcagctgaaggtgatcaacaagatgagccccaccagcctgaagatcaccctgcggcagctgatggagggcagcagcaagaccctgcaggaggtgctgaccatggagtaccgcctgagccaggcctgcatgttttag

SEQ ID NO: 258852 - DNA, 1017 bp, Artificial Sequence
  derived and/or modified sequence
atgggccagcgggagatgtggcggctgatgagccggttcaacgcctttaagcggacaaatacaatcttacatcatctgagaatgtccaagcacacagacgcggcagaggaggtcctgctcgagaagaaggggtgcacaggagtgatcaccctgaaccggcctaagttcctgaacgccctaacgctgaatatgattcggcagatttatcctcaactgaaaaaatgggagcaggatcctgagactttcctcattattatcaaaggggcaggaggaaaagccttctgtgcgggtggtgatatacgggtcatctcagaggccgagaaggcgaagcagaagattgcccccgtcttcttccgcgaggaatacatgttgaacaacgctgtaggatcctgccaaaaaccatatgtggcccttatccacggtattaccatgggtgggggcgtgggcctgagcgtgcatggacaatttagggttgctacagaaaaatgtctctttgcaatgcccgaaacagctatagggctgtttccggacgtgggcggcggctattttctgcctaggctgcaaggaaagctaggctattttttagctcttactggcttccgcttgaaagggagggacgtatatagggctggtatcgcgacccattttgtggacagcgagaagctggctatgcttgaggaggatctgttagctcttaagtccccttccaaggagaacattgcaagtgtcttagaaaactatcatacggaatctaaaatagaccgagataagagctttattctggaagagcacatggacaagattaactcatgcttttctgccaataccgttgaggagattatcgaaaacctccaacaagacggctccagttttgccctggagcagttgaaagtgatcaacaagatgagtccgacctccctgaagataactctgcgccagctcatggaagggtcttctaagacgttgcaggaggtgttgactatggagtacagactctcacaggcatgtatgttctag

SEQ ID NO: 258853 - DNA, 1017 bp, Artificial Sequence
  derived and/or modified sequence
atgggccagcgcgagatgtggcgcttaatgtcaaggtttaacgccttcaagaggaccaacaccatcctgcaccatctgcgcatgagcaagcacactgatgccgctgaggaggtgctactcgaaaaaaaaggctgtacgggggtgattacgctaaatcgtcccaagtttcttaatgctcttaccctgaacatgattcggcagatctatccgcaattgaagaaatgggagcaagacccagagacttttcttattatcataaagggcgctggcggtaaggctttctgcgcaggcggtgatataagagtgatttccgaagcagagaaagctaagcagaaaatcgcccctgtgtttttccgagaggagtatatgttgaacaatgccgtgggctcatgccagaaaccgtatgttgctctcatccacggcattactatgggaggcggagtgggcctgtcagttcacggccagttccgcgtcgcgacagagaagtgtttgttcgccatgccagagaccgcaattggactttttcccgatgtcggcggtggttattttctgccccgtctgcaaggcaagctaggctactttctggcactcaccggtttcaggctgaaagggagagacgtttaccgtgcaggaatcgccactcatttcgtcgacagcgaaaagttggccatgctggaggaggatctgcttgccctgaagagtcctagtaaggaaaacatcgcttccgtcttagaaaactaccacaccgagtcaaagatagacagggataagtccttcatcctggaggagcatatggataaaatcaattcctgcttctccgccaacaccgtggaggaaatcatcgaaaacctgcaacaggacggatcttcatttgccctggaacagctcaaagttatcaataagatgagccctacatccctgaagatcactctacggcaacttatggaaggctcttccaaaactctgcaggaggttttaactatggaatatcgcctgtcacaagcttgcatgttttag

SEQ ID NO: 258854 - DNA, 2463 bp, Artificial Sequence
  derived and/or modified sequence
ggaaacggtcgctctggcttcctggaggacttgtcatctgtgcccggcggcgcaggacggcggtgggcggggctcacgcgaggcgctggaacggtccgggagattctcgctctgctgctttagcttcggagtgtttggcgatggggcagcgcgagatgtggaggctcatgtcgaggtttaatgcattcaaaaggactaataccatactgcaccatttgagaatgtccaagcacacagatgcagcagaagaggtgctattggaaaaaaaaggttgcacgggagtcataacactaaacagaccaaagttcctcaatgcactgactcttaatatgattcggcagatttatccacagctaaagaagtgggaacaagatcctgaaactttcctgatcattataaagggagcaggaggaaaggctttctgtgccgggggtgatatcagagtgatctcggaagctgaaaaggcaaaacagaagatagctccagttttcttcagagaagaatatatgctgaataatgctgttggttcttgccagaaaccttatgttgcacttattcatggaattacaatgggtgggggagttggtctctcagtccatgggcaatttcgagtggctacagaaaagtgtctttttgctatgccagaaactgcaataggactgttccctgatgtgggtggaggttatttcttgccacgactccaaggaaaacttggttacttccttgcattaacaggattcagactaaaaggaagagatgtgtacagagcaggaattgctacacactttgtagattctgaaaagttggccatgttagaggaagatttgttagccttgaaatctccttcaaaagaaaatattgcatctgtcttagaaaattaccatacagagtctaagattgatcgagacaagtcttttatacttgaggaacacatggacaaaataaacagttgtttttcagccaatactgtggaagaaattattgaaaacttacagcaagatggttcatcttttgccctagagcaattgaaggtaattaataaaatgtctccaacatctctaaagatcacactaaggcaactcatggaggggtcttcaaagaccttgcaagaagtactaactatggagtatcggctaagtcaagcttgtatgttttaattgataaagaccagagtccaaaatggaaaccagctgatctaaaagaagttactgaggaagatttgaataatcactttaagtctttgggaagcagtgatttgaaattttgaggtgacaggcttttaaggtatattttgtagcatgggttggcaatctacagcatgtgggccaaatccagcctgctgcctgtttttatataccctgtaagctaagaatggtttccgcatttttaaatggttgggaaaagaaatcaaagactaataattcatgacgtgaaaattatcagaattcacaaataaagctttattggaactagctatactcatctgtttatatattatctgtggctgctttgaaatgagtagttgcaatagagatggtaaagcctacaaagcctaattatttactgtctggtttttgtcagaaaaaagtttgtcaatccttgttttagaagatggaaaaatgtgaagatctttggagattctcttgagtggtatatctaattgaaatgggatcttcgtttggcttgtatgttgatgaaatcaacttaggtatacaatataaaaaataaagaccctgaaaattgttttggatactgtgttaatgcctcatagaatttttgttttggatactgtgttaatgcctcatagaattttctccatatatgagtgtgttttaaagtaactgagttactgtagcagaagagctccttttataaacattagaaaccttgggcagagagaaaagatttttattaacgtccctcttcagtattaactcagacttggtcttccctaaaataatcagaataccatcccatggtgaaactgaaaggattattttcttgttatttgtgatatttgttaatctggtagaatgagaaattaggaaactccaatctcttagatagagacactctgtttttttataatttacgtaagacttttgtgtgataattatccttacaaacaaggttcaagtcaggagaaaaaaattaattgaaagcaagaagacttttgttcaaaagatatattcaataattgatattgttaatgaagtaagtactttttaaggtatgaaagaactaaaaggtattccagactcagaaccttaaagttctaggcaagaataatttttaaactaaaggtaagtttataaattaacaaagtaaacaaaatttatgattttgttttttgtttgtaatttttgtttaattttaaaggtaagtttataaattaacaaacaaaatttataattttttgtttgtaatttttgtttataaacaaaataaattttttgtaacttg

SEQ ID NO: 258855 - DNA, 1017 bp, Artificial Sequence
  derived and/or modified sequence
atgggccagagagagatgtggagactgatgagcagattcaacgccttcaagagaaccaacaccatcctgcaccacctgagaatgagcaagcacaccgacgccgccgaggaggtgctgctggagaagaagggctgcaccggcgtgatcaccctgaacagacccaagttcctgaacgccctgaccctgaacatgatcagacagatctacccccagctgaagaagtgggagcaggaccccgagaccttcctgatcatcatcaagggcgccggcggcaaggccttctgcgccggcggcgacatcagagtgatcagcgaggccgagaaggccaagcagaagatcgcccccgtgttcttcagagaggagtacatgctgaacaacgccgtgggcagctgccagaagccctacgtggccctgatccacggcatcaccatgggcggcggcgtgggcctgagcgtgcacggccagttcagagtggccaccgagaagtgcctgttcgccatgcccgagaccgccatcggcctgttccccgacgtgggcggcggctacttcctgcccagactgcagggcaagctgggctacttcctggccctgaccggcttcagactgaagggcagagacgtgtacagagccggcatcgccacccacttcgtggacagcgagaagctggccatgctggaggaggacctgctggccctgaagagccccagcaaggagaacatcgccagcgtgctggagaactaccacaccgagagcaagatcgacagagacaagagcttcatcctggaggagcacatggacaagatcaacagctgcttcagcgccaacaccgtggaggagatcatcgagaacctgcagcaggacggcagcagcttcgccctggagcagctgaaggtgatcaacaagatgagccccaccagcctgaagatcaccctgagacagctgatggagggcagcagcaagaccctgcaggaggtgctgaccatggagtacagactgagccaggcctgcatgttctag

SEQ ID NO: 258856 - protein, 164 aa, Artificial Sequence
  derived and/or modified sequence
MKWKALFTAAILQAQLPITEAQSFGLLDPKLCYLLDGILFIYGVILTALFLRVKFSRSADAPAYQQGQNQLYNELNLGRREEYDVLDKRRGRDPEMGGKPQRRKNPQEGLYNELQKDKMAEAYSEIGMKGERRRGKGHDGLYQGLSTATKDTYDALHMQALPPR

SEQ ID NO: 258857 - DNA, 495 bp, Artificial Sequence
  derived and/or modified sequence
atgaagtggaaggctttatttaccgccgcgatcctgcaggcccagctgcccatcactgaggcacagtcttttggcctccttgacccaaaactgtgctatctgttggacggaatcctttttatctatggcgtcatccttacagcgctgttcctcagggtcaagttcagtagatctgcagatgctccagcctaccaacagggacagaaccagctttataacgagctcaacctgggtagacgggaagaatacgatgtgttagataaacgaaggggacgagacccggaaatgggcggaaagccccagcgccggaagaacccccaggaggggttatacaacgagctgcagaaggacaaaatggctgaggcgtactctgagattggaatgaagggggagcgacggcgggggaaaggtcacgacggtctttatcaaggccttagcaccgccacgaaggatacctacgatgctcttcacatgcaagccttgcctccaagatag

SEQ ID NO: 258858 - DNA, 495 bp, Artificial Sequence
  derived and/or modified sequence
atgaagtggaaggccctcttcaccgctgccatcctgcaggcccagctgcccatcacagaggcccagagctttggcctgctggaccccaagctgtgctacctgctggatggcatcctcttcatctacggcgtcatcctgacagccctcttcctgcgggtgaagttcagccgctctgcagatgccccagcctaccagcagggccagaaccagctgtacaatgagctgaacctgggcagaagagaggagtatgatgtgctggacaagagaagaggccgggaccctgagatgggcggcaagccccagaggaggaagaacccccaggagggcctgtacaatgagctgcagaaggacaagatggccgaggcctacagcgagatcggcatgaagggggagaggagaagaggcaagggccatgatggcctgtaccagggcctgagcacagccaccaaggacacctatgatgccctgcacatgcaggccctgccccccaggtag

SEQ ID NO: 258859 - DNA, 495 bp, Artificial Sequence
  derived and/or modified sequence
atgaagtggaaggccctgttcaccgccgccatcctgcaggcccagctacccatcactgaagctcagtccttcggactcctagacccgaaactatgctacttgcttgatggcatcctgtttatttacggagtgatcttgaccgctctgtttctgagagttaaattctccagatcggccgacgccccagcctatcagcagggccagaaccaactatacaacgaactcaacctagggaggagagaagaatatgatgttcttgacaaacgccggggtcgggatccagagatgggcggtaagccacagcggcgaaaaaacccacaggaagggctctacaacgagctccagaaagataagatggcagaagcctattccgagattggaatgaaaggggagaggcgccgggggaaggggcacgacggcttgtaccagggactatctacagccactaaagacacgtatgacgcactgcacatgcaggcgctgccgcccagatag

SEQ ID NO: 258860 - DNA, 495 bp, Artificial Sequence
  derived and/or modified sequence
atgaaatggaaggctctgtttacagctgcaatactccaggcgcagctccctatcaccgaagcccagagctttggactgctcgatcctaagctgtgttatctgctggatggtattctgttcatctacggcgtcattctgacggccttattcctgcgggtgaagttttctagatcagctgatgccccagcgtaccagcagggccagaaccagctgtataatgaacttaacctgggcagaagggaggagtatgatgttttggataaaagacgcggacgtgatcccgaaatgggcggtaagcctcagagaaggaagaacccacaggaaggattgtataatgagttgcagaaggataagatggcggaggcctactccgaaattggaatgaagggtgaacgcagacggggaaagggccatgatggattgtaccagggactatccaccgcaacaaaagacacgtatgacgcgctgcacatgcaggcgctgcctcctagatag

SEQ ID NO: 258861 - DNA, 1609 bp, Artificial Sequence
  derived and/or modified sequence
ttttctcctaaccgtcccggccaccgctgcctcagcctctgcctcccagcctctttctgagggaaaggacaagatgaagtggaaggcgcttttcaccgcggccatcctgcaggcacagttgccgattacagaggcacagagctttggcctgctggatcccaaactctgctacctgctggatggaatcctcttcatctatggtgtcattctcactgccttgttcctgagagtgaagttcagcaggagcgcagacgcccccgcgtaccagcagggccagaaccagctctataacgagctcaatctaggacgaagagaggagtacgatgttttggacaagagacgtggccgggaccctgagatggggggaaagccgcagagaaggaagaaccctcaggaaggcctgtacaatgaactgcagaaagataagatggcggaggcctacagtgagattgggatgaaaggcgagcgccggaggggcaaggggcacgatggcctttaccagggtctcagtacagccaccaaggacacctacgacgcccttcacatgcaggccctgccccctcgctaacagccaggggatttcaccactcaaaggccagacctgcagacgcccagattatgagacacaggatgaagcatttacaacccggttcactcttctcagccactgaagtattcccctttatgtacaggatgctttggttatatttagctccaaaccttcacacacagactgttgtccctgcactctttaagggagtgtactcccagggcttacggccctggccttgggccctctggtttgccggtggtgcaggtagacctgtctcctggcggttcctcgttctccctgggaggcgggcgcactgcctctcacagctgagttgttgagtctgttttgtaaagtccccagagaaagcgcagatgctagcacatgccctaatgtctgtatcactctgtgtctgagtggcttcactcctgctgtaaatttggcttctgttgtcaccttcacctcctttcaaggtaactgtactgggccatgttgtgcctccctggtgagagggccgggcagaggggcagatggaaaggagcctaggccaggtgcaaccagggagctgcaggggcatgggaaggtgggcgggcaggggagggtcagccagggcctgcgagggcagcgggagcctccctgcctcaggcctctgtgccgcaccattgaactgtaccatgtgctacaggggccagaagatgaacagactgaccttgatgagctgtgcacaaagtggcataaaaaacatgtggttacacagtgtgaataaagtgctgcggagcaagaggaggccgttgattcacttcacgctttcagcgaatgacaaaatcatctttgtgaaggcctcgcaggaagacccaacacatgggacctataactgcccagcggacagtggcaggacaggaaaaacccgtcaatgtactaggatactgctgcgtcattacagggcacaggccatggatggaaaacgctctctactctgctttttttctactgttttaatttatactggcatgctaaagccttcctattttgcataataaatgcttcagtgaaaatgca

SEQ ID NO: 258862 - DNA, 495 bp, Artificial Sequence
  derived and/or modified sequence
atgaagtggaaggccctgttcaccgccgccatcctgcaggcccagctgcccatcaccgaggcccagagcttcggcctgctggaccccaagctgtgctacctgctggacggcatcctgttcatctacggcgtgatcctgaccgccctgttcctgagagtgaagttcagcagaagcgccgacgcccccgcctaccagcagggccagaaccagctgtacaacgagctgaacctgggcagaagagaggagtacgacgtgctggacaagagaagaggcagagaccccgagatgggcggcaagccccagagaagaaagaacccccaggagggcctgtacaacgagctgcagaaggacaagatggccgaggcctacagcgagatcggcatgaagggcgagagaagaagaggcaagggccacgacggcctgtaccagggcctgagcaccgccaccaaggacacctacgacgccctgcacatgcaggccctgccccccagatag

SEQ ID NO: 258863 - protein, 200 aa, Artificial Sequence
  derived and/or modified sequence
MAQSKLDCRSPVGLDCCNCCLDLAHRSGLQRGSSGENNNPGSPTVSNFRQLQEKLVFENLNTDKLNSIMRQDSLEPVLRDPCYLINEGICNRNIDQTMLSILLFFHSASGASVVAIDNKIEQAMDLVKNHLMYAVREEVEILKEQIRELVEKNSQLERENTLLKTLASPEQLEKFQSCLSPEEPAPESPQVPEAPGGSAV

SEQ ID NO: 258864 - protein, 179 aa, Artificial Sequence
  derived and/or modified sequence
MAQSKLDCRSPVGLDCCNCCLDLAHRSGLQRGSSGENNNPGSPTVSNFRQDSLEPVLRDPCYLINEGICNRNIDQTMLSILLFFHSASGASVVAIDNKIEQAMDLVKNHLMYAVREEVEILKEQIRELVEKNSQLERENTLLKTLASPEQLEKFQSCLSPEEPAPESPQVPEAPGGSAV

SEQ ID NO: 258865 - protein, 123 aa, Artificial Sequence
  derived and/or modified sequence
MAQSKLDCRSPVGLDCCNCCLDLAHRSGLQRGSSGENNNPGSPTVSNFRQLQEKLVFENLNTDKLNSIMRQDSLEPVLRDPCYLINEGICNRNIDQTMLSILLFFHSASGASVVAIDNKIEQA

SEQ ID NO: 258866 - protein, 116 aa, Artificial Sequence
  derived and/or modified sequence
MAQSKLDCRSPVGLDCCNCCLDLAHRSGLQRGSSGENNNPGSPTVSNFRQLQEKLVFENLNTDKLNSIMRQDSLEPVLRDPCYLINEGICNRNIDQTMLSILLFFHSASGASVVAI

SEQ ID NO: 258867 - protein, 58 aa, Artificial Sequence
  derived and/or modified sequence
MAQSKLDCRSPVGLDCCNCCLDLAHRSGLQRGSSGENNNPGSPTVSNFRQLQEKLVFE

SEQ ID NO: 258868 - protein, 84 aa, Artificial Sequence
  derived and/or modified sequence
MAQSKLDCRSPVGLDCCNCCLDLAHRSGLQRGSSGENNNPGSPTVSNFRQLQEKLVFENLNTDKLNSIMRQDSLEPVLRDPCYL

SEQ ID NO: 258869 - protein, 100 aa, Artificial Sequence
  derived and/or modified sequence
MAQSKLDCRSPVGLDCCNCCLDLAHRSGLQRGSSGENNNPGSPTVSNFRQLQEKLVFENLNTDKLNSIMRQDSLEPVLRDPCYLINEGICNRNIDQTMLS

SEQ ID NO: 258870 - protein, 119 aa, Artificial Sequence
  derived and/or modified sequence
MAQSKLDCRSPVGLDCCNCCLDLAHRSGLQRGSSGENNNPGSPTVSNFRQLQEKLVFENLNTDKLNSIMRQDSLEPVLRDPCYLINEGICNRNIDQTMLSILLFFHSASGASVVAIDNK

SEQ ID NO: 258871 - protein, 132 aa, Artificial Sequence
  derived and/or modified sequence
MRQDSLEPVLRDPCYLINEGICNRNIDQTMLSILLFFHSASGASVVAIDNKIEQAMDLVKNHLMYAVREEVEILKEQIRELVEKNSQLERENTLLKTLASPEQLEKFQSCLSPEEPAPESPQVPEAPGGSAV

SEQ ID NO: 258872 - protein, 124 aa, Artificial Sequence
  derived and/or modified sequence
MAQSKLDCRSPVGLDCCNCCLDLAHRSGLQRGSSGENNNPGSPTVSNFRQLQEKLVFENLNTDKLNSIMRQDSLEPVLRDPCYLINEGICNRNIDQTMLSILLFFHSASGASVVAIDNKIEQAM

SEQ ID NO: 258873 - DNA, 603 bp, Artificial Sequence
  derived and/or modified sequence
atggcccagagcaagctggactgcagaagccccgtgggcctggactgctgcaactgctgcctggacctggcccacagaagcggcctgcagagaggcagcagcggcgagaacaacaaccccggcagccccaccgtgagcaacttcagacagctgcaggagaagctggtgttcgagaacctgaacaccgacaagctgaacagcatcatgagacaggacagcctggagcccgtgctgagagacccctgctacctgatcaacgagggcatctgcaacagaaacatcgaccagaccatgctgagcatcctgctgttcttccacagcgccagcggcgccagcgtggtggccatcgacaacaagatcgagcaggccatggacctggtgaagaaccacctgatgtacgccgtgagagaggaggtggagatcctgaaggagcagatcagagagctggtggagaagaacagccagctggagagagagaacaccctgctgaagaccctggccagccccgagcagctggagaagttccagagctgcctgagccccgaggagcccgcccccgagagcccccaggtgcccgaggcccccggcggcagcgccgtgtag

SEQ ID NO: 258874 - DNA, 540 bp, Artificial Sequence
  derived and/or modified sequence
atggcccagagcaagctggactgcagaagccccgtgggcctggactgctgcaactgctgcctggacctggcccacagaagcggcctgcagagaggcagcagcggcgagaacaacaaccccggcagccccaccgtgagcaacttcagacaggacagcctggagcccgtgctgagagacccctgctacctgatcaacgagggcatctgcaacagaaacatcgaccagaccatgctgagcatcctgctgttcttccacagcgccagcggcgccagcgtggtggccatcgacaacaagatcgagcaggccatggacctggtgaagaaccacctgatgtacgccgtgagagaggaggtggagatcctgaaggagcagatcagagagctggtggagaagaacagccagctggagagagagaacaccctgctgaagaccctggccagccccgagcagctggagaagttccagagctgcctgagccccgaggagcccgcccccgagagcccccaggtgcccgaggcccccggcggcagcgccgtgtag

SEQ ID NO: 258875 - DNA, 372 bp, Artificial Sequence
  derived and/or modified sequence
atggcccagagcaagctggactgcagaagccccgtgggcctggactgctgcaactgctgcctggacctggcccacagaagcggcctgcagagaggcagcagcggcgagaacaacaaccccggcagccccaccgtgagcaacttcagacagctgcaggagaagctggtgttcgagaacctgaacaccgacaagctgaacagcatcatgagacaggacagcctggagcccgtgctgagagacccctgctacctgatcaacgagggcatctgcaacagaaacatcgaccagaccatgctgagcatcctgctgttcttccacagcgccagcggcgccagcgtggtggccatcgacaacaagatcgagcaggcctag

SEQ ID NO: 258876 - DNA, 351 bp, Artificial Sequence
  derived and/or modified sequence
atggcccagagcaagctggactgcagaagccccgtgggcctggactgctgcaactgctgcctggacctggcccacagaagcggcctgcagagaggcagcagcggcgagaacaacaaccccggcagccccaccgtgagcaacttcagacagctgcaggagaagctggtgttcgagaacctgaacaccgacaagctgaacagcatcatgagacaggacagcctggagcccgtgctgagagacccctgctacctgatcaacgagggcatctgcaacagaaacatcgaccagaccatgctgagcatcctgctgttcttccacagcgccagcggcgccagcgtggtggccatctag

SEQ ID NO: 258877 - DNA, 177 bp, Artificial Sequence
  derived and/or modified sequence
atggcccagagcaagctggactgcagaagccccgtgggcctggactgctgcaactgctgcctggacctggcccacagaagcggcctgcagagaggcagcagcggcgagaacaacaaccccggcagccccaccgtgagcaacttcagacagctgcaggagaagctggtgttcgagtag

SEQ ID NO: 258878 - DNA, 255 bp, Artificial Sequence
  derived and/or modified sequence
atggcccagagcaagctggactgcagaagccccgtgggcctggactgctgcaactgctgcctggacctggcccacagaagcggcctgcagagaggcagcagcggcgagaacaacaaccccggcagccccaccgtgagcaacttcagacagctgcaggagaagctggtgttcgagaacctgaacaccgacaagctgaacagcatcatgagacaggacagcctggagcccgtgctgagagacccctgctacctgtag

SEQ ID NO: 258879 - DNA, 303 bp, Artificial Sequence
  derived and/or modified sequence
atggcccagagcaagctggactgcagaagccccgtgggcctggactgctgcaactgctgcctggacctggcccacagaagcggcctgcagagaggcagcagcggcgagaacaacaaccccggcagccccaccgtgagcaacttcagacagctgcaggagaagctggtgttcgagaacctgaacaccgacaagctgaacagcatcatgagacaggacagcctggagcccgtgctgagagacccctgctacctgatcaacgagggcatctgcaacagaaacatcgaccagaccatgctgagctag

SEQ ID NO: 258880 - DNA, 360 bp, Artificial Sequence
  derived and/or modified sequence
atggcccagagcaagctggactgcagaagccccgtgggcctggactgctgcaactgctgcctggacctggcccacagaagcggcctgcagagaggcagcagcggcgagaacaacaaccccggcagccccaccgtgagcaacttcagacagctgcaggagaagctggtgttcgagaacctgaacaccgacaagctgaacagcatcatgagacaggacagcctggagcccgtgctgagagacccctgctacctgatcaacgagggcatctgcaacagaaacatcgaccagaccatgctgagcatcctgctgttcttccacagcgccagcggcgccagcgtggtggccatcgacaacaagtag

SEQ ID NO: 258881 - DNA, 399 bp, Artificial Sequence
  derived and/or modified sequence
atgagacaggacagcctggagcccgtgctgagagacccctgctacctgatcaacgagggcatctgcaacagaaacatcgaccagaccatgctgagcatcctgctgttcttccacagcgccagcggcgccagcgtggtggccatcgacaacaagatcgagcaggccatggacctggtgaagaaccacctgatgtacgccgtgagagaggaggtggagatcctgaaggagcagatcagagagctggtggagaagaacagccagctggagagagagaacaccctgctgaagaccctggccagccccgagcagctggagaagttccagagctgcctgagccccgaggagcccgcccccgagagcccccaggtgcccgaggcccccggcggcagcgccgtgtag

SEQ ID NO: 258882 - DNA, 375 bp, Artificial Sequence
  derived and/or modified sequence
atggcccagagcaagctggactgcagaagccccgtgggcctggactgctgcaactgctgcctggacctggcccacagaagcggcctgcagagaggcagcagcggcgagaacaacaaccccggcagccccaccgtgagcaacttcagacagctgcaggagaagctggtgttcgagaacctgaacaccgacaagctgaacagcatcatgagacaggacagcctggagcccgtgctgagagacccctgctacctgatcaacgagggcatctgcaacagaaacatcgaccagaccatgctgagcatcctgctgttcttccacagcgccagcggcgccagcgtggtggccatcgacaacaagatcgagcaggccatgtag

SEQ ID NO: 258883 - DNA, 603 bp, Artificial Sequence
  derived and/or modified sequence
atggcccagtctaaactcgactgtagatcccctgtgggcctggattgctgcaattgctgtctggatcttgcacaccgcagcggacttcagagaggatccagtggcgagaacaacaatcccggctcgccaacggtctccaattttaggcaactccaggagaagctggtattcgagaacttgaatacagataaattaaactcaattatgcgccaagacagtctggagccagtgctgagagacccttgctacctaattaacgaagggatctgtaatagaaatatcgaccagacgatgctgtccatcttgctcttcttccactccgcatcaggcgccagtgtggtggctatcgataataaaattgaacaggccatggatttggtgaagaaccacctgatgtatgcagtgcgggaggaggtggaaatcctgaaagagcagattagagaactggtcgagaagaactctcagttggaacgagaaaacacattgctcaaaactttagcttcacccgaacagcttgagaagttccagagctgtctctctcccgaagagcccgccccagagtcaccccaggtcccagaggctcccgggggatcagccgtatag

SEQ ID NO: 258884 - DNA, 603 bp, Artificial Sequence
  derived and/or modified sequence
atggcacaatcaaaactagactgtcggtccccagtgggtctcgactgctgtaattgctgtctagacctagcacaccgctctggcctgcaacgggggtcctctggcgaaaataacaatcccggttcaccaactgtgagtaacttccgtcagttgcaggaaaagttagtgtttgagaacctgaacacagacaaactgaatagtatcatgaggcaagattctctcgagccggtgttgagagacccatgttatctaattaacgaaggcatttgcaacagaaatattgatcagactatgctttccatcctattgttctttcacagtgcctccggtgcctctgttgtggccatcgacaataagattgaacaggctatggatctagtaaaaaaccatcttatgtacgccgttcgagaagaggtcgaaatcctgaaagagcagatcagggagttggtggaaaagaacagccagttggagagggagaataccctactgaagacattggcctcgccagaacagctggagaaattccagtcctgtctcagtcccgaagaaccagcacctgaatcccctcaggtgcccgaggcacctgggggatctgccgtctag

SEQ ID NO: 258885 - DNA, 603 bp, Artificial Sequence
  derived and/or modified sequence
atggcccagtccaagctggactgtagatcgcccgtggggctcgattgctgcaattgctgtctagatctcgcacaccggtccggcttacaaagaggcagcagcggcgaaaacaataatcccgggagccccaccgtgtcaaacttccgccagctgcaggaaaagctggtctttgagaacctcaacactgataagctgaacagcattatgcgacaagattcccttgaaccagtactcagagacccttgctaccttatcaacgaggggatctgcaatcgtaacatcgaccaaacaatgttaagtattcttctcttttttcatagtgccagcggcgcctcggtggtggctatcgacaataagatagagcaggcaatggatttggtcaagaatcaccttatgtacgctgttagggaagaagtcgagattctcaaagagcagatccgcgagctcgtggagaagaactcacagctggagcgggagaacaccctgttaaagactctggcttcccccgagcagctggagaagttccagtcatgtctcagccctgaagaaccagctccagagagccctcaggttcccgaggcacccggcgggtctgctgtgtag

SEQ ID NO: 258886 - DNA, 540 bp, Artificial Sequence
  derived and/or modified sequence
atggcccagtctaagctcgactgccgaagcccagtggggctggactgttgtaattgttgtctcgatttggcccatcgttctggcctgcaaagggggagtagtggggagaacaacaaccctgggagccctaccgtttccaatttcagacaggacagtctagagcctgtgctcagagacccttgctaccttatcaatgagggcatttgcaacaggaatattgaccagaccatgttgtctatattgctgttcttccattccgcgagcggagctagcgtagtggcaatcgacaataaaatcgagcaagccatggatttggtaaagaaccacctgatgtacgctgtcagagaggaagtggaaatcttgaaagaacagattagagagttggttgagaaaaattcccagcttgagcgagaaaataccctgctgaaaacactagcttctccagagcagctggagaagtttcagtcgtgtctaagcccggaggagccagctccggaaagccctcaagtgcctgaggctcccggcggcagcgccgtgtag

SEQ ID NO: 258887 - DNA, 372 bp, Artificial Sequence
  derived and/or modified sequence
atggcccaatctaagctcgattgccggagcccggttggcttggactgctgcaattgttgtctggatctggctcacaggtcaggcctgcagaggggctccagcggagagaacaacaaccctggcagtcccaccgtaagtaatttccgccaactccaggagaagctggtgttcgagaacctgaacaccgacaaactgaattccattatgagacaagatagtctggagcccgtgcttagggacccgtgttatttaatcaacgaggggatatgcaaccgaaacattgaccagactatgctgtcaatactgcttttctttcacagcgccagcggcgcttctgtggtcgcgatcgataataaaatagagcaagcctag

SEQ ID NO: 258888 - DNA, 351 bp, Artificial Sequence
  derived and/or modified sequence
atggcccagtctaaactggattgccgatcacccgtcggactggattgttgcaattgttgtctcgatctcgcccacagatctggtctgcaacgcggcagcagcggtgaaaacaacaatcctggctctccgacagtgagcaattttcgacagctgcaggagaaacttgtcttcgagaatcttaacactgataaactcaatagcataatgcgccaggactccctcgagcccgtcttgagggatccatgttatctgatcaatgagggtatatgtaacaggaacattgaccaaactatgctgtccattctgctgttcttccattcagccagtggggcttccgtggtcgcaatttag

SEQ ID NO: 258889 - DNA, 177 bp, Artificial Sequence
  derived and/or modified sequence
atggcacagtcaaaattggattgtaggagccctgtgggcctggactgctgtaattgctgcttggacctggcccacagatcggggctgcagaggggttcatctggcgaaaataacaatccaggctcccctacagtctccaacttcaggcaactgcaagaaaaactcgtttttgagtag

SEQ ID NO: 258890 - DNA, 255 bp, Artificial Sequence
  derived and/or modified sequence
atggcacagtccaaactggactgtcgctctccggtgggactggactgttgtaactgctgtctcgatcttgcacacaggtccggccttcagcgcggctcctcaggggaaaacaacaatccagggagtccaacagtctctaactttcggcaactgcaggaaaagcttgtcttcgagaatctaaatactgacaagttgaattctatcatgcgtcaggacagcctcgaacctgtgttacgtgacccttgctacttgtag

SEQ ID NO: 258891 - DNA, 603 bp, Artificial Sequence
  derived and/or modified sequence
atggcccaatcaaagcttgactgccgatccccagtgggtctagactgctgcaactgttgtctagacctcgctcacaggagcgggctccagagaggttcgtctggcgaaaataacaatcccggatcccccaccgtgtctaattttcgacagttgcaggagaagctggtgttcgaaaacctgaataccgacaagctgaactccattatgagacaggacagtttggagcctgtcctcagagacccctgttatctcatcaatgaaggcatttgtaatagaaacatcgatcaaaccatgctgtccatacttctcttcttccactccgcatccggagcctccgtggtggctatcgataataaaatcgaacaggcaatggatcttgtgaagaaccatttaatgtacgccgtccgggaagaagtggagatcctgaaggagcagatccgagagctggtggagaagaactctcaacttgagcgcgaaaacacattgctgaaaacccttgctagccctgagcagctggagaaattccagtcctgtctgtcgcccgaagaaccggctcccgaatccccccaggtacctgaggctcctggtgggtcggccgtgtag

SEQ ID NO: 258892 - DNA, 303 bp, Artificial Sequence
  derived and/or modified sequence
atggcacagagcaagctcgactgtagatctcctgttgggctggactgttgcaactgctgcctggatttggcacatcggagtggcctgcaacggggaagctccggcgagaataacaatccgggaagccctacggtatcgaatttccggcagctgcaggaaaagctggtcttcgaaaacctcaataccgataagcttaacagtattatgcgtcaggatagcttggagccagttctccgagacccttgctacttaatcaacgagggaatctgtaataggaatattgatcagacaatgctcagctag

SEQ ID NO: 258893 - DNA, 360 bp, Artificial Sequence
  derived and/or modified sequence
atggcacagtccaaactggattgccggagtcctgtgggtctggattgttgcaattgctgtcttgacctcgcacatcgcagcggtcttcagagaggatctagcggagaaaataataatcccggctccccaaccgtcagcaactttcggcagctccaggagaaactcgtctttgagaacctgaacacggataagctcaattcaattatgaggcaggatagcctggagccggtgttgcgcgatccttgctatctgataaatgaggggatctgcaatcgcaatatcgatcagactatgctcagtattctgttatttttccacagtgcatccggtgcctcagttgtagctatagacaataaatag

SEQ ID NO: 258894 - DNA, 399 bp, Artificial Sequence
  derived and/or modified sequence
atgcgtcaggatagtttagaacccgtcctccgagacccctgctaccttatcaacgaaggcatctgcaaccggaacatcgaccaaactatgttgtcaatccttctatttttccactccgcaagtggcgcgagcgtggtagcaattgataacaagatcgaacaggccatggatttagtcaagaaccatctaatgtacgccgtccgagaagaagttgagattctcaaggaacagattagagagctggtggaaaaaaattcccagctggagcgagagaataccttattaaagacactggcatctcctgaacagcttgagaaattccagtcatgcctttctccagaagaacccgcaccagaatcaccccaggtgcccgaggctcctgggggatcagctgtctag

SEQ ID NO: 258895 - DNA, 375 bp, Artificial Sequence
  derived and/or modified sequence
atggcacagtctaaactggactgccgaagccctgttggcctggattgctgtaactgctgcttagacctggcccaccggagtgggctgcagcgcggctccagcggcgagaacaacaatccaggctctcctactgtaagtaacttcaggcagctacaggaaaagttggtattcgagaatctgaacactgacaaactgaattcaattatgagacaggacagtctggaaccagtgcttcgagacccttgctatttaatcaatgagggcatctgtaacagaaacatcgatcaaaccatgttgagtatcctgctgttcttccactctgcttccggcgcaagcgtagtggcaatcgacaataaaatagagcaggcaatgtag

SEQ ID NO: 258896 - DNA, 603 bp, Artificial Sequence
  derived and/or modified sequence
atggcccagagcaagctggactgccgcagccctgtgggcctggactgctgcaactgctgcctggacctggcccacaggagcggcctgcagaggggcagcagcggggagaacaacaaccctggcagccccaccgtgagcaacttccggcagctgcaggagaagctggtgtttgagaacctgaacacagacaagctgaacagcatcatgaggcaggacagcctggagcctgtgctgcgggacccctgctacctgatcaatgaaggcatctgcaacagaaacatcgaccagaccatgctgagcatcctgctcttcttccacagcgccagcggggcctctgtggtggccatcgacaacaagattgagcaggccatggacctggtgaagaaccacctgatgtatgctgtgcgggaggaggtggagatcctgaaggagcagatccgggagctggtggagaagaacagccagctggagcgggagaacaccctgctgaagaccctggccagccctgagcagctggagaagttccagagctgcctgagccctgaggagcccgcccctgagagcccccaggtgcctgaggcccctgggggcagcgctgtgtag

SEQ ID NO: 258897 - DNA, 540 bp, Artificial Sequence
  derived and/or modified sequence
atggcccagagcaagctggactgccgcagccctgtgggcctggactgctgcaactgctgcctggacctggcccacaggagcggcctgcagaggggcagcagcggggagaacaacaaccctggcagccccaccgtgagcaacttccggcaggacagcctggagcctgtgctgcgggacccctgctacctgatcaatgaaggcatctgcaacagaaatattgaccagaccatgctgagcatcctgctcttcttccacagcgccagcggggcctctgtggtggccatcgacaacaagattgagcaggccatggacctggtgaagaaccacctgatgtatgctgtgcgggaggaggtggagatcctgaaggagcagatccgggagctggtggagaagaacagccagctggagcgggagaacaccctgctgaagaccctggccagccctgagcagctggagaagttccagagctgcctgagccctgaggagcccgcccctgagagcccccaggtgcctgaggcccctgggggcagcgctgtgtag

SEQ ID NO: 258898 - DNA, 372 bp, Artificial Sequence
  derived and/or modified sequence
atggcccagagcaagctggactgccgcagccctgtgggcctggactgctgcaactgctgcctggacctggcccacaggagcggcctgcagaggggcagcagcggggagaacaacaaccctggcagccccaccgtgagcaacttccggcagctgcaggagaagctggtgtttgagaacctgaacacagacaagctgaacagcatcatgaggcaggacagcctggagcctgtgctgcgggacccctgctacctgatcaatgaaggcatctgcaacagaaacatcgaccagaccatgctgagcatcctgctcttcttccacagcgccagcggggcctctgtggtggccatcgacaacaagattgagcaggcctag

SEQ ID NO: 258899 - DNA, 351 bp, Artificial Sequence
  derived and/or modified sequence
atggcccagagcaagctggactgccgcagccctgtgggcctggactgctgcaactgctgcctggacctggcccacaggagcggcctgcagaggggcagcagcggggagaacaacaaccctggcagccccaccgtgagcaacttccggcagctgcaggagaagctggtgtttgagaacctgaacacagacaagctgaacagcatcatgaggcaggacagcctggagcctgtgctgcgggacccctgctacctgatcaatgaaggcatctgcaacagaaacatcgaccagaccatgctgagcatcctgctcttcttccacagcgccagcggggcctctgtggtggccatctag

SEQ ID NO: 258900 - DNA, 177 bp, Artificial Sequence
  derived and/or modified sequence
atggcccagagcaagctggactgccgcagccctgtgggcctggactgctgcaactgctgcctggacctggcccacaggagcggcctgcagaggggcagcagcggggagaacaacaaccctggcagccccaccgtgagcaacttccggcagctgcaggagaagctggtgtttgaatag

SEQ ID NO: 258901 - DNA, 255 bp, Artificial Sequence
  derived and/or modified sequence
atggcccagagcaagctggactgccgcagccctgtgggcctggactgctgcaactgctgcctggacctggcccacaggagcggcctgcagaggggcagcagcggggagaacaacaaccctggcagccccaccgtgagcaacttccggcagctgcaggagaagctggtgtttgagaacctgaacacagacaagctgaacagcatcatgaggcaggacagcctggagcctgtgctgcgggacccctgctacctgtag

SEQ ID NO: 258902 - DNA, 303 bp, Artificial Sequence
  derived and/or modified sequence
atggcccagagcaagctggactgccgcagccctgtgggcctggactgctgcaactgctgcctggacctggcccacaggagcggcctgcagaggggcagcagcggggagaacaacaaccctggcagccccaccgtgagcaacttccggcagctgcaggagaagctggtgtttgagaacctgaacacagacaagctgaacagcatcatgaggcaggacagcctggagcctgtgctgcgggacccctgctacctgatcaatgaaggcatctgcaacagaaacatcgaccagaccatgctgtcctag

SEQ ID NO: 258903 - DNA, 360 bp, Artificial Sequence
  derived and/or modified sequence
atggcccagagcaagctggactgccgcagccctgtgggcctggactgctgcaactgctgcctggacctggcccacaggagcggcctgcagaggggcagcagcggggagaacaacaaccctggcagccccaccgtgagcaacttccggcagctgcaggagaagctggtgtttgagaacctgaacacagacaagctgaacagcatcatgaggcaggacagcctggagcctgtgctgcgggacccctgctacctgatcaatgaaggcatctgcaacagaaacatcgaccagaccatgctgagcatcctgctcttcttccacagcgccagcggggcctctgtggtggccatcgacaacaagtag

SEQ ID NO: 258904 - DNA, 399 bp, Artificial Sequence
  derived and/or modified sequence
atgaggcaggacagcctggagcctgtgctgcgggacccctgctacctgatcaatgaaggcatctgcaacagaaacatcgaccagaccatgctgagcatcctgctcttcttccacagcgccagcggggcctctgtggtggccatcgacaacaagattgagcaggccatggacctggtgaagaaccacctgatgtatgctgtgcgggaggaggtggagatcctgaaggagcagatccgggagctggtggagaagaacagccagctggagcgggagaacaccctgctgaagaccctggccagccctgagcagctggagaagttccagagctgcctgagccctgaggagcccgcccctgagagcccccaggtgcctgaggcccctgggggcagcgctgtgtag

SEQ ID NO: 258905 - DNA, 375 bp, Artificial Sequence
  derived and/or modified sequence
atggcccagagcaagctggactgccgcagccctgtgggcctggactgctgcaactgctgcctggacctggcccacaggagcggcctgcagaggggcagcagcggggagaacaacaaccctggcagccccaccgtgagcaacttccggcagctgcaggagaagctggtgtttgagaacctgaacacagacaagctgaacagcatcatgaggcaggacagcctggagcctgtgctgcgggacccctgctacctgatcaatgaaggcatctgcaacagaaacatcgaccagaccatgctgagcatcctgctcttcttccacagcgccagcggggcctctgtggtggccatcgacaacaagattgagcaggccatgtag

SEQ ID NO: 258906 - DNA, 603 bp, Artificial Sequence
  derived and/or modified sequence
atggcccagagcaagctggactgccggagccccgtgggcctggactgctgcaactgttgcctggacctggcccatcgatccggtctacaacgcgggagttccggcgaaaataataatcctggctcccccaccgtttcaaatttccggcagttgcaggagaagcttgtgttcgagaaccttaacaccgacaaactgaattcgatcatgaggcaggactccctggaacccgtcctgcgcgatccatgctacctgataaacgaggggatatgtaatcggaatattgaccagactatgctgtctattctgctttttttccattccgcctccggagcttctgtggttgcaattgacaataaaatcgagcaggcaatggatttggttaagaatcacttgatgtatgcggtaagggaagaggtcgaaattctcaaagaacagatccgagaactcgtggagaaaaattctcaactggagagagagaacacacttctaaaaactctggcctctccagagcagctcgaaaaattccagtcttgtctgtccccagaggaaccggcccctgaatccccccaagtgccagaagctcctggcgggtccgccgtgtag

SEQ ID NO: 258907 - DNA, 603 bp, Artificial Sequence
  derived and/or modified sequence
atggcccagagcaagctggactgccggagccccgtgggcctggactgctgcaactgttgcttggacctggcacaccggagcggactccagcgaggctcctccggggagaacaataatccaggctcacccaccgtttcgaattttcgccagcttcaggagaagctggtttttgaaaatttaaacactgataagctgaatagtatcatgaggcaggactctctggagccagtgctgcgtgacccttgctatcttattaatgaggggatatgcaaccgtaacatagatcagacaatgttgagcatactgctctttttccacagtgcctccggagcctcagtggtagcgatcgataataagattgaacaagctatggacctcgttaagaaccatttaatgtatgccgtccgggaggaagtcgagatcctgaaggaacagattagggagctggtcgaaaagaattcacagctggaaagggaaaacacgttactgaagactttggcctccccagagcagttggaaaaattccagtcctgtctgagcccggaagagcccgctccagaatcaccacaggttccagaggctccaggcggctcagcagtttag

SEQ ID NO: 258908 - DNA, 603 bp, Artificial Sequence
  derived and/or modified sequence
atggcccagagcaagctggactgccggagccccgtgggcctggactgctgcaactgttgcttggatcttgcacacaggtccggacttcagcgaggcagtagtggcgaaaataacaacccaggttcacctacagtctccaactttaggcagcttcaggaaaaactcgtgttcgagaacctgaacaccgacaagctgaactccattatgagacaggattcactggagcctgttttgcgcgacccttgctatttgatcaatgagggcatctgtaatagaaatatcgaccagactatgttaagtattctgttattctttcacagcgccagtggcgccagcgttgtggctattgacaacaaaattgagcaggctatggacctggtgaagaatcacctcatgtatgccgtgcgtgaagaagtcgagatcctgaaagagcagatacgggaactcgtggagaaaaattcacagttggagcgcgagaacaccctactgaagactttagctagcccagaacaactggagaagttccagtcttgcctgagcccggaggagcccgccccggagtctccgcaggtgcctgaggctcctgggggatctgctgtttag

SEQ ID NO: 258909 - DNA, 540 bp, Artificial Sequence
  derived and/or modified sequence
atggcccagagcaagctggactgccggagccccgtgggcctggactgttgcaactgctgcctagatctggcgcaccgcagtggcctgcagagaggatccagcggagagaacaataatccaggttcacccacggtctccaacttcaggcaggactccctggaaccggtactccgcgacccatgctacctgatcaacgagggaatttgcaacaggaatattgaccagaccatgctaagcatcttgttattcttccacagcgcatcaggggcgagcgtggttgcaatcgacaataaaatagagcaggcgatggaccttgtgaagaaccatttaatgtatgctgtgagagaggaagtggaaattcttaaggaacagatccgagagctggtcgagaagaattcgcagctcgagagagaaaataccttgctgaaaactctggcgtcccccgagcaactagaaaagttccagtcctgtcttagccccgaggagccagctcccgaatcaccacaagtccctgaggcgcctggcggatcagctgtgtag

SEQ ID NO: 258910 - DNA, 372 bp, Artificial Sequence
  derived and/or modified sequence
atggcccagagcaagctggactgccggagccccgtgggcctggactgctgcaactgttgcctggacctggctcacaggtcaggtctgcagagaggctcatccggggaaaataacaatcccggcagtccaactgtctctaactttcgccagttgcaggagaagcttgtttttgagaacctgaacaccgataagctcaactcaatcatgagacaggactccctcgaacctgtcttgcgggacccttgttatctgataaatgagggcatctgcaacaggaacattgaccagaccatgctgagtatcttgctgttcttccactctgcctctggagcctccgtggtggctattgataacaaaatcgagcaggcttag

SEQ ID NO: 258911 - DNA, 351 bp, Artificial Sequence
  derived and/or modified sequence
atggcccagagcaagctggactgccggagccccgtgggcctggactgctgcaactgctgcctggacttggcgcaccgctccgggttgcaacggggaagtagtggggagaacaataatcccggatcccccacggtatctaattttaggcagctgcaggagaaactggtgtttgaaaacctcaatacagataaactgaacagtatcatgcggcaagattctcttgagcctgttctcagggatccctgttacttgatcaacgaaggcatatgtaatcgcaatatagaccaaacgatgctttcaatacttctgttcttccattcagccagtggcgcatcagtggtcgcaatctag

SEQ ID NO: 258912 - DNA, 177 bp, Artificial Sequence
  derived and/or modified sequence
atggcccagagcaagctggactgccggagccccgtgggcctggactgttgtaactgctgcttggacctcgctcatcgatccgggctgcagcggggtagtagcggagagaacaataaccctggaagcccgactgtctccaactttcgacagctacaggagaagctcgtttttgagtag

SEQ ID NO: 258913 - DNA, 255 bp, Artificial Sequence
  derived and/or modified sequence
atggcccagagcaagctggactgccggagccccgtgggcctggactgttgtaattgctgcttggatttagctcaccgttctggactgcagcgaggctcctccggagagaataacaatcccggaagccccactgttagcaactttcggcagctgcaagaaaaactagtatttgaaaacctgaataccgacaagttaaacagtataatgagacaagactcattagagcctgtgttgagagacccttgttacctatag

SEQ ID NO: 258914 - DNA, 603 bp, Artificial Sequence
  derived and/or modified sequence
atggcccagagcaagctggactgccggagccccgtgggcctggactgctgcaattgctgcctggatctggcacacagatcggggctgcagcgcggatcatctggggaaaacaacaatcctggctcaccaacagtatcgaattttcgccaactccaagaaaagctcgtgttcgagaatctgaacactgataagttgaacagtataatgaggcaggactctctggagcccgttctcagggatccctgctatctcattaatgaaggcatttgtaatcgaaatatcgaccagaccatgctatccatcctgctgttttttcacagcgcgtccggagcctctgttgtggccatagacaataagatcgaacaggccatggatttggtaaagaaccatctcatgtatgcagtgcgggaagaggtagagattctgaaagagcagatccgggagctcgttgagaagaacagtcagttagagagggaaaacacccttttgaagacacttgcttcacctgaacagttagaaaaattccaatcttgtttatctccagaggaacctgcccccgagtcgcctcaggtgccagaagcacctggtggatcagctgtgtag

SEQ ID NO: 258915 - DNA, 303 bp, Artificial Sequence
  derived and/or modified sequence
atggcccagagcaagctggactgccggagccccgtgggcctggactgctgtaactgttgcctggacctcgcccatcggtctggccttcaacgtggctctagcggcgagaataataaccccgggtccccaactgtatccaacttccgccagctgcaggagaagctggtctttgaaaacttgaacactgacaaacttaacagcattatgcgtcaggattcactggagcccgtgcttagggacccctgctacctgattaacgaaggcatctgcaataggaacatcgatcagacaatgcttagctag

SEQ ID NO: 258916 - DNA, 360 bp, Artificial Sequence
  derived and/or modified sequence
atggcccagagcaagctggactgccggagccccgtgggcctggactgctgtaactgctgccttgatttggcccatcggagcggactgcagcggggatcatccggggagaacaataatcccgggtctcctactgttagcaacttcagacagcttcaggaaaagctggtgttcgaaaatctgaatacagataagctcaattcgatcatgcgccaggacagccttgaacctgtgctccgagacccgtgctaccttataaacgaaggtatctgcaacaggaatatcgaccagaccatgctaagcattctgttattctttcatagcgccagcggggcctccgttgttgctattgataacaagtag

SEQ ID NO: 258917 - DNA, 399 bp, Artificial Sequence
  derived and/or modified sequence
atgcggcaggacagcctggagcccgtgctgcgggacccctgctacctcatcaacgaaggtatttgcaacaggaatattgatcagactatgctgtctatcctgcttttcttccatagtgcctccggggcctcagtggtggctatcgacaacaaaatcgaacaagcgatggacctcgttaagaatcacctgatgtacgccgtacgtgaagaagtcgaaatccttaaggaacaaatacgggagctggtcgagaaaaatagccagctcgagcgggaaaacacgctgctgaagaccctggcttccccagagcagctcgaaaagtttcagtcatgtctctcgcccgaagagcctgcgcctgaaagcccacaggttccagaagcacccggaggctctgccgtgtag

SEQ ID NO: 258918 - DNA, 375 bp, Artificial Sequence
  derived and/or modified sequence
atggcccagagcaagctggactgccggagccccgtgggcctggactgctgtaattgttgccttgacctagcccaccggagcggactgcagcggggatccagcggggagaacaacaaccctgggagtcctactgtgtctaattttcgacaactgcaggaaaagctggtctttgagaacctgaatacagataagcttaacagtattatgcggcaggacagtctggaacctgtgctaagagacccgtgctacttgatcaacgaaggtatttgcaacaggaatatcgaccagaccatgttgagtatactgctgtttttccactccgcgagcggcgcctcggtcgtagccattgacaataagattgagcaggcaatgtag

SEQ ID NO: 258919 - DNA, 603 bp, Artificial Sequence
  derived and/or modified sequence
atggcccaatccaagctggattgccgttctccagtagggctggattgctgcaattgctgtcttgatctcgctcatagaagtggtctgcagcgcggatcctcaggggagaacaataatcctggaagcccaactgtgagtaactttagacagctgcaagagaagctggtattcgagaatctcaataccgataagttgaatagcatcatgcggcaggacagcctggaaccggttctgagggacccttgttatctgatcaatgaaggcatctgcaatcgaaatatagaccagacaatgctgagcatccttttattcttccattccgcaagcggcgcatctgtggtagcaatcgataataagattgagcaggcaatggatctggtgaaaaatcatctcatgtatgccgtgagagaagaagttgagatcctgaaggagcaaattcgtgagctcgttgaaaagaatagccaactcgaaagggagaataccctgctgaaaacactcgcttcccctgagcagcttgagaaatttcagtcatgtctctcacctgaagaacccgcacccgaatctccacaagtgcccgaggcccctggcggtagtgccgtctag

SEQ ID NO: 258920 - DNA, 603 bp, Artificial Sequence
  derived and/or modified sequence
atggcacagtcgaagttagactgccggagcccggtggggttggactgctgcaactgttgtctggatctggctcatcgtagtggactgcagcggggaagcagtggcgagaacaataatcccggttcgcccactgtgtcgaacttcagacagctgcaggaaaagctagtgttcgagaacttaaacaccgataagctgaactccatcatgaggcaggattctctggaacccgtgttacgcgacccctgttacctgatcaacgaaggcatctgtaaccggaacatcgaccagactatgctcagcatcttactgttcttccatagcgcaagtggcgctagtgtcgtagcaatcgacaataaaatcgagcaggccatggatctggtcaaaaatcatctcatgtatgccgtgagggaggaagtggaaatcctcaaggagcagatcagggaattggtggaaaagaactcccagttggaacgggagaatacactcctgaaaacactggctagtccagagcaactggagaagtttcagagttgtctatcaccagaggaacccgcacctgaatcaccccaagttcctgaggcgccaggtgggagcgccgtctag

SEQ ID NO: 258921 - DNA, 603 bp, Artificial Sequence
  derived and/or modified sequence
atggcccagtccaaactggattgccgctcaccagtgggccttgattgttgcaattgctgcctcgacctcgcccaccgaagtgggttgcagcgaggaagctcaggcgagaacaacaaccctggctcccccacagtgagcaactttcgccagctgcaggaaaaactggtgttcgagaatttgaatacagacaagttaaattcaattatgagacaagatagtctggaacctgttctgcgcgacccctgctacctcatcaacgagggcatctgcaatcggaacatcgatcaaacaatgttgagtatcctgttatttttccactccgcttctggagcatctgtggtggcaatcgataacaaaattgaacaggcaatggacctggtcaagaatcatttgatgtacgctgtgcgcgaggaggtggaaatcctgaaagagcagatccgcgaattagtcgagaagaatagtcagctggagagggagaacactctattaaaaacgcttgcaagccccgaacagctggagaagttccagagctgtctgtcccccgaagaacccgcaccagagtccccgcaagtgcccgaggcccctgggggatcggcggtgtag

SEQ ID NO: 258922 - DNA, 540 bp, Artificial Sequence
  derived and/or modified sequence
atggcccagagtaagctggattgtagatccccagtgggtcttgactgctgtaactgttgccttgacttggctcaccgatctgggctgcagagaggaagcagtggagagaataataatcctggaagccctacagtgtccaacttccgacaggactccttggagccagttctaagggatccgtgctacctgattaacgagggtatctgcaatcggaatatcgaccagacgatgttgtctattctgctgttcttccattctgccagtggtgctagtgtggtggccatcgacaacaagatcgagcaggccatggacttggtcaaaaaccatctaatgtacgcagttagggaagaggttgaaattctcaaggaacagattagagaacttgtggaaaagaactcccagctggaacgggaaaatactcttctgaaaacgctcgcaagccccgagcagctggagaagtttcagtcctgcctgtctcctgaggaaccagcgccagaatcccctcaggtcccagaagccccagggggttctgctgtgtag

SEQ ID NO: 258923 - DNA, 372 bp, Artificial Sequence
  derived and/or modified sequence
atggcccagtcaaagctcgactgtcgaagccctgtcggactggactgttgtaattgttgcctggacctggcccatcgcagtggattgcagcgcggaagcagcggagagaacaataaccctgggtctcctacggtgtcaaattttcggcagttgcaggagaagcttgtcttcgaaaacttaaataccgataagctgaactctatcatgaggcaggattccttagagcctgtgctgagagatccttgttacctgatcaacgagggtatctgcaatcggaacatcgatcaaacaatgctgagtatactactgttcttccatagcgcctcaggagccagtgtggtcgcaatagacaacaaaatagagcaagcatag

SEQ ID NO: 258924 - DNA, 351 bp, Artificial Sequence
  derived and/or modified sequence
atggcacagagtaaactcgattgccgctcaccggtaggactagattgctgcaattgctgcctggatctcgcacatagatctggcctccaacgcggatcatctggggagaacaataatcctggcagtccaaccgtgtccaacttcaggcagctccaggagaagctcgtctttgagaacttaaacaccgataaactgaactccattatgcggcaggattctctagagccagtgttgcgcgacccgtgctacctgatcaatgagggaatatgcaatcgcaatattgaccagaccatgctgagtatcctattattcttccattccgcctctggggcttcagtggttgccatatag

SEQ ID NO: 258925 - DNA, 177 bp, Artificial Sequence
  derived and/or modified sequence
atggctcagagcaagctggattgtcgttcgccagtgggattggattgctgcaattgctgtctcgatctggcacaccgatccgggcttcaacggggttcttctggcgaaaataacaatccagggtctccaacagtgagcaacttccggcagcttcaggaaaagttggtgttcgaatag

SEQ ID NO: 258926 - DNA, 255 bp, Artificial Sequence
  derived and/or modified sequence
atggcccagtccaaactggactgtcggtcccctgtgggccttgattgctgcaactgctgtctcgatctagctcaccgctctggtctccagagaggttcttccggcgagaataataatccaggctcacccactgtgagtaacttcagacaattacaggaaaaactggtctttgagaaccttaatacagataaactgaacagcatcatgagacaggattcactcgagccagtactccgagatccctgttacttgtag

SEQ ID NO: 258927 - DNA, 603 bp, Artificial Sequence
  derived and/or modified sequence
atggcccagagcaagctggactgtagatctccagtggggctcgattgttgtaactgttgtctggatctcgcccacaggtctggcctacagaggggctcctccggcgaaaacaataaccccggatcccccactgtctccaactttcgccagctgcaggaaaagctggtttttgagaaccttaataccgacaagctgaatagtatcatgcggcaagactccctggaacccgtcctgagagatccctgttatttgataaacgaagggatctgcaaccgcaatattgatcagactatgctgagcattctactgttcttccactcggctagcggggcatcagttgtggccatcgataacaagatcgaacaagcaatggaccttgtaaagaaccatctcatgtatgccgtgagggaggaagttgagatcctgaaggagcagatcagagagcttgtggagaagaattcccagctggagagagagaacacattactgaagaccctggcttcgccagagcagcttgagaaattccagtcatgcctcagcccggaggaacccgcaccagagtcaccgcaagtgccggaggcacccggtgggagcgcagtgtag

SEQ ID NO: 258928 - DNA, 303 bp, Artificial Sequence
  derived and/or modified sequence
atggctcagtccaaactcgactgtaggagccctgttgggctcgattgttgtaactgctgtctggatttagcccaccggagtggactccaaagggggtcatcaggcgagaacaataatcctggaagccctacagtgtcgaattttcgacagctccaggaaaagctggtgttcgagaacctgaatacagataagctgaatagtataatgcgacaggacagcctggaaccggtgttgcgggatccatgctatttgattaatgagggcatttgcaaccgcaacatcgatcagacgatgctctcatag

SEQ ID NO: 258929 - DNA, 360 bp, Artificial Sequence
  derived and/or modified sequence
atggctcaatccaaacttgactgtcggtctcccgtgggactagactgctgtaactgttgtctagatttagctcaccgatctggattgcagcggggttcatctggagagaacaataatcctggttcgccaaccgtaagcaatttcagacagctgcaggaaaagctggtgttcgaaaatctcaatacagataagctcaacagtataatgaggcaggacagcttggagcctgtgttaagggacccctgctatctgatcaacgagggcatctgtaacaggaatatcgaccaaaccatgttaagcatactactcttttttcactcggccagcggagccagcgtggttgcaatagacaacaagtag

SEQ ID NO: 258930 - DNA, 399 bp, Artificial Sequence
  derived and/or modified sequence
atgaggcaggactcactcgaacctgttctccgtgacccttgttatctcattaatgaaggtatatgcaataggaacattgaccagacaatgttaagtatcctcttgttcttccacagtgcgtctggcgctagcgtggtggccatcgacaataaaatcgaacaggctatggatctagtgaaaaatcacctgatgtatgctgtaagagaggaggtagagatccttaaagagcagatcagagagctggtcgaaaaaaattcgcaattagaacgagaaaacacccttctgaaaacccttgcatccccagagcagctggagaagtttcaatcatgtctcagccctgaagagccagccccagaaagcccacaagtgccagaggcaccaggagggagcgccgtttag

SEQ ID NO: 258931 - DNA, 375 bp, Artificial Sequence
  derived and/or modified sequence
atggcccagtcaaaactggattgtcggtcccctgtcggcttggattgctgtaactgctgcctggatcttgcgcatcgctctgggctgcaaagggggtcatctggtgagaacaacaatcctggtagcccaacagtcagcaactttaggcagctgcaggaaaaactggtctttgagaatcttaatacagataagctgaacagtatcatgagacaggactccctcgaaccagtgctgagagatccatgctatctgatcaatgaaggcatctgcaaccggaacattgatcagacgatgctatctatcctactgttttttcactccgcttcgggcgcttcggtggtcgctatcgataataagatcgagcaggcaatgtag

SEQ ID NO: 258932 - DNA, 2213 bp, Artificial Sequence
  derived and/or modified sequence
atatcccagtgctgactcccgggcgtgcagaccgctaactagctcactcgctctcagctcctgccaccgctcagccgtcacagcccaggggagcccgagagcctgagagcctgcaaaccggggagggagggagcaaaggagggagggagcaagggcgcgccctggctctccctctgccctgctgcccgcccttcctgcctccacagcttgtcttttccaggcaccctggagtcccctcaggccagctcggtgggcgcgcacctgccagccgcccctgacctcgcaggccaggcgacctccgagcctgagaagatggcccagtccaagctcgattgccgctcacctgtcggcctcgactgctgcaactgctgcctggacctggcccatcggagtgggctccagcgaggcagcagcggggagaacaacaacccgggcagccctacagtgagcaactttcggcagctgcaggaaaagctggtctttgagaacctcaataccgacaagctcaacagcataatgcggcaggattcgctagagccggtgctgcgggacccctgctacctgatcaacgagggcatctgcaaccgcaacatcgaccagaccatgctctccatcctgctcttcttccacagtgcctccggagccagcgtggtggccatagacaacaagatcgaacaggccatggatctggtgaagaatcatctgatgtatgctgtgagagaggaggtggagatcctgaaggagcagatccgagagctggtggagaagaactcccagctagagcgtgagaacaccctgttgaagaccctggcaagcccagagcagctggagaagttccagtcctgtctgagccctgaagagccagctcccgaatccccacaagtgcccgaggcccctggtggttctgcggtgtaagtggctctgtcctcagggtgggcagagccactaaacttgttttacctagttctttccagtttgtttttggctccccaagcatcatctcacgaggagaactttacacctagcacagctggtgccaagagatgtcctaaggacatggccacctgggtccactccagcgacagacccctgacaagagcaggtctctggaggctgagttgcatggggcctagtaacaccaagccagtgagcctctaatgctactgcgccctgggggctcccagggcctgggcaacttagctgcaactggcaaaggagaagggtagtttgaggtgtgacaccagtttgctccagaaagtttaaggggtctgtttctcatctccatggacatcttcaacagcttcacctgacaacgactgttcctatgaagaagccacttgtgttttaagcagaggcaacctctctcttctcctctgtttcgtgaaggcaggggacacagatgggagagattgagccaagtcagccttctgttggttaatatggtataatgcatggctttgtgcacagcccagtgtgggattacagctttgggatgaccgcttacaaagttctgtttggttagtattggcatagtttttctatatagccataaatgcgtatatatacccatagggctagatctgtatcttagtgtagcgatgtatacatatacacatccacctacatgttgaagggcctaaccagccttgggagtattgactggtcccttacctcttatggctaagtctttgactgtgttcatttaccaagttgacccagtttgtcttttaggttaagtaagactcgagagtaaaggcaaggaggggggccagcctctgaatgcggccacggatgccttgctgctgcaaccctttccccagctgtccactgaaacgtgaagtcctgttttgaatgccaaacccaccattcactggtgctgactacatagaatggggttgagagaagatcagtttgggcttcacagtgtcatttgaaaacgttttttgttttgttttgtaattattgtggaaaactttcaagtgaacagaaggatggtgtcctactgtggatgagggatgaacaaggggatggctttgatccaatggagcctgggaggtgtgcccagaaagcttgtctgtagcgggttttgtgagagtgaacactttccactttttgacaccttatcctgatgtatggttccaggatttggattttgattttccaaatgtagcttgaaatttcaataaactttgctctgtttttctaaaaataaa

SEQ ID NO: 258933 - DNA, 2266 bp, Artificial Sequence
  derived and/or modified sequence
ctccacaggtccgccccaatccccgctcacacttgggaaacttgggactgcgctggggccgcgtgtggcacctcaggggggcggcccccggcctcaagaggagggggaggagaaggaggaagaggaggaagtgagcccgaaggatccgctcggagctgtttgtccagctgtttctattcgcacccggagcagtacagccagaagggggccgagccgaaggtggctggctttaggcgctaatttccaactcttttcctcacagcttgtcttttccaggcaccctggagtcccctcaggccagctcggtgggcgcgcacctgccagccgcccctgacctcgcaggccaggcgacctccgagcctgagaagatggcccagtccaagctcgattgccgctcacctgtcggcctcgactgctgcaactgctgcctggacctggcccatcggagtgggctccagcgaggcagcagcggggagaacaacaacccgggcagccctacagtgagcaactttcggcagctgcaggaaaagctggtctttgagaacctcaataccgacaagctcaacagcataatgcggcaggattcgctagagccggtgctgcgggacccctgctacctgatcaacgagggcatctgcaaccgcaacatcgaccagaccatgctctccatcctgctcttcttccacagtgcctccggagccagcgtggtggccatagacaacaagatcgaacaggccatggatctggtgaagaatcatctgatgtatgctgtgagagaggaggtggagatcctgaaggagcagatccgagagctggtggagaagaactcccagctagagcgtgagaacaccctgttgaagaccctggcaagcccagagcagctggagaagttccagtcctgtctgagccctgaagagccagctcccgaatccccacaagtgcccgaggcccctggtggttctgcggtgtaagtggctctgtcctcagggtgggcagagccactaaacttgttttacctagttctttccagtttgtttttggctccccaagcatcatctcacgaggagaactttacacctagcacagctggtgccaagagatgtcctaaggacatggccacctgggtccactccagcgacagacccctgacaagagcaggtctctggaggctgagttgcatggggcctagtaacaccaagccagtgagcctctaatgctactgcgccctgggggctcccagggcctgggcaacttagctgcaactggcaaaggagaagggtagtttgaggtgtgacaccagtttgctccagaaagtttaaggggtctgtttctcatctccatggacatcttcaacagcttcacctgacaacgactgttcctatgaagaagccacttgtgttttaagcagaggcaacctctctcttctcctctgtttcgtgaaggcaggggacacagatgggagagattgagccaagtcagccttctgttggttaatatggtataatgcatggctttgtgcacagcccagtgtgggattacagctttgggatgaccgcttacaaagttctgtttggttagtattggcatagtttttctatatagccataaatgcgtatatatacccatagggctagatctgtatcttagtgtagcgatgtatacatatacacatccacctacatgttgaagggcctaaccagccttgggagtattgactggtcccttacctcttatggctaagtctttgactgtgttcatttaccaagttgacccagtttgtcttttaggttaagtaagactcgagagtaaaggcaaggaggggggccagcctctgaatgcggccacggatgccttgctgctgcaaccctttccccagctgtccactgaaacgtgaagtcctgttttgaatgccaaacccaccattcactggtgctgactacatagaatggggttgagagaagatcagtttgggcttcacagtgtcatttgaaaacgttttttgttttgttttgtaattattgtggaaaactttcaagtgaacagaaggatggtgtcctactgtggatgagggatgaacaaggggatggctttgatccaatggagcctgggaggtgtgcccagaaagcttgtctgtagcgggttttgtgagagtgaacactttccactttttgacaccttatcctgatgtatggttccaggatttggattttgattttccaaatgtagcttgaaatttcaataaactttgctctgtttttctaaaaat

SEQ ID NO: 258934 - DNA, 2199 bp, Artificial Sequence
  derived and/or modified sequence
gtcatatcccagtgctgactcccgggcgtgcagaccgctaactagctcactcgctctcagctcctgccaccgctcagccgtcacagcccaggggagcccgagagcctgagagcctgcaaaccggggagggagggagcaaaggagggagggagcaagggcgcgccctggctctccctctgccctgctgcccgcccttcctgcctccacaggcaccctggagtcccctcaggccagctcggtgggcgcgcacctgccagccgcccctgacctcgcaggccaggcgacctccgagcctgagaagatggcccagtccaagctcgattgccgctcacctgtcggcctcgactgctgcaactgctgcctggacctggcccatcggagtgggctccagcgaggcagcagcggggagaacaacaacccgggcagccctacagtgagcaactttcggcagctgcaggaaaagctggtctttgagaacctcaataccgacaagctcaacagcataatgcggcaggattcgctagagccggtgctgcgggacccctgctacctgatcaacgagggcatctgcaaccgcaacatcgaccagaccatgctctccatcctgctcttcttccacagtgcctccggagccagcgtggtggccatagacaacaagatcgaacaggccatggatctggtgaagaatcatctgatgtatgctgtgagagaggaggtggagatcctgaaggagcagatccgagagctggtggagaagaactcccagctagagcgtgagaacaccctgttgaagaccctggcaagcccagagcagctggagaagttccagtcctgtctgagccctgaagagccagctcccgaatccccacaagtgcccgaggcccctggtggttctgcggtgtaagtggctctgtcctcagggtgggcagagccactaaacttgttttacctagttctttccagtttgtttttggctccccaagcatcatctcacgaggagaactttacacctagcacagctggtgccaagagatgtcctaaggacatggccacctgggtccactccagcgacagacccctgacaagagcaggtctctggaggctgagttgcatggggcctagtaacaccaagccagtgagcctctaatgctactgcgccctgggggctcccagggcctgggcaacttagctgcaactggcaaaggagaagggtagtttgaggtgtgacaccagtttgctccagaaagtttaaggggtctgtttctcatctccatggacatcttcaacagcttcacctgacaacgactgttcctatgaagaagccacttgtgttttaagcagaggcaacctctctcttctcctctgtttcgtgaaggcaggggacacagatgggagagattgagccaagtcagccttctgttggttaatatggtataatgcatggctttgtgcacagcccagtgtgggattacagctttgggatgaccgcttacaaagttctgtttggttagtattggcatagtttttctatatagccataaatgcgtatatatacccatagggctagatctgtatcttagtgtagcgatgtatacatatacacatccacctacatgttgaagggcctaaccagccttgggagtattgactggtcccttacctcttatggctaagtctttgactgtgttcatttaccaagttgacccagtttgtcttttaggttaagtaagactcgagagtaaaggcaaggaggggggccagcctctgaatgcggccacggatgccttgctgctgcaaccctttccccagctgtccactgaaacgtgaagtcctgttttgaatgccaaacccaccattcactggtgctgactacatagaatggggttgagagaagatcagtttgggcttcacagtgtcatttgaaaacgttttttgttttgttttgtaattattgtggaaaactttcaagtgaacagaaggatggtgtcctactgtggatgagggatgaacaaggggatggctttgatccaatggagcctgggaggtgtgcccagaaagcttgtctgtagcgggttttgtgagagtgaacactttccactttttgacaccttatcctgatgtatggttccaggatttggattttgattttccaaatgtagcttgaaatttcaataaactttgctctgtttttctaaaaat

SEQ ID NO: 258935 - DNA, 1316 bp, Artificial Sequence
  derived and/or modified sequence
gaagtgagcccgaaggatccgctcggagctgtttgtccagctgtttctattcgcacccggagcagtacagccagaagggggccgagccgaaggtggctggctttaggcgctaatttccaactcttttcctcacagcttgtcttttccaggcaccctggagtcccctcaggccagctcggtgggcgcgcacctgccagccgcccctgacctcgcaggccaggcgacctccgagcctgagaagatggcccagtccaagctcgattgccgctcacctgtcggcctcgactgctgcaactgctgcctggacctggcccatcggagtgggctccagcgaggcagcagcggggagaacaacaacccgggcagccctacagtgagcaactttcggcaggattcgctagagccggtgctgcgggacccctgctacctgatcaacgagggcatctgcaaccgcaacatcgaccagaccatgctctccatcctgctcttcttccacagtgcctccggagccagcgtggtggccatagacaacaagatcgaacaggccatggatctggtgaagaatcatctgatgtatgctgtgagagaggaggtggagatcctgaaggagcagatccgagagctggtggagaagaactcccagctagagcgtgagaacaccctgttgaagaccctggcaagcccagagcagctggagaagttccagtcctgtctgagccctgaagagccagctcccgaatccccacaagtgcccgaggcccctggtggttctgcggtgtaagtggctctgtcctcagggtgggcagagccactaaacttgttttacctagttctttccagtttgtttttggctccccaagcatcatctcacgaggagaactttacacctagcacagctggtgccaagagatgtcctaaggacatggccacctgggtccactccagcgacagacccctgacaagagcaggtctctggaggctgagttgcatggggcctagtaacaccaagccagtgagcctctaatgctactgcgccctgggggctcccagggcctgggcaacttagctgcaactggcaaaggagaagggtagtttgaggtgtgacaccagtttgctccagaaagtttaaggggtctgtttctcatctccatggacatcttcaacagcttcacctgacaacgactgttcctatgaagaagccacttgtgttttaagcagaggcaacctctctcttctcctctgtttcgtgaaggcaggggacacagatgggagagattgagccaagtcagccttctgttggttaatatggtataatg

SEQ ID NO: 258936 - DNA, 546 bp, Artificial Sequence
  derived and/or modified sequence
agggtaacgacagacggagatcaactaaggtggcaggtaaggttcagaaaaggagaaggacaacaaatttggagaaataggagaaggcaccctggagtcccctcaggccagctcggtgggcgcgcacctgccagccgcccctgacctcgcaggccaggcgacctccgagcctgagaagatggcccagtccaagctcgattgccgctcacctgtcggcctcgactgctgcaactgctgcctggacctggcccatcggagtgggctccagcgaggcagcagcggggagaacaacaacccgggcagccctacagtgagcaactttcggcagctgcaggaaaagctggtctttgagaacctcaataccgacaagctcaacagcataatgcggcaggattcgctagagccggtgctgcgggacccctgctacctgatcaacgagggcatctgcaaccgcaacatcgaccagaccatgctctccatcctgctcttcttccacagtgcctccggagccagcgtggtggccatagacaacaagatcgaacaggc

SEQ ID NO: 258937 - DNA, 567 bp, Artificial Sequence
  derived and/or modified sequence
aagggtgcgggcggggtggggcgaggggtggagggacaggatccagccgctcggggcccccgcccgccagccggagaagtggcggaggaccgttctccgccgtcccctctaggcttgtcttttccaggcaccctggagtcccctcaggccagctcggtgggcgcgcacctgccagccgcccctgacctcgcaggccaggcgacctccgagcctgagaagatggcccagtccaagctcgattgccgctcacctgtcggcctcgactgctgcaactgctgcctggacctggcccatcggagtgggctccagcgaggcagcagcggggagaacaacaacccgggcagccctacagtgagcaactttcggcagctgcaggaaaagctggtctttgagaacctcaataccgacaagctcaacagcataatgcggcaggattcgctagagccggtgctgcgggacccctgctacctgatcaacgagggcatctgcaaccgcaacatcgaccagaccatgctctccatcctgctcttcttccacagtgcctccggagccagcgtggtggccata

SEQ ID NO: 258938 - DNA, 503 bp, Artificial Sequence
  derived and/or modified sequence
aaaggccagacttgtgaatgaaggagccgatgcgggggtggggagtactgactgaaattattccaagtctctgagtcctgagaaaccctggaaacccaccacttgcccacccagaacatccctccatcttacagagctggggcacgcccctcaggcctgtgaacatgcaatcgctacatctattgaaagggtaacgacagacggagatcaactaaggtggcagcttgtcttttccaggcaccctggagtcccctcaggccagctcggtgggcgcgcacctgccagccgcccctgacctcgcaggccaggcgacctccgagcctgagaagatggcccagtccaagctcgattgccgctcacctgtcggcctcgactgctgcaactgctgcctggacctggcccatcggagtgggctccagcgaggcagcagcggggagaacaacaacccgggcagccctacagtgagcaactttcggcagctgcaggaaaagctggtctttgag

SEQ ID NO: 258939 - DNA, 425 bp, Artificial Sequence
  derived and/or modified sequence
tctatttcaaaggccagacttgtgaatgaaggagccgatgcgggggtggggagtactgactgaaatcttgtcttttccaggcaccctggagtcccctcaggccagctcggtgggcgcgcacctgccagccgcccctgacctcgcaggccaggcgacctccgagcctgagaagatggcccagtccaagctcgattgccgctcacctgtcggcctcgactgctgcaactgctgcctggacctggcccatcggagtgggctccagcgaggcagcagcggggagaacaacaacccgggcagccctacagtgagcaactttcggcagctgcaggaaaagctggtctttgagaacctcaataccgacaagctcaacagcataatgcggcaggattcgctagagccggtgctgcgggacccctgctacctga

SEQ ID NO: 258940 - DNA, 956 bp, Artificial Sequence
  derived and/or modified sequence
acatctattgaaagggtaacgacagacggagatcaactaaggtggcaggtaaggttcagaaaaggagaaggacaacaaatttggagaaataggagaagcttgtcttttccaggcaccctggagtcccctcaggccagctcggtgggcgcgcacctgccagccgcccctgacctcgcaggccaggcgacctccgagcctgagaagatggcccagtccaagctcgattgccgctcacctgtcggcctcgactgctgcaactgctgcctggacctggcccatcggagtgggctccagcgaggcagcagcggggagaacaacaacccgggcagccctacagtgagcaactttcggcagctgcaggaaaagctggtctttgagaacctcaataccgacaagctcaacagcataatgcggcaggattcgctagagccggtgctgcgggacccctgctacctgatcaacgagggcatctgcaaccgcaacatcgaccagaccatgctctccatcctgctcttcttccacagtgcctccggagccagcgtggtggccatagacaacaagatcgaacaggccatggatctggtgaagaatcatctgatgtatgctgtgagagaggaggtggagatcctgaaggagcagatccgagagctggtggagaagaactcccagctagagcgtgagaacaccctgttgaagaccctggcaagcccagagcagctggagaagttccagtcctgtctgagccctgaagagccagctcccgaatccccacaagtgcccgaggcccctggtggttctgcggtgtaagtggctctgtcctcagggtgggcagagccactaaacttgttttacctagttctttccagtttgtttttggctccccaagcatcatctcacgaggagaactttacacctagcacagctggtgccaagagatgtcctaaggacatggccac

SEQ ID NO: 258941 - DNA, 521 bp, Artificial Sequence
  derived and/or modified sequence
gcgtgcgtatttctggcggaggatgcgccatgagcgctgaaagagcctgaaccgaagcgtccggctcgccgagagagtgagagccgggccggctcccaggagcgcgggcgaggcttgtcttttccaggcaccctggagtcccctcaggccagctcggtgggcgcgcacctgccagccgcccctgacctcgcaggccaggcgacctccgagcctgagaagatggcccagtccaagctcgattgccgctcacctgtcggcctcgactgctgcaactgctgcctggacctggcccatcggagtgggctccagcgaggcagcagcggggagaacaacaacccgggcagccctacagtgagcaactttcggcagctgcaggaaaagctggtctttgagaacctcaataccgacaagctcaacagcataatgcggcaggattcgctagagccggtgctgcgggacccctgctacctgatcaacgagggcatctgcaaccgcaacatcgaccagaccatgctctccat

SEQ ID NO: 258942 - DNA, 581 bp, Artificial Sequence
  derived and/or modified sequence
agagagaaggaaggggaggactgaggagagacggcgaaggggcagagggaaaccgggacagagactgcctctgaggggttcagggaagagaggacacagcgagctggggaaaggagcttgtcttttccaggcaccctggagtcccctcaggccagctcggtgggcgcgcacctgccagccgcccctgacctcgcaggccaggcgacctccgagcctgagaagatggcccagtccaagctcgattgccgctcacctgtcggcctcgactgctgcaactgctgcctggacctggcccatcggagtgggctccagcgaggcagcagcggggagaacaacaacccgggcagccctacagtgagcaactttcggcagctgcaggaaaagctggtctttgagaacctcaataccgacaagctcaacagcataatgcggcaggattcgctagagccggtgctgcgggacccctgctacctgatcaacgagggcatctgcaaccgcaacatcgaccagaccatgctctccatcctgctcttcttccacagtgcctccggagccagcgtggtggccatagacaacaagat

SEQ ID NO: 258943 - DNA, 569 bp, Artificial Sequence
  derived and/or modified sequence
atgcaatcgctacatctattgaaagggtaacgacagacggagatcaactaaggtggcagccctacagtgagcaactttcggcagctgcaggaaaagctggtctttgagaacctcaataccgacaagctcaacagcataatgcggcaggattcgctagagccggtgctgcgggacccctgctacctgatcaacgagggcatctgcaaccgcaacatcgaccagaccatgctctccatcctgctcttcttccacagtgcctccggagccagcgtggtggccatagacaacaagatcgaacaggccatggatctggtgaagaatcatctgatgtatgctgtgagagaggaggtggagatcctgaaggagcagatccgagagctggtggagaagaactcccagctagagcgtgagaacaccctgttgaagaccctggcaagcccagagcagctggagaagttccagtcctgtctgagccctgaagagccagctcccgaatccccacaagtgcccgaggcccctggtggttctgcggtgtaagtggctctgtcctcagggtgggcagagccact

SEQ ID NO: 258944 - DNA, 802 bp, Artificial Sequence
  derived and/or modified sequence
gctgctctatttcaaaggccagacttgtgaatgaaggagccgatgcgggggtggggagtactgactgaaatgtaagtcagttttacgtgaaaactgaacgtcatgaaaagtttagttttttcagacactaatcgttatttaatcctacacatttaaagtattccaagtctctgagtcctgagaaaccctggaaacccaccacttgcccacccagaacatccctccatcttacagagctggggcacgcccctcaggcctgtgaacatgcaatcgctacatctattgaaagggtaacgacagacggagatcaactaaggtggcagcttgtcttttccaggcaccctggagtcccctcaggccagctcggtgggcgcgcacctgccagccgcccctgacctcgcaggccaggcgacctccgagcctgagaagatggcccagtccaagctcgattgccgctcacctgtcggcctcgactgctgcaactgctgcctggacctggcccatcggagtgggctccagcgaggcagcagcggggagaacaacaacccgggcagccctacagtgagcaactttcggcagctgcaggaaaagctggtctttgagaacctcaataccgacaagctcaacagcataatgcggcaggattcgctagagccggtgctgcgggacccctgctacctgatcaacgagggcatctgcaaccgcaacatcgaccagaccatgctctccatcctgctcttcttccacagtgcctccggagccagcgtggtggccatagacaacaagatcgaacaggccatgg

SEQ ID NO: 258945 - protein, 1730 aa, Artificial Sequence
  derived and/or modified sequence
MNVQPCSRCGYGVYPAEKISCIDQIWHKACFHCEVCKMMLSVNNFVSHQKKPYCHAHNPKNNTFTSVYHTPLNLNVRTFPEAISGIHDQEDGEQCKSVFHWDMKSKDKEGAPNRQPLANERAYWTGYGEGNAWCPGALPDPEIVRMVEARKSLGEEYTEDYEQPRGKGSFPAMITPAYQRAKKANQLASQVEYKRGHDERISRFSTVVDTPELLRSKAGAQLQSDVRYTEDYEQQRGKGSFPAMITPAYQIAKRANELASDVRYHQQYQKEMRGMAGPAIGAEGILTRECADQYGQGYPEEYEEHRGKGSFPAMITPAYQNAKKAHELASDIKYRQDFNKMKGAAHYHSLPAQDNLVLKQAQSVNKLVSEVEYKKDLESSRGHSINYCETPQFRNVSKISKFTSDNKYKENYQNHMRGRYEGVGMDRRTLHAMKVGSLASNVAYKADYKHDIVDYNYPATLTPSYQTAMKLVPLKDANYRQSIDKLKYSSVTDTPQIVQAKINAQQLSHVNYRADYEKNKLNYTLPQDVPQLVKAKTNAKLFSEVKYKEGWEKTKGKGFEMKLDAMSLLAAKASGELASNIKYKEEYEKTKGKAMGTADSRLLHSLQIAKMSSEVEYKKGFEESKTRFHLPMDMVNIRHAKKAQTLASDLDYRKKLHEYTVLPEDMKTQWAKKAYGLQSELQYKADLAWMKGVGWLTEGSLNLEQAKKAGQLVSEKNYRQRVDELKFTSVTDSSQMEHAKKSQELQSGVAYKAGNEQSVHQYTISKDEPLFLQARANAANLSEKLYKSSWENQKAKGFELRLDSLTFLAAKAKRDLASEVKYKEDYERSRGKLIGAKDVQGDSQMSHSLQMSKLQSELEYKKGFEDTKSQCHVSLDMVHLVHARKAQHLATDVGYKTAEHHFTALPTDMKVEWAKKAYGLQSDNQYRADVKWMKGMGWVATGSLNVEQAKKAGELISEKKYRQHPDALKFTSIKDTPEMVQARISYTQAVDRLYREQGENIKHHYTPTADLPEVLLAKLNAMNISETRYKESWSKLRDGGYKLRLDALPFQAAKASGEIISDYKYKEAFEKMKGQMLGSRSLEDDISLAHSVYATSLQSDVNYKKGFEHSKAQFHLPLDMAALVHAKKAQTLASNQDYKHPLPQYTSLAEDLRLSCAKKAHKLQSENLYRSDLNFMRGVACVIPGTLEIEGRKKASELISESKYRQHPHSFKYTAVTDTPNLLHAKFSNQITNERLYKAAGEDARHEYTMTLGLPEFIRAKTNAANLSDARYKESWRNLRAQGYKLTIEALPFQAARASGDIASDFLYRHDFVKERGKLIGPQSVRDDPRIQHCRRMGQLQSELQYRRGATSSQAQFHLPMDMVHLVHAKNAQALASDHDYRTQYHKFTALPEDLKMAWAKKAHALQSELRYKSDLIGMKGIGWLALRSPQMESAKKAGELISETKYRKKPDSIKFTTVVDSPDLVHAKNSYMHCNERMYRSGDAESLHRYTLIPDHPDFTRARLNALHLSDKVYRNSWEQTRAGSYDFRLDAIPFQTARASREIASDFRYKEAFLRDRGLQIGYRSVDDDPRMKHFLNVGRLQSDNEYKKDFAKSRSQFHSSTDQPGLLQAKRSQQLASDVHYRQPLPQPTCDPEQLGLRHAQKAHQLQSDVKYKSDLNLTRGVGWTPPGSYKVEMARRAAELANARGLGLQGAYRGAEAVEAGDHQSGEVNPDATEILHVKKKKALLL

SEQ ID NO: 258946 - protein, 1738 aa, Artificial Sequence
  derived and/or modified sequence
MNVQPCSRCGYGVYPAEKISCIDQIWHKACFHCEVCKMMLSVNNFVSHQKKPYCHAHNPKNNTFTSVYHTPLNLNVRTFPEAISGIHDQEDGEQCKSVFHWDMKSKDKEGAPNRQPLANERAYWTGYGEGNAWCPGALPDPEIVRMVEARKSLGEEYTEDYEQPRGKGSFPAMITPAYQRAKKANQLASQVEYKRGHDERISRFSTVVDTPELLRSKAGAQLQSDVRYTEDYEQQRGKGSFPAMITPAYQIAKRANELASDVRYHQQYQKEMRGMAGPAIGAEGILTRECADQYGQGYPEEYEEHRGKGSFPAMITPAYQNAKKAHELASDIKYRQDFNKMKGAAHYHSLPAQDNLVLKQAQSVNKLVSEVEYKKDLESSRGHSINYCETPQFRNVSKISKFTSDNKYKENYQNHMRGRYEGVGMDRRTLHAMKVGSLASNVAYKADYKHDIVDYNYPATLTPSYQTAMKLVPLKDANYRQSIDKLKYSSVTDTPQIVQAKINAQQLSHVNYRADYEKNKLNYTLPQDVPQLVKAKTNAKLFSEVKYKEGWEKTKGKGFEMKLDAMSLLAAKASGELASNVHLLLSLKIKYKEEYEKTKGKAMGTADSRLLHSLQIAKMSSEVEYKKGFEESKTRFHLPMDMVNIRHAKKAQTLASDLDYRKKLHEYTVLPEDMKTQWAKKAYGLQSELQYKADLAWMKGVGWLTEGSLNLEQAKKAGQLVSEKNYRQRVDELKFTSVTDSSQMEHAKKSQELQSGVAYKAGNEQSVHQYTISKDEPLFLQARANAANLSEKLYKSSWENQKAKGFELRLDSLTFLAAKAKRDLASEVKYKEDYERSRGKLIGAKDVQGDSQMSHSLQMSKLQSELEYKKGFEDTKSQCHVSLDMVHLVHARKAQHLATDVGYKTAEHHFTALPTDMKVEWAKKAYGLQSDNQYRADVKWMKGMGWVATGSLNVEQAKKAGELISEKKYRQHPDALKFTSIKDTPEMVQARISYTQAVDRLYREQGENIKHHYTPTADLPEVLLAKLNAMNISETRYKESWSKLRDGGYKLRLDALPFQAAKASGEIISDYKYKEAFEKMKGQMLGSRSLEDDISLAHSVYATSLQSDVNYKKGFEHSKAQFHLPLDMAALVHAKKAQTLASNQDYKHPLPQYTSLAEDLRLSCAKKAHKLQSENLYRSDLNFMRGVACVIPGTLEIEGRKKASELISESKYRQHPHSFKYTAVTDTPNLLHAKFSNQITNERLYKAAGEDARHEYTMTLGLPEFIRAKTNAANLSDARYKESWRNLRAQGYKLTIEALPFQAARASGDIASDFLYRHDFVKERGKLIGPQSVRDDPRIQHCRRMGQLQSELQYRRGATSSQAQFHLPMDMVHLVHAKNAQALASDHDYRTQYHKFTALPEDLKMAWAKKAHALQSELRYKSDLIGMKGIGWLALRSPQMESAKKAGELISETKYRKKPDSIKFTTVVDSPDLVHAKNSYMHCNERMYRSGDAESLHRYTLIPDHPDFTRARLNALHLSDKVYRNSWEQTRAGSYDFRLDAIPFQTARASREIASDFRYKEAFLRDRGLQIGYRSVDDDPRMKHFLNVGRLQSDNEYKKDFAKSRSQFHSSTDQPGLLQAKRSQQLASDVHYRQPLPQPTCDPEQLGLRHAQKAHQLQSDVKYKSDLNLTRGVGWTPPGSYKVEMARRAAELANARGLGLQGAYRGAEAVEAGDHQSGEVNPDATEILHVKKKKALLL

SEQ ID NO: 258947 - DNA, 5193 bp, Artificial Sequence
  derived and/or modified sequence
atgaacgttcagccctgctctagatgtggctatggagtgtaccctgcagagaagatcagctgtattgaccaaatctggcacaaggcctgctttcactgcgaggtttgcaaaatgatgctatctgtgaataactttgtgtcccaccagaaaaagccctactgccatgcacacaaccccaaaaacaataccttcacaagcgtgtatcacactcccctgaatttgaacgtcagaactttccctgaagctatcagcgggatccatgaccaagaggatggtgagcaatgcaaatcggtgttccactgggacatgaagtctaaggacaaggaaggagccccaaacagacagcccctggctaacgaaagagcgtattggacaggatatggagaaggcaatgcatggtgtcccggcgccctacccgaccctgaaattgtgcgcatggtagaggcccgtaaatccctcggcgaagagtataccgaggactacgagcagccacgcggcaagggcagctttccagctatgatcacgccagcttaccaacgcgccaagaaagcaaatcagttggcctcacaggtcgagtacaagagaggtcacgatgagagaatctctagatttagcacggtggtcgatacgcctgagctgctgcgttcaaaagccggagcccagctgcagtcagacgtgaggtacacagaagactacgaacagcagcgagggaaaggatcattccccgctatgatcacacctgcttatcagatcgccaaaagagcaaacgaactcgcttcggacgttcggtaccaccagcagtaccagaaagagatgcgcgggatggccggaccagccataggggcagagggtattttgacacgggagtgcgcggaccaatatgggcaggggtatcctgaggagtatgaggagcatcgggggaagggttccttccctgcaatgatcacacccgcataccagaatgctaagaaggcgcatgagctggcgagtgacatcaaataccggcaagacttcaacaagatgaaaggggccgcgcattaccatagtttgccggcccaagacaatctcgtgttgaaacaggcacagagcgttaataaactcgttagtgaggtcgagtataagaaggacttagagtcatctagaggccactctattaattactgtgaaaccccgcaatttcgaaacgtatcgaagatcagtaaattcacttctgacaacaagtacaaggaaaactatcagaatcacatgcgcgggcgatatgagggagtcggaatggacaggagaacactgcacgccatgaaggtgggttctctagcctccaacgtagcctataaggctgactataaacatgacatcgtggactataattatcctgcgactttaactccctcctaccagacagcaatgaagctagttccactcaaggatgcaaattacagacaaagtattgacaagcttaagtattcatcagtgactgacactcctcagatcgtccaggcaaaaattaacgctcaacagctcagccacgtcaactaccgagctgactatgagaaaaacaaactcaactatacgttgccacaagacgtcccccagctggtcaaggccaagactaacgctaagctcttcagtgaagttaaatacaaagagggctgggagaagactaaggggaagggatttgaaatgaagctagacgctatgtcattactagccgccaaggcctcaggagagctagcaagcaatattaagtacaaagaggaatacgagaaaacaaaaggcaaggcgatgggcacagcagactctaggctgctccacagcctgcagatcgcgaaaatgagttccgaggtggaatataaaaaaggctttgaagagtccaaaactagatttcatctaccaatggacatggtgaatattcgtcacgccaaaaaagctcagaccctggcctcagacctcgactatcgcaagaaactacatgaatatactgttctccccgaggacatgaagactcagtgggcaaaaaaagcttacggacttcagagtgaacttcaatataaagcagatctggcctggatgaaaggcgtcgggtggttaacagagggatctctaaatttggaacaggccaagaaagctggccaactggtgtccgagaagaactatcgccagagagttgacgagctgaaattcacaagcgtcacagactccagccagatggagcatgccaagaagtcccaggagcttcagagcggcgtggcctataaggctggcaacgaacagagcgtgcatcaatatacaatcagcaaggacgagcccctcttcctgcaggcacgcgccaatgcagccaatctcagcgagaaactgtataagtcctcttgggagaaccagaaagccaagggatttgagttaagactcgatagcctcaccttcttggcagctaaagctaagcgcgatctggcctccgaagtgaaatacaaggaggactacgagaggagtcgaggaaagctgattggcgccaaagacgtgcaaggtgattcacaaatgtctcactcactgcaaatgtccaagctccagagtgagctagagtataagaaaggtttcgaggatactaaaagtcagtgtcacgtttctctggacatggtgcacctcgtgcatgcaagaaaagctcagcaccttgctacagatgtaggctacaaaactgccgagcatcattttaccgccctcccaactgatatgaaggtggaatgggcgaagaaagcctacggactgcaaagcgataatcagtatagagctgatgtgaaatggatgaaaggcatgggatgggtagctactggctcactcaatgtcgaacaggccaagaaggcaggagaattgatctcagagaagaaatatagacaacatcctgacgccctgaaattcacatcaattaaagacacccccgagatggtgcaagctcgaatatcctatacccaggccgtggatagattgtatagggaacaaggcgaaaacatcaagcaccactataccccgactgctgacctcccagaagtgcttctcgctaagttaaatgccatgaacatctcggagacaaggtataaggaaagctggagcaagttaagagacggggggtataagctgcggttagatgcgctgccttttcaggccgcaaaagcttcgggcgagatcatttctgactacaagtacaaggaggcattcgagaagatgaagggccagatgctgggatcccgtagccttgaagacgacatcagtctggcccatagcgtttacgcaactagtctccagtctgacgtcaattacaaaaagggcttcgagcattcaaaggctcagttccatctgcccttggatatggccgctctcgtccacgccaaaaaagcgcagacactagcctcaaaccaggactataagcacccacttccacagtacacctcccttgcggaagatttgcggttatcctgcgccaagaaggctcacaagctgcagtcagagaacctgtacagatccgatcttaattttatgagaggtgtcgcttgcgttattcccgggactcttgagattgagggtcgcaagaaagcctccgagctcattagcgaatccaagtacaggcaacatcctcattctttcaagtacacagccgtgaccgatacacctaacctgctgcatgctaagttctctaaccagattaccaatgagcggttgtacaaagccgcgggagaagatgccaggcatgaatatacaatgacgctcggcctgccggagttcatcagggcaaagaccaatgcagcgaacttgagcgacgcccgatataaggaatcttggaggaatctgcgcgctcagggctacaagctcacgatcgaggccctgccttttcaagcggcccgggcatccggggacattgcttccgatttcctatatcggcacgattttgtgaaggaacgggggaaactgattgggccacagagcgtcagagacgacccacgtatacagcactgtagaaggatggggcaactgcaatcagaacttcaatatcgtcgtggcgccaccagttcccaagctcagtttcacttgcctatggatatggttcacctggtgcatgcaaagaatgcccaagctcttgctagtgatcatgactatcgcacccagtaccacaagttcaccgcgctgcctgaggacctgaagatggcttgggctaaaaaggctcacgcacttcagagtgagcttaggtataaatccgacctaatcggaatgaaaggaattggttggctggcccttcgctcccctcagatggagtccgcaaaaaaggcgggggaactgatttcagaaacgaaatatcgcaagaaacccgatagcattaagttcactacagtggtggactcacccgatctggtccacgccaaaaatagctacatgcactgtaacgagaggatgtatcgctccggagatgctgagagcctgcatcggtataccctcattcccgaccatccagatttcacacgggcccgtttgaatgctctgcatctgtccgacaaggtttaccgcaactcctgggagcagacacgggctggatcctatgacttcaggctcgacgcgatcccattccagacggcacgggcttccagagaaatcgcgtctgatttccgttacaaggaagcgttcctacgggaccgaggacttcagattgggtatagaagtgtcgatgatgatcccagaatgaagcactttctgaacgtgggtagactgcagtctgacaatgagtacaagaaagatttcgcgaaatcccgttcgcagttccacagttcgactgaccagccagggcttcttcaggccaagcgctcacaacagctcgccagtgatgtgcattaccggcagccattaccgcagccgacctgcgatccagagcagctcggcctccgacacgcgcagaaggcacaccagctgcagtccgacgttaaatataagtccgacttaaaccttacgagaggagtgggatggacaccacctgggtcctacaaagtggagatggctagacgtgccgccgagctcgcaaatgcaaggggcctgggcttgcagggcgcttacaggggggccgaagcagtcgaagctggagaccatcagtcgggcgaagtgaacccagatgccaccgagatcctgcatgttaagaagaagaaagccctgctgctgtag

SEQ ID NO: 258948 - DNA, 5217 bp, Artificial Sequence
  derived and/or modified sequence
atgaacgtgcagccatgttcaagatgcgggtacggggtttaccccgctgagaagatatcctgcattgaccaaatttggcataaggcctgttttcattgcgaggtgtgcaagatgatgctgtcagtgaacaatttcgtttcacatcagaaaaagccttactgccacgcccacaatcccaaaaacaatacattcactagtgtttaccacacgccactgaatctgaatgtgaggaccttccctgaggctatctccggcatccacgatcaggaggatggagaacaatgcaagagcgtattccattgggatatgaagagcaaagataaggagggggctccaaatcgccagccactggcaaatgaacgcgcgtactggacaggatatggtgaaggcaacgcgtggtgtccaggagccttgcctgaccccgaaatagtgcggatggtggaggccagaaagtccctgggtgaggaatatacagaagactacgaacaaccacgcggcaagggttccttccctgcaatgattacaccagcctaccagagagccaagaaagcaaaccaactggcttctcaggtggagtacaagcgaggccatgatgagcggatctcacgcttctccaccgtggtcgatacccctgagctgttgagatccaaagctggggcacagctacagtctgatgtcaggtacaccgaagattacgagcagcagaggggtaagggctctttccccgctatgattacccctgcttaccagattgccaagcgcgccaacgaactcgcttcagacgtcagataccaccagcaataccagaaagaaatgaggggtatggcgggtcctgccatcggtgcagagggaatacttacaagagaatgtgcagatcagtacggccagggatatccagaggagtacgaggagcatcgcgggaaggggtcttttccggctatgataacccctgcttatcagaatgccaaaaaagctcacgagttagcctcagatatcaagtaccgccaggacttcaacaagatgaaaggagctgcccactatcactccctcccggctcaggacaacttagtcctaaagcaagcccagagcgtcaacaagttagtcagcgaggtggagtataagaaggatctggagtcctcccgcgggcactccataaactattgtgagacgccgcagttccgcaacgtttccaaaatcagcaaattcaccagtgacaataagtataaggaaaattatcagaatcatatgagagggcggtacgagggggtcggaatggacagaaggacattacatgccatgaaagtcggctctcttgcgagcaatgttgcctacaaggctgactataagcacgatattgtcgattataattaccctgccacactcaccccaagctaccagaccgcgatgaagctcgtacccctcaaggacgccaactacaggcagtccatcgacaaactcaagtattcttctgtgacagacaccccacagatagttcaggctaaaatcaacgcccaacagctgtctcacgtaaactatagggcggattacgaaaaaaataaactgaattatacactcccgcaggacgttccacaattagtcaaagctaaaactaacgccaaactgttttctgaggtgaagtataaggaagggtgggagaaaaccaaagggaaaggatttgaaatgaaacttgatgcaatgtcactgcttgctgccaaagcatcaggggagttagcaagtaatgtacacctgcttcttagcttgaagattaagtacaaagaagagtatgagaaaacaaagggaaaagcaatggggacagccgactctaggcttctgcacagcttacagatagccaaaatgagtagtgaggtggagtacaaaaaaggtttcgaagaaagcaaaacacggttccatctgcccatggacatggtcaatattcgccacgcaaagaaggcgcagaccctcgcctctgacctcgactaccggaagaagcttcatgaatacacggtactccctgaggacatgaaaactcagtgggccaagaaagcttacggtctccagtccgaactgcaatataaggctgacctggcttggatgaaaggcgtagggtggctgacagaaggcagcttgaacttggaacaagctaaaaaggctggccagctggtgtctgagaagaactataggcagcgcgtggacgagttgaagttcacgtctgtcaccgactctagccaaatggaacatgcgaaaaagagccaggaactgcagtccggcgtggcctataaagccggaaatgagcagagcgtccatcaatacactatctccaaagatgaacccctgtttcttcaggcacgggcaaatgccgccaatttgtctgagaaactgtacaagtcttcatgggagaatcagaaggcgaaggggttcgagctgagattagactctttgactttcctggccgctaaggctaagagagacttggcctccgaagtgaagtacaaggaagactatgaacgcagtagggggaagctgatcggtgcaaaagacgtgcagggagacagtcaaatgtctcactcccttcagatgagcaaattacaaagcgagttggaatacaagaagggttttgaggataccaaatctcaatgtcacgtgtccctggacatggtgcatctggtgcatgcgaggaaagcccagcacctggccaccgatgtaggttacaaaactgccgagcatcactttacagcactcccaaccgacatgaaggtcgaatgggccaaaaaggcttacggccttcagtcagacaaccagtacagggcagatgtgaaatggatgaaaggaatgggctgggtcgccaccggatctctcaatgtcgagcaagctaagaaagccggcgagttaatcagcgaaaaaaagtatagacagcaccccgatgcactgaagtttacgagtatcaaagatacaccagagatggttcaagcaagaatctcctatactcaagcggtggatcgcttgtacagggagcagggggagaatattaaacaccattacacccccactgccgatttgccagaagtgttactcgcaaaacttaacgctatgaacatttctgaaactcggtacaaagaatcctggagcaagcttcgcgacggcgggtataaactgcgactcgacgccctcccgttccaggccgccaaggcatccggagaaataatatcagattataagtacaaggaagcattcgagaagatgaaaggtcagatgctgggaagcaggtcattggaggacgatatcagtctcgcccactccgtttacgcaactagtctgcagagtgatgtaaattacaagaagggattcgagcactctaaagcccaattccacctgcctcttgacatggccgcattggtgcatgcgaagaaggcacagaccttggcttccaaccaagattataaacacccactcccccaatatacctcattggcagaggacctaaggttgagctgcgccaagaaagcccacaagttacagagcgagaacctgtaccgatctgatcttaacttcatgcgaggagtggcctgcgtcattcccggcaccctggaaatagagggacgcaaaaaagcctctgaactcatttctgagtcaaaatacagacagcacccacacagcttcaagtatactgccgtcactgatacacccaatctcctgcatgccaagttctccaatcagattaccaacgaacgattgtataaagcagctggggaagacgccagacatgagtataccatgactctcggactgcctgaatttatcagggccaagacaaacgcggccaacttgagcgacgctcgttacaaggagagctggcgaaatcttcgagcccaaggatataaactcacaattgaagccctcccctttcaggcagctcgggcgagcggggacattgcctccgactttctgtataggcatgatttcgtaaaggaaagagggaagttgatcgggccacagagcgtgagagatgacccaagaattcaacactgcagacggatgggacagttgcaatccgaattgcaatacaggcggggcgccacatctagccaggcgcagtttcacttgccaatggacatggtccacctggtgcacgctaagaacgctcaggccctagctagcgatcatgattatagaacccagtaccataaattcacagccttgccagaggatctgaaaatggcgtgggcaaagaaagcccatgcactccagtctgaattgaggtataagtccgacctcatcggaatgaaggggattggctggctcgctcttagatccccccagatggagagcgcaaaaaaggccggggaactgattagcgagaccaaatacaggaaaaagcccgatagtatcaagtttacaacggtggtggatagtcccgatttggttcatgcaaagaatagctatatgcattgcaatgagaggatgtaccgcagcggcgacgctgaaagcctacacagatacacgctaatccctgatcacccagacttcactcgtgctaggttaaatgcccttcatttgtccgacaaggtgtatcgaaatagttgggaacaaacgagagccggctcctacgactttcgattagacgccatccccttccagacagccagggcttcaagggaaatagctagcgattttcggtacaaggaagcgtttctcagggatcgcggattacagattggctataggtccgtagatgatgacccacgcatgaagcattttctgaacgtgggccgtctgcagtcagataatgaatacaagaaggacttcgcgaagtccagaagtcaattccatagctccaccgaccagcccggactgctgcaagccaaacgctcacagcagttagcaagtgatgtgcactaccggcagcctttgccacagccgacgtgtgatcctgaacagctaggattgcgacacgctcagaaagcccatcagttgcagtccgacgtgaaatacaagagcgatctgaacctgacacgcggtgtgggctggacgcccccgggcagttacaaagtggaaatggcccgcagagcagccgaactggctaacgctcgaggacttggacttcagggagcctaccgcggggccgaggccgtggaggctggagaccaccaatccggtgaagtgaacccagatgccactgagattctccatgttaagaagaaaaaggcgctgctcctgtag

SEQ ID NO: 258949 - DNA, 5193 bp, Artificial Sequence
  derived and/or modified sequence
atgaatgtgcagccctgcagccgctgtggctatggagtgtacccagctgagaagatcagctgcatcgaccagatctggcacaaggcctgcttccactgtgaggtgtgcaagatgatgctgtctgtgaacaactttgtgagccaccagaagaagccctactgccacgcccacaaccccaagaacaacaccttcacctctgtgtaccacacccccctgaacctgaatgtgaggaccttccctgaggccatcagcggcatccatgaccaggaggatggagagcagtgcaagtctgtgttccactgggacatgaagagcaaggacaaggagggcgcccccaaccggcagcccctggccaatgaaagagcctactggacaggctatggagagggcaatgcctggtgccctggggccctgcctgaccctgagatcgtgaggatggtggaggccaggaagagcctgggggaggagtacacagaagattatgagcagccccggggcaagggcagcttccctgccatgatcaccccagcctaccagagggccaagaaggccaaccagctggccagccaggtggagtacaagaggggccatgatgagcgcatcagccgcttcagcacagtggtggacaccccagagctgctgcggagcaaggccggggcccagctgcagagtgatgtgcgctacacagaggactatgagcagcagaggggcaagggcagcttccctgccatgatcaccccagcctaccagatcgccaagagggccaatgagctggccagtgatgtgcgctaccaccagcagtaccagaaggagatgaggggcatggccggccctgccatcggggctgagggcatcctgaccagagaatgtgccgaccagtatggccagggctacccagaggagtatgaggagcaccggggcaagggcagcttccctgccatgatcaccccagcctaccagaatgccaagaaggcccacgagctggccagtgacatcaagtaccggcaggacttcaacaagatgaagggggccgcccactaccacagcctgcctgcccaggacaacctggtgctgaagcaggcccagagcgtgaacaagctggtgtctgaggtggagtacaagaaggacctggagagcagccggggccacagcatcaactactgtgagaccccccagttcagaaatgtgtccaagatcagcaagttcaccagtgacaacaagtacaaggagaactaccagaaccacatgaggggccgctatgagggcgtgggcatggacaggaggaccctgcacgccatgaaggtgggcagcctggccagcaatgtggcctacaaggctgactacaagcatgacatcgtggactacaactacccagccaccctgacccccagctaccagacagccatgaagctggtgcccctgaaggatgccaactaccggcagagcattgacaagctgaagtacagctctgtgacagacaccccccagatcgtgcaggccaagatcaatgcccagcagctgagccacgtgaactacagagctgactatgagaagaacaagctgaactacaccctgccccaggatgtgccccagctggtgaaggccaagaccaatgccaagctgttcagcgaggtgaagtacaaggagggctgggagaagaccaagggcaaaggatttgagatgaagctggatgccatgagcctgctggccgccaaggccagcggggagctggccagcaacatcaagtacaaggaggagtatgagaagaccaagggcaaggccatgggcacagctgacagccggctgctgcacagcctgcagatcgccaagatgagcagcgaggtggagtacaagaagggctttgaggagagcaagacccgcttccacctgcccatggacatggtgaacatcagacatgccaagaaggcccagaccctggccagtgacctggactacaggaagaagctgcacgagtacacagtgctgcctgaggacatgaagacccagtgggccaagaaggcctacggcctgcagagcgagctgcagtacaaggctgacctggcctggatgaagggcgtgggctggctgacagagggcagcctgaacctggagcaggccaagaaggccggccagctggtgtctgagaagaactaccggcagagggtggatgagctgaagttcacctctgtgacagacagcagccagatggagcacgccaagaagagccaggagctgcagagcggcgtggcctacaaggctggaaatgagcagagcgtgcaccagtacaccatcagcaaggatgagcccctcttcctgcaggcccgggccaatgctgccaacctgtctgagaagctgtacaagagctcctgggagaaccagaaggccaagggctttgagctgcggctggacagcctgaccttcctggccgccaaggccaagagggacctggccagcgaggtgaagtacaaggaggactatgaaagaagccggggcaagctgattggagccaaggatgtgcagggcgacagccagatgagccacagcctgcagatgagcaagctgcagagcgagctggagtacaagaagggctttgaggacaccaagagccagtgccacgtgtccctggacatggtgcacctggtgcacgccaggaaggcccagcacctggccacagatgtgggctacaagacagctgagcaccacttcaccgccctgcccacagacatgaaggtggagtgggccaagaaggcctacggcctgcagagcgacaaccagtacagagcagatgtgaagtggatgaagggcatgggctgggtggccaccggcagcctgaatgtggagcaggccaagaaggccggggagctgatcagcgagaagaagtaccggcagcacccagatgccctgaagttcaccagcatcaaggacaccccagagatggtgcaggcccgcatctcctacacccaggccgtggaccggctgtaccgggagcagggcgagaacatcaagcaccactacacccccacagctgacctgcctgaggtgctgctggccaagctgaatgccatgaacatcagcgagacccgctacaaggagagctggagcaagctgagagatggcggctacaagctgcggctggatgccctgcccttccaggccgccaaggccagcggggagatcatcagtgactacaagtacaaggaggcctttgagaagatgaagggccagatgctgggcagccgcagcctggaggatgacatcagcctggcccacagcgtgtatgccaccagcctgcagagtgatgtgaactacaagaagggctttgagcacagcaaggcccagttccacctgcccctggacatggccgccctggtgcacgccaagaaggcccagaccctggccagcaaccaggactacaagcaccccctgccccagtacaccagcctggccgaggacctgcggctgagctgtgccaagaaggcccacaagctgcagagcgagaacctgtacagaagtgacctgaacttcatgaggggcgtggcctgtgtgattcctggcaccctggagattgagggcaggaagaaggccagcgagctgatcagcgagagcaagtaccggcagcacccccacagcttcaagtacacagctgtgacagacacccccaacctgctgcacgccaagttcagcaaccagatcaccaatgaaaggctgtacaaggccgccggggaggatgcccggcatgagtacaccatgaccctgggcctgcctgagttcatccgggccaagaccaatgctgccaacctgagtgatgcccgctacaaggagagctggaggaacctgcgggcccagggctacaagctgaccatcgaggccctgcccttccaggccgcccgggccagcggggacatcgccagtgacttcctgtacagacatgactttgtgaaggagcggggcaagctgattggcccccagagcgtgagagatgacccccgcatccagcactgcaggaggatgggccagctgcagagcgagctgcagtacagaagaggagccaccagcagccaggcccagttccacctgcccatggacatggtgcacctggtgcacgccaagaatgcccaggccctggccagtgaccatgactaccgcacccagtaccacaagttcaccgccctgcctgaggacctgaagatggcctgggccaagaaggcccacgccctgcagagcgagctgcgctacaagagtgacctgattggcatgaagggcatcggctggctggccctgcggagcccccagatggagagcgccaagaaggccggggagctgatcagcgagaccaagtacaggaagaagccagacagcatcaagttcaccaccgtggtggacagcccagacctggtgcacgccaagaacagctacatgcactgcaatgaaagaatgtacagaagtggagatgctgagagcctgcaccgctacaccctcatcccagaccacccagacttcacccgggcccggctgaatgccctgcacctgagtgacaaggtgtacagaaacagctgggagcagacccgggccggcagctatgacttccggctggatgccatccccttccagacagcccgggccagccgggagatcgccagtgacttccgctacaaggaggccttcctgcgggaccggggcctgcagatcggctacagatctgtggatgatgaccccaggatgaagcacttcctgaatgtgggccgcctgcagagcgacaatgagtacaagaaggactttgccaagagccgcagccagttccacagcagcacagaccagcccggcctgctgcaggccaagaggagccagcagctggccagtgatgtgcactaccggcagcccctgccccagcccacctgtgaccctgagcagctgggcctgcggcatgcccagaaggcccaccagctgcagagtgatgtgaagtacaagagtgacctgaacctgacccggggcgtgggctggaccccacctggcagctacaaggtggagatggccaggagagctgctgagctggccaatgcccggggcctgggcctgcagggcgcctacagaggagctgaggccgtggaggccggggaccaccagagcggggaggtgaacccagatgccacagagatcctgcacgtgaagaagaagaaggccctgctgctgtag

SEQ ID NO: 258950 - DNA, 5217 bp, Artificial Sequence
  derived and/or modified sequence
atgaatgtgcagccctgcagccgctgtggctatggagtgtacccagctgagaagatcagctgcatcgaccagatctggcacaaggcctgcttccactgtgaggtgtgcaagatgatgctgtctgtgaacaactttgtgagccaccagaagaagccctactgccacgcccacaaccccaagaacaacaccttcacctctgtgtaccacacccccctgaacctgaatgtgaggaccttccctgaggccatcagcggcatccatgaccaggaggatggagagcagtgcaagtctgtgttccactgggacatgaagagcaaggacaaggagggcgcccccaaccggcagcccctggccaatgaaagagcctactggacaggctatggagagggcaatgcctggtgccctggggccctgcctgaccctgagatcgtgaggatggtggaggccaggaagagcctgggggaggagtacacagaagattatgagcagccccggggcaagggcagcttccctgccatgatcaccccagcctaccagagggccaagaaggccaaccagctggccagccaggtggagtacaagaggggccatgatgagcgcatcagccgcttcagcacagtggtggacaccccagagctgctgcggagcaaggccggggcccagctgcagagtgatgtgcgctacacagaggactatgagcagcagaggggcaagggcagcttccctgccatgatcaccccagcctaccagatcgccaagagggccaatgagctggccagtgatgtgcgctaccaccagcagtaccagaaggagatgaggggcatggccggccctgccatcggggctgagggcatcctgaccagagaatgtgccgaccagtatggccagggctacccagaggagtatgaggagcaccggggcaagggcagcttccctgccatgatcaccccagcctaccagaatgccaagaaggcccacgagctggccagtgacatcaagtaccggcaggacttcaacaagatgaagggggccgcccactaccacagcctgcctgcccaggacaacctggtgctgaagcaggcccagagcgtgaacaagctggtgtctgaggtggagtacaagaaggacctggagagcagccggggccacagcatcaactactgtgagaccccccagttcagaaatgtgtccaagatcagcaagttcaccagtgacaacaagtacaaggagaactaccagaaccacatgaggggccgctatgagggcgtgggcatggacaggaggaccctgcacgccatgaaggtgggcagcctggccagcaatgtggcctacaaggctgactacaagcatgacatcgtggactacaactacccagccaccctgacccccagctaccagacagccatgaagctggtgcccctgaaggatgccaactaccggcagagcattgacaagctgaagtacagctctgtgacagacaccccccagatcgtgcaggccaagatcaatgcccagcagctgagccacgtgaactacagagctgactatgagaagaacaagctgaactacaccctgccccaggatgtgccccagctggtgaaggccaagaccaatgccaagctgttcagcgaggtgaagtacaaggagggctgggagaagaccaagggcaaaggatttgagatgaagctggatgccatgagcctgctggccgccaaggccagcggggagctggccagcaatgtgcacctgctgctgagcctgaagatcaagtacaaggaggagtatgagaagaccaagggcaaggccatgggcacagctgacagccggctgctgcacagcctgcagatcgccaagatgagcagcgaggtggagtacaagaagggctttgaggagagcaagacccgcttccacctgcccatggacatggtgaacatcagacatgccaagaaggcccagaccctggccagtgacctggactacaggaagaagctgcacgagtacacagtgctgcctgaggacatgaagacccagtgggccaagaaggcctacggcctgcagagcgagctgcagtacaaggctgacctggcctggatgaagggcgtgggctggctgacagagggcagcctgaacctggagcaggccaagaaggccggccagctggtgtctgagaagaactaccggcagagggtggatgagctgaagttcacctctgtgacagacagcagccagatggagcacgccaagaagagccaggagctgcagagcggcgtggcctacaaggctggaaatgagcagagcgtgcaccagtacaccatcagcaaggatgagcccctcttcctgcaggcccgggccaatgctgccaacctgtctgagaagctgtacaagagctcctgggagaaccagaaggccaagggctttgagctgcggctggacagcctgaccttcctggccgccaaggccaagagggacctggccagcgaggtgaagtacaaggaggactatgaaagaagccggggcaagctgattggagccaaggatgtgcagggcgacagccagatgagccacagcctgcagatgagcaagctgcagagcgagctggagtacaagaagggctttgaggacaccaagagccagtgccacgtgtccctggacatggtgcacctggtgcacgccaggaaggcccagcacctggccacagatgtgggctacaagacagctgagcaccacttcaccgccctgcccacagacatgaaggtggagtgggccaagaaggcctacggcctgcagagcgacaaccagtacagagcagatgtgaagtggatgaagggcatgggctgggtggccaccggcagcctgaatgtggagcaggccaagaaggccggggagctgatcagcgagaagaagtaccggcagcacccagatgccctgaagttcaccagcatcaaggacaccccagagatggtgcaggcccgcatctcctacacccaggccgtggaccggctgtaccgggagcagggcgagaacatcaagcaccactacacccccacagctgacctgcctgaggtgctgctggccaagctgaatgccatgaacatcagcgagacccgctacaaggagagctggagcaagctgagagatggcggctacaagctgcggctggatgccctgcccttccaggccgccaaggccagcggggagatcatcagtgactacaagtacaaggaggcctttgagaagatgaagggccagatgctgggcagccgcagcctggaggatgacatcagcctggcccacagcgtgtatgccaccagcctgcagagtgatgtgaactacaagaagggctttgagcacagcaaggcccagttccacctgcccctggacatggccgccctggtgcacgccaagaaggcccagaccctggccagcaaccaggactacaagcaccccctgccccagtacaccagcctggccgaggacctgcggctgagctgtgccaagaaggcccacaagctgcagagcgagaacctgtacagaagtgacctgaacttcatgaggggcgtggcctgtgtgattcctggcaccctggagattgagggcaggaagaaggccagcgagctgatcagcgagagcaagtaccggcagcacccccacagcttcaagtacacagctgtgacagacacccccaacctgctgcacgccaagttcagcaaccagatcaccaatgaaaggctgtacaaggccgccggggaggatgcccggcatgagtacaccatgaccctgggcctgcctgagttcatccgggccaagaccaatgctgccaacctgagtgatgcccgctacaaggagagctggaggaacctgcgggcccagggctacaagctgaccatcgaggccctgcccttccaggccgcccgggccagcggggacatcgccagtgacttcctgtacagacatgactttgtgaaggagcggggcaagctgattggcccccagagcgtgagagatgacccccgcatccagcactgcaggaggatgggccagctgcagagcgagctgcagtacagaagaggagccaccagcagccaggcccagttccacctgcccatggacatggtgcacctggtgcacgccaagaatgcccaggccctggccagtgaccatgactaccgcacccagtaccacaagttcaccgccctgcctgaggacctgaagatggcctgggccaagaaggcccacgccctgcagagcgagctgcgctacaagagtgacctgattggcatgaagggcatcggctggctggccctgcggagcccccagatggagagcgccaagaaggccggggagctgatcagcgagaccaagtacaggaagaagccagacagcatcaagttcaccaccgtggtggacagcccagacctggtgcacgccaagaacagctacatgcactgcaatgaaagaatgtacagaagtggagatgctgagagcctgcaccgctacaccctcatcccagaccacccagacttcacccgggcccggctgaatgccctgcacctgagtgacaaggtgtacagaaacagctgggagcagacccgggccggcagctatgacttccggctggatgccatccccttccagacagcccgggccagccgggagatcgccagtgacttccgctacaaggaggccttcctgcgggaccggggcctgcagatcggctacagatctgtggatgatgaccccaggatgaagcacttcctgaatgtgggccgcctgcagagcgacaatgagtacaagaaggactttgccaagagccgcagccagttccacagcagcacagaccagcccggcctgctgcaggccaagaggagccagcagctggccagtgatgtgcactaccggcagcccctgccccagcccacctgtgaccctgagcagctgggcctgcggcatgcccagaaggcccaccagctgcagagtgatgtgaagtacaagagtgacctgaacctgacccggggcgtgggctggaccccacctggcagctacaaggtggagatggccaggagagctgctgagctggccaatgcccggggcctgggcctgcagggcgcctacagaggagctgaggccgtggaggccggggaccaccagagcggggaggtgaacccagatgccacagagatcctgcacgtgaagaagaagaaggccctgctgctgtag

SEQ ID NO: 258951 - DNA, 5193 bp, Artificial Sequence
  derived and/or modified sequence
atgaacgtgcagccctgcagccggtgcggctacggcgtgtaccccgccgagaagatatcttgtattgatcagatttggcataaggcatgcttccattgcgaggtgtgcaaaatgatgctctccgtcaacaacttcgtgagccaccaaaagaagccctattgtcacgctcataatccaaaaaacaacacattcacatccgtgtaccatacccctctaaatttgaatgtcagaaccttccccgaggcaatctcaggcatacacgaccaggaagatggtgaacagtgtaagagtgtattccactgggacatgaagtcaaaagataaagaaggagcccccaaccgccagcctttggcgaatgagcgggcatactggacgggatacggggagggaaatgcgtggtgccctggagcacttccggacccagaaattgtgcgaatggtggaggcccgcaaaagcctgggtgaggagtacaccgaggattatgagcagccgcgcggaaagggctctttcccagctatgatcaccccggcgtaccagcgcgccaagaaggctaatcagctcgcctctcaggtggagtataaaagaggccatgatgaacggatttcccgtttctcgactgttgtggacacaccagagcttctcagatccaaagccggcgcccaactgcagagcgatgtcaggtacactgaggattacgagcagcaacgggggaaagggagcttcccagccatgatcaccccggcatatcagatcgcaaagcgggctaatgagcttgcatcagatgtgcgataccatcaacaataccaaaaagagatgcgcggcatggccgggcccgctataggggccgaaggcatactgactagggaatgcgcagaccaatatggccaggggtatccggaagaatacgaggaacaccgaggtaaaggtagctttcccgctatgataacccctgcatatcaaaacgctaagaaggctcacgagctggccagcgacatcaaatacagacaggacttcaacaaaatgaagggggcagctcactatcacagcttaccagcgcaggacaatctggtacttaagcaagcccagtctgtcaataaactcgtgtctgaagtggagtataaaaaggacctcgaatcctcacgcggacatagtattaactactgcgagacccctcagtttaggaatgtgagcaagatctccaaattcacctcagacaataaatacaaggagaactatcagaaccatatgaggggcagatacgaaggcgtgggcatggatcgacggacactgcatgccatgaaagtcggatctctcgctagcaatgtggcgtacaaagccgactataagcacgatatagtcgattacaattaccccgctacactcacccctagctaccagaccgccatgaaactggttccgctgaaagacgctaactataggcaatcaatcgataagcttaaatactcatccgtgaccgacactccccagatcgtgcaagcaaaaattaatgctcagcagttgagtcatgttaattacagggcagattacgagaaaaataaactaaattacacacttcctcaggatgtcccacagttggtgaaagcaaagaccaacgcgaaattgttctctgaagtcaagtacaaggagggatgggagaagaccaaaggtaaaggcttcgaaatgaagctcgatgcaatgtcattgttggctgctaaagcctccggcgagctcgcctccaacattaaatataaggaagagtatgagaaaaccaaggggaaggccatgggaacagcggattctcgcctgctgcattccttgcagatagcaaagatgtcgtctgaggtcgaatacaaaaaggggtttgaggaatccaaaactcgctttcacctgcctatggacatggtgaatatcaggcatgccaagaaggctcagacgctcgcctccgaccttgattatcgaaaaaagcttcacgagtatacagtccttcctgaggacatgaagacacagtgggccaaaaaagcatacgggctgcagagtgagctccagtacaaagccgatttggcttggatgaaaggggtgggctggctcaccgagggttctctgaatctggagcaggcaaaaaaggcaggtcagctcgttagcgaaaagaattaccggcagcgtgtcgacgagctaaaatttacatccgtgaccgattccagccagatggaacacgccaagaaaagtcaagagttgcagtctggggtggcttataaagctggcaacgagcagagcgtgcaccagtacaccatcagcaaagatgaaccactctttctccaggctagagcgaacgctgcaaacctgtccgaaaagctgtataaatcatcatgggagaaccaaaaagcaaaaggattcgagctgcggctggacagcctcacgttcctcgcggcaaaggccaagcgggacctcgcttccgaggtcaaatataaggaggactacgaacgctcacgcggaaaactgataggggcaaaagatgttcaaggtgacagccaaatgtcccactcgctgcaaatgagcaagttgcagtctgagttggagtataagaagggatttgaagacacgaagtctcagtgccatgtgtccctggatatggtccatttggtgcacgctcgtaaggctcagcacctagcaactgacgttgggtacaaaacagcagaacatcacttcaccgctctcccaacagacatgaaagtggagtgggccaagaaggcctacggactacagagtgacaatcagtatcgggctgatgtgaagtggatgaagggtatgggatgggtcgccacaggctctctgaacgtggagcaggcgaagaaggccggtgaactaatctcagagaagaaataccgccagcacccagacgcccttaagttcacttccattaaagacacacccgagatggtccaggctaggatttcgtatactcaagccgtggatcgcctgtatcgggaacagggcgagaacatcaagcaccattatactcccaccgcagacctcccagaggtgctcctcgcaaagctaaatgcgatgaacatctctgaaacacggtataaggagagctggtccaaactccgcgatggggggtataagctccgactggacgccttgcctttccaggccgctaaagcgagcggggaaattatcagcgattacaagtataaagaggcttttgaaaaaatgaaagggcaaatgttgggaagccggagtttggaggacgatatcagtctcgcccactccgtgtatgccacctccctccagtcagacgtgaattataagaagggattcgaacactctaaggcccaatttcatctccccctcgatatggctgctctggtgcacgcaaagaaagcccagacccttgccagcaaccaggattataagcacccactgccacagtacacctcgctggccgaggacctccggctttcttgcgcaaaaaaggctcataagcttcagagcgagaatctctatcgcagcgaccttaactttatgagaggcgtggcttgtgtcatccccggcacactggaaatcgaggggcggaaaaaggcgagtgagctgatatctgagtcaaagtacagacagcacccccacagttttaagtacactgccgtgaccgatactcctaacctgctgcacgccaagttttctaaccagataaccaatgagcgattatacaaagctgccggagaggatgcccgccatgagtataccatgactcttggactgcctgagtttatccgggccaagactaacgccgccaacctctcagacgcaagatacaaagagagctggaggaatcttagggcccagggttataaacttactattgaggccttgcccttccaggctgctagggcttcgggcgacatcgcaagcgactttttatataggcatgactttgtaaaagagagagggaagctgatcggtccacagagtgtgcgcgatgatccccggattcagcattgtcgccgcatggggcagttgcagtccgaactgcaatatcggcgtggcgctacatcaagccaggcgcagttccacctgccaatggatatggtgcatctggttcatgcgaagaatgcccaggcgcttgcttcagaccacgattacagaacgcagtaccacaagttcacagcactccctgaggatctgaagatggcctgggctaagaaagcccacgcgctgcaaagtgagctgagatataagtctgatttaattggtatgaagggcattggatggctggcccttcgcagcccccagatggagtcagcaaaaaaggcaggcgagttgatctccgaaactaagtatcgcaagaagccagatagtatcaaatttactacggtagtagattcccctgacctagtgcacgctaagaatagttacatgcactgtaatgagcgcatgtataggagcggtgatgccgaatcccttcacagatacactctcattccggaccatcctgatttcactcgggcccgcctaaacgcactgcacctgtcagacaaggtatataggaactcctgggaacagacaagggccggatcctatgatttccgactcgacgccattcccttccagactgcacgggcgtcccgggaaattgcgagcgacttcaggtacaaggaagcctttttgagagaccgcggcctgcagatcgggtatcggtccgtggacgatgacccccggatgaagcattttcttaatgtgggcaggctgcagagtgacaacgaatacaagaaggattttgcgaagtcccgaagccagttccacagcagcaccgaccagcccggtcttctgcaggcaaaaaggtctcagcagttggcctcggatgtgcactatcgccaaccattaccccagccaacttgcgatcctgagcagcttggcctgcggcacgcacagaaagcccaccagcttcagagcgatgtgaaatataaaagcgacttgaacctcactcggggagtggggtggacgcctccaggctcctataaggttgaaatggcccggcgtgccgccgaacttgcaaatgcacgaggcttggggctgcagggtgcatacaggggggccgaagccgtggaggctggggaccatcagtcaggggaggtcaaccccgatgctaccgaaattctgcacgtgaagaaaaagaaagccttattactgtag

SEQ ID NO: 258952 - DNA, 5217 bp, Artificial Sequence
  derived and/or modified sequence
atgaacgtgcagccctgcagccggtgcggctacggcgtgtaccccgcggaaaagattagttgcattgaccaaatatggcacaaagcatgtttccactgtgaagtttgtaaaatgatgctctctgtgaataactttgtcagccatcagaagaaaccttactgtcacgctcacaatcccaaaaacaacacttttacctcagtgtaccacactcctttgaacctgaacgttcgcacgtttccagaagctatctccgggatccacgaccaggaggacggagagcagtgtaagtctgtctttcactgggatatgaagtctaaggacaaagagggtgcaccaaacagacaaccattggccaacgagcgggcttactggacaggttatggggaaggaaatgcctggtgcccaggagctctgccggatcccgagatcgtgcggatggtagaggcgcgaaagagtctaggagaggagtatactgaggattacgaacagcctcggggtaaaggctctttccctgccatgattacccctgcttatcaacgggcgaagaaggcgaaccagctcgcttcacaggtggaatacaagcgcgggcacgacgaacgaatatctaggttctcaaccgtggtggacactccagagctgctccgcagcaaggccggtgcgcagctccaatcagacgtgagatacaccgaggattacgagcagcagagaggcaaaggcagctttcctgccatgatcaccccagcctatcagattgctaaaagagcaaatgagttagcatccgatgttaggtaccatcagcagtaccagaaggaaatgcggggaatggcagggccagccatcggagctgagggcatactgacccgagaatgtgcagatcagtatgggcaggggtatccggaggagtacgaagagcacaggggcaagggctcctttccggccatgattacccccgcataccaaaacgcaaaaaaagcccatgaattggcatccgacattaagtatcgacaggatttcaacaagatgaagggggcagcccactaccacagcctgcccgcacaggacaacctggtgctgaagcaggcccaatccgtaaacaagcttgtttccgaagttgagtataaaaaggatctggagagtagcagaggccattcgataaactactgtgagacaccccagttcaggaacgtgagtaagatcagtaagtttacatccgacaacaagtacaaagaaaattaccaaaatcatatgcggggaaggtatgagggcgtgggcatggacagacggactctacatgcaatgaaggttggaagcctcgcaagtaacgtggcctacaaagcagactataagcacgatattgtggactataattacccagctactctcacccctagttaccaaaccgccatgaaacttgtccctctcaaagacgcaaattaccggcagagtattgacaagctgaaatacagctccgtcactgatactccccagatcgtccaggctaaaatcaatgcgcagcagctatcccacgtaaactaccgcgcggattatgagaagaacaagttaaactacacactgccacaggacgtgcctcagctcgtgaaagcaaaaacaaacgcaaaattgttcagtgaggtaaaatataaggaaggctgggagaagaccaagggaaagggtttcgaaatgaaactggacgcaatgtctttgttagcagctaaagcaagtggtgaactggcaagcaacgttcatctgctgctgtcattgaagattaagtacaaggaggagtatgagaagaccaagggcaaagccatgggcacggccgattccagactgttgcactccctgcagattgctaaaatgtcttccgaagtcgagtacaaaaagggctttgaagaaagtaaaaccagattccacctgcccatggatatggtgaatatccgtcacgctaagaaagcacagacgcttgcaagtgacttggactatcgcaagaagctccatgaatataccgtgctgcccgaagatatgaagactcagtgggccaagaaagcttatggattacagtccgaactgcagtataaggctgaccttgcgtggatgaagggcgtcgggtggctgacagagggcagcctgaacctggaacaagcgaagaaggccggacagctagtgagcgaaaagaactatcgacagagagtcgatgagctaaaatttacgtctgtgaccgacagcagccagatggagcacgctaagaaatcacaagagctgcagtcgggggtcgcttacaaggccgggaacgagcagtcagtgcaccaatatacaatatcaaaggacgagcctctgtttttacaagctcgagcaaacgccgccaacctgtccgagaaactttataagtcttcctgggaaaaccaaaaggcgaaaggcttcgaactgcgattggatagcctcacttttttggcggccaaggccaaaagagatttggcttctgaggtcaaatacaaggaagattatgaacggagcagaggtaagctcattggggccaaagatgtccagggcgattcccaaatgagccacagcctgcagatgtcaaaacttcagtcggaattggaatataaaaagggattcgaggacacaaagagccaatgtcacgtctccctggatatggtccaccttgtccatgctagaaaggcccagcatctcgccactgacgtgggttacaaaactgccgagcatcactttactgccttgcccacagatatgaaggtcgagtgggcaaagaaagcctatgggctgcagtcagacaatcagtacagggccgatgtgaagtggatgaaagggatgggctgggttgcaactggatctctgaatgttgagcaggctaagaaggctggggaactgatcagcgagaagaaatatagacagcatcccgatgccctgaaatttactagtatcaaagatacacccgagatggttcaggcccgaatctcgtatacacaggccgtggaccgactttatagagaacagggggagaacattaaacatcactataccccaactgctgatttgcctgaggtactgcttgcgaagctaaatgctatgaacatcagtgaaacccgctacaaggagtcttggtctaaattacgggatggcggatacaagttaaggctcgatgccttgcccttccaagccgccaaggcttccggggagataataagcgactacaaatataaggaggcatttgagaagatgaagggccagatgctgggcagccggagcctggaggatgatatcagtctggcccactctgtctacgcaacaagcttgcagagcgacgttaattacaaaaagggcttcgaacacagcaaggcacagttccacttgcctctcgacatggcagctctggtgcatgctaagaaagctcagaccctcgcctcgaaccaggattacaaacacccactcccacagtacaccagtttggccgaggaccttagactgagctgcgccaagaaggctcataagctccagtcagagaacttgtatcgatccgacttaaatttcatgaggggtgtggcttgtgtcatacctgggaccctggagattgagggacgcaagaaagcctctgagctgatttcagaaagcaagtaccgacagcaccctcacagcttcaaatatactgcagtcaccgatactccaaacctgctccacgcgaagtttagtaatcaaatcaccaacgagaggctctacaaggcagcaggcgaggacgctaggcacgaatacaccatgactttaggcctgcctgaatttataagagccaaaaccaacgcagcaaatctctccgatgctcggtacaaagaaagttggaggaatctccgagctcaaggttacaagctgacaattgaggcactaccgttccaggcagcccgcgcctccggagatatcgcctccgactttctgtacaggcatgactttgtgaaggagcggggcaagttgattgggcctcaatctgtacgcgatgaccctcggatacaacattgtcgccgcatggggcagctccagtccgagctccagtaccggcgcggggccacttccagccaggcccagtttcacttaccaatggacatggtgcatctggttcacgcgaagaacgcccaggctttggcttcagaccacgattaccgcacccagtaccacaagttcactgccctgccggaagacctcaaaatggcatgggccaagaaagctcatgccctgcagtctgagctccggtataaatccgacttaatcggcatgaaaggcatcgggtggctagcactgagaagcccgcagatggagagtgccaaaaaagcaggggagctgatctctgaaacaaaatacaggaaaaaaccagacagcatcaagtttacgacagtggtggactcaccagaccttgtccacgccaaaaacagctacatgcactgcaatgaacggatgtatcgctccggcgacgctgaatccctccatagatacacactgatcccagatcatccggactttacaagagctaggttaaatgccctccatctttctgataaagtgtaccgtaactcttgggagcagacaagagccggttcttacgactttagactagatgccatcccctttcagactgctcgcgcttcaagggagatcgcgtcagacttccggtacaaggaagcttttctgagagaccggggacttcagatcggctaccgcagcgtggatgatgaccctaggatgaaacacttcctgaacgtgggaaggctgcagtctgacaacgaatacaagaaagattttgccaaaagccggtctcaattccactcttcaaccgatcagcccggtctgcttcaagccaaaaggagtcaacagctggctagcgatgtccactaccggcaaccactgccacaacctacatgcgatccagagcagctgggattgcggcacgcccagaaagcacaccagctgcagagcgatgttaagtacaaaagtgacctgaatctcacccgcggtgtgggttggacgccaccagggtcatacaaggtggagatggctcggcgtgctgcagagctcgcaaatgcaagaggattggggttgcagggcgcctacagaggggcagaagccgtcgaggccggggatcaccagtcgggtgaggttaatcctgacgcaaccgaaattctgcatgtgaaaaagaagaaggctctcttactctag

SEQ ID NO: 258953 - DNA, 5507 bp, Artificial Sequence
  derived and/or modified sequence
aaactagaaggtcagcaaaggaaagtggaagttggattctgaaagatcgaggtgcccacaggaattttatggtcgtcggattttgaagacttgaactagactgggggttctccttgcatttcttgcctgttgcctatctttgtcctctctcttccggcttcgagatgaatgtgcagccctgttctaggtgtgggtatggggtttatcctgccgagaagatcagctgtatagatcagatatggcataaagcctgttttcactgtgaagtttgcaagatgatgctgtctgttaataactttgtgagtcaccagaaaaagccgtactgtcacgcccataaccctaagaacaacactttcaccagtgtctatcacactccattaaatctaaatgtgaggacatttccagaggccatcagtgggatccatgaccaagaagatggtgaacagtgtaaatcagtttttcactgggacatgaaatccaaggataaggaaggtgcacctaacaggcagccactggcaaatgagagagcctattggactggatatggggaagggaatgcttggtgcccaggagctctgccagaccccgaaattgtaaggatggttgaggctcgaaagtctcttggtgaggaatatacagaagactatgagcaacccaggggcaaggggagctttccagccatgatcacacctgcttatcaaagggccaagaaagccaaccagctggccagccaagtggagtataagagagggcatgatgaacgcatctccaggttctccacggtggtggatactcctgagctgctacggagcaaggctggggcacagcttcaaagtgatgtgagatacacagaggactatgaacaacaaagagggaaaggcagtttccctgcgatgatcacacccgcctatcagatagccaaaagagccaatgagctggcaagtgatgtgaggtaccatcaacaatatcaaaaagaaatgaggggaatggctggtccagccattggagctgagggcatcttgacaagggaatgtgcagaccaatatggccagggttacccggaggagtatgaggagcacaggggaaagggcagcttcccagctatgatcactccagcatatcagaacgccaagaaagctcacgaactcgctagtgacataaaatacaggcaggacttcaataagatgaaaggcgctgcacattatcactcgcttccagctcaagacaacttggttctcaaacaggctcagagcgtaaacaaactcgtgagtgaggtggagtataagaaggatctggaaagtagtagaggtcacagtatcaactactgtgaaacacctcaattcaggaacgtgagcaagatctcaaaatttaccagtgataataaatataaagaaaactaccagaaccacatgagaggccgctatgaaggagttggtatggacagacgcactctgcatgctatgaaagttggcagcctggcaagcaacgttgcctacaaagctgattataaacatgatattgtcgactacaactacccagccactctcacgccttcctatcaaacagctatgaaactggtgcccttgaaagatgccaattataggcagagcatcgacaagttgaagtacagctcggtgactgacaccccacagattgttcaagccaaaatcaatgcccagcagctgagtcatgtgaattaccgtgctgactatgagaaaaataagttgaattacacattgccccaggatgttcctcagctggtgaaggccaaaaccaatgccaaactcttcagtgaggttaagtataaagaaggctgggagaagacaaaggggaaaggatttgagatgaagctggatgccatgtctctgctggccgccaaagcctctggggagcttgctagcaatattaaatataaagaagaatatgaaaagacaaaaggcaaagccatgggaacagccgactctaggcttctgcactccctgcagattgctaagatgagcagtgaggttgaatataagaaaggctttgaagagagtaagacccggtttcacctgcccatggatatggtaaacatcaggcatgctaagaaggcccaaactctcgccagtgacctggactacaggaagaaactgcatgaatacactgtgctgcctgaagatatgaagactcagtgggccaagaaggcctatgggctccagagcgagctgcagtacaaggctgacctggcatggatgaagggagttgggtggctgacagaggggagtctcaacttggaacaagccaagaaggctggacagctggtcagcgagaaaaactaccggcagagggtcgatgagctgaagttcaccagcgtgaccgacagctcccagatggagcacgccaagaagagccaggagctacagagcggggtggcctacaaggcaggaaatgagcagtctgtccatcagtataccatcagcaaagacgagcctctcttcctgcaggcccgagccaatgctgcaaatctcagcgagaaactgtataagagcagctgggaaaaccagaaagcaaaagggtttgagctgcgtcttgattccttgaccttcctggcagccaaagccaagagggacctggctagcgaggtgaagtacaaggaggattatgagagatccagagggaagctcattggggcaaaagatgtacagggagattcgcaaatgagccactcactgcaaatgtccaagctgcagagtgagctggagtacaagaagggattcgaggacaccaaatcccaatgccacgtctccctggacatggtccacctcgtgcatgcccgcaaagctcagcatttagccacagacgtaggctacaagacagcggaacatcactttacggctttgcccacagacatgaaggtggaatgggccaagaaggcttatggcttacagagtgataaccaatacagggcagatgtgaagtggatgaaaggcatgggctgggtcgccaccgggtcattaaatgtggagcaggcgaagaaggcaggagaactcattagcgagaagaagtaccgtcagcatccagatgctttgaagtttaccagtattaaagacactccggagatggtccaggccagaattagttatacccaagcagtggatagattatacagggaacaaggagaaaacataaagcatcattacacaccgactgctgacctccctgaagtcctgctggccaagctgaatgccatgaatatcagtgagacgcgttataaggaatcctggagcaaacttcgagatggtggctataaactgaggttggatgcccttccattccaagcagcaaaggcttctggtgaaatcataagtgattacaaatacaaagaggcatttgagaaaatgaaaggacagatgcttggttcccggagcttggaagatgatatcagccttgcacattcagtgtatgcgacctcactgcagagtgatgtgaattacaagaaaggctttgaacactcaaaggcgcagttccatctgccgttggacatggccgccctggtgcatgccaagaaggctcagaccctggccagcaatcaggactacaaacatccactgccccagtacacttccttggcagaagacctgaggctgagctgtgccaagaaagctcacaaattgcagagtgagaatttgtaccggtcagacctgaactttatgcgaggtgttgcatgtgtcattccaggcacgttagagattgaagggaggaagaaagcatcggaactcatcagtgagagtaaatatcggcagcatccccactcattcaagtacacagctgtgacagacactcccaacctccttcatgcgaaattcagcaaccagataacgaatgagcgcctctataaagcagctggagaggatgcaagacacgagtatacaatgaccctgggtctgcccgagttcatccgagcaaaaacgaatgcagccaacctgagtgacgcaagatacaaagagtcctggcgtaatcttcgtgctcaaggctacaagctgacaatagaagcgctccccttccaggctgcccgggcctctggagatatagccagtgattttctctacagacatgactttgtgaaggagcgagggaaactcatagggccccagagtgtaagagacgacccccggatccagcactgccggcgcatgggccagctgcagagcgagcttcagtacaggaggggggcgaccagcagccaagcccagttccatctgcccatggacatggtgcacctggtccatgccaagaatgcccaggctctggccagcgaccacgactacaggacacagtatcacaagttcacagcactgcccgaggacctgaagatggcctgggccaagaaagcccatgccctgcagagtgagttgcgctacaagtcagacctgatcggcatgaagggcataggatggctggcgctgagatccccacagatggagagtgcaaagaaggctggagaactcatcagcgagaccaagtaccgtaaaaaaccagacagtatcaagttcaccacagtggttgactccccagacctggttcatgccaagaacagctatatgcactgcaatgagcgcatgtatagatctggagatgcagaatccctgcacagatacaccctgatccccgaccatcccgatttcacccgagctcgcctcaatgcgctgcatctgagtgacaaagtctacagaaactcctgggagcagacccgggctggcagttatgacttcaggctggatgccatccccttccagactgcccgggcatctagggagatcgccagtgatttccggtacaaagaggctttcctgcgggaccgaggcctgcagatcgggtaccgcagtgtcgacgatgacccaaggatgaagcatttcctcaacgttggcaggctccagagtgacaatgagtacaagaaggactttgccaagagtcggtcccagtttcacagcagcacagaccagcccggcctccttcaggccaagaggagccagcagctggccagtgatgtgcactacaggcagcccctgccccagcccacctgcgacccggagcagctgggcctcaggcatgctcagaaggcccaccagctgcagagtgatgtcaagtataaatcagacttgaacctgaccagaggtgttggctggacccctcctggctcctacaaagtggaaatggctcggcgggctgcggaactggccaacgcaaggggcctgggtctccagggagcttaccggggggcagaagcagtggaggctggagatcatcagagtggggaggtgaacccagatgccactgagattctgcacgtcaaaaagaagaaggccctgctgttgtgagccatgtccaccctgattcctgagaggccagagaggaagtttgttcaccagagacaggcttcagatggctttgatttcggcaagctggaatggcccaccagcccatcccagatcttcctttattaaaataataactctgaaagcagatgg

SEQ ID NO: 258954 - DNA, 5629 bp, Artificial Sequence
  derived and/or modified sequence
tcagcaaaggaaagtggaagttggattctgaaagatcgaggtgcccacaggaattttatggtcgtcggattttgaagacttgaactagactgggggttctccttgcatttcttgcctgttgcctatctttgtcctctctcttccggcttcgagatgaatgtgcagccctgttctaggtgtgggtatggggtttatcctgccgagaagatcagctgtatagatcagatatggcataaagcctgttttcactgtgaagtttgcaagatgatgctgtctgttaataactttgtgagtcaccagaaaaagccgtactgtcacgcccataaccctaagaacaacactttcaccagtgtctatcacactccattaaatctaaatgtgaggacatttccagaggccatcagtgggatccatgaccaagaagatggtgaacagtgtaaatcagtttttcactgggacatgaaatccaaggataaggaaggtgcacctaacaggcagccactggcaaatgagagagcctattggactggatatggggaagggaatgcttggtgcccaggagctctgccagaccccgaaattgtaaggatggttgaggctcgaaagtctcttggtgaggaatatacagaagactatgagcaacccaggggcaaggggagctttccagccatgatcacacctgcttatcaaagggccaagaaagccaaccagctggccagccaagtggagtataagagagggcatgatgaacgcatctccaggttctccacggtggtggatactcctgagctgctacggagcaaggctggggcacagcttcaaagtgatgtgagatacacagaggactatgaacaacaaagagggaaaggcagtttccctgcgatgatcacacccgcctatcagatagccaaaagagccaatgagctggcaagtgatgtgaggtaccatcaacaatatcaaaaagaaatgaggggaatggctggtccagccattggagctgagggcatcttgacaagggaatgtgcagaccaatatggccagggttacccggaggagtatgaggagcacaggggaaagggcagcttcccagctatgatcactccagcatatcagaacgccaagaaagctcacgaactcgctagtgacataaaatacaggcaggacttcaataagatgaaaggcgctgcacattatcactcgcttccagctcaagacaacttggttctcaaacaggctcagagcgtaaacaaactcgtgagtgaggtggagtataagaaggatctggaaagtagtagaggtcacagtatcaactactgtgaaacacctcaattcaggaacgtgagcaagatctcaaaatttaccagtgataataaatataaagaaaactaccagaaccacatgagaggccgctatgaaggagttggtatggacagacgcactctgcatgctatgaaagttggcagcctggcaagcaacgttgcctacaaagctgattataaacatgatattgtcgactacaactacccagccactctcacgccttcctatcaaacagctatgaaactggtgcccttgaaagatgccaattataggcagagcatcgacaagttgaagtacagctcggtgactgacaccccacagattgttcaagccaaaatcaatgcccagcagctgagtcatgtgaattaccgtgctgactatgagaaaaataagttgaattacacattgccccaggatgttcctcagctggtgaaggccaaaaccaatgccaaactcttcagtgaggttaagtataaagaaggctgggagaagacaaaggggaaaggatttgagatgaagctggatgccatgtctctgctggccgccaaagcctctggggagcttgctagcaatgtacaccttcttctttctctcaagattaaatataaagaagaatatgaaaagacaaaaggcaaagccatgggaacagccgactctaggcttctgcactccctgcagattgctaagatgagcagtgaggttgaatataagaaaggctttgaagagagtaagacccggtttcacctgcccatggatatggtaaacatcaggcatgctaagaaggcccaaactctcgccagtgacctggactacaggaagaaactgcatgaatacactgtgctgcctgaagatatgaagactcagtgggccaagaaggcctatgggctccagagcgagctgcagtacaaggctgacctggcatggatgaagggagttgggtggctgacagaggggagtctcaacttggaacaagccaagaaggctggacagctggtcagcgagaaaaactaccggcagagggtcgatgagctgaagttcaccagcgtgaccgacagctcccagatggagcacgccaagaagagccaggagctacagagcggggtggcctacaaggcaggaaatgagcagtctgtccatcagtataccatcagcaaagacgagcctctcttcctgcaggcccgagccaatgctgcaaatctcagcgagaaactgtataagagcagctgggaaaaccagaaagcaaaagggtttgagctgcgtcttgattccttgaccttcctggcagccaaagccaagagggacctggctagcgaggtgaagtacaaggaggattatgagagatccagagggaagctcattggggcaaaagatgtacagggagattcgcaaatgagccactcactgcaaatgtccaagctgcagagtgagctggagtacaagaagggattcgaggacaccaaatcccaatgccacgtctccctggacatggtccacctcgtgcatgcccgcaaagctcagcatttagccacagacgtaggctacaagacagcggaacatcactttacggctttgcccacagacatgaaggtggaatgggccaagaaggcttatggcttacagagtgataaccaatacagggcagatgtgaagtggatgaaaggcatgggctgggtcgccaccgggtcattaaatgtggagcaggcgaagaaggcaggagaactcattagcgagaagaagtaccgtcagcatccagatgctttgaagtttaccagtattaaagacactccggagatggtccaggccagaattagttatacccaagcagtggatagattatacagggaacaaggagaaaacataaagcatcattacacaccgactgctgacctccctgaagtcctgctggccaagctgaatgccatgaatatcagtgagacgcgttataaggaatcctggagcaaacttcgagatggtggctataaactgaggttggatgcccttccattccaagcagcaaaggcttctggtgaaatcataagtgattacaaatacaaagaggcatttgagaaaatgaaaggacagatgcttggttcccggagcttggaagatgatatcagccttgcacattcagtgtatgcgacctcactgcagagtgatgtgaattacaagaaaggctttgaacactcaaaggcgcagttccatctgccgttggacatggccgccctggtgcatgccaagaaggctcagaccctggccagcaatcaggactacaaacatccactgccccagtacacttccttggcagaagacctgaggctgagctgtgccaagaaagctcacaaattgcagagtgagaatttgtaccggtcagacctgaactttatgcgaggtgttgcatgtgtcattccaggcacgttagagattgaagggaggaagaaagcatcggaactcatcagtgagagtaaatatcggcagcatccccactcattcaagtacacagctgtgacagacactcccaacctccttcatgcgaaattcagcaaccagataacgaatgagcgcctctataaagcagctggagaggatgcaagacacgagtatacaatgaccctgggtctgcccgagttcatccgagcaaaaacgaatgcagccaacctgagtgacgcaagatacaaagagtcctggcgtaatcttcgtgctcaaggctacaagctgacaatagaagcgctccccttccaggctgcccgggcctctggagatatagccagtgattttctctacagacatgactttgtgaaggagcgagggaaactcatagggccccagagtgtaagagacgacccccggatccagcactgccggcgcatgggccagctgcagagcgagcttcagtacaggaggggggcgaccagcagccaagcccagttccatctgcccatggacatggtgcacctggtccatgccaagaatgcccaggctctggccagcgaccacgactacaggacacagtatcacaagttcacagcactgcccgaggacctgaagatggcctgggccaagaaagcccatgccctgcagagtgagttgcgctacaagtcagacctgatcggcatgaagggcataggatggctggcgctgagatccccacagatggagagtgcaaagaaggctggagaactcatcagcgagaccaagtaccgtaaaaaaccagacagtatcaagttcaccacagtggttgactccccagacctggttcatgccaagaacagctatatgcactgcaatgagcgcatgtatagatctggagatgcagaatccctgcacagatacaccctgatccccgaccatcccgatttcacccgagctcgcctcaatgcgctgcatctgagtgacaaagtctacagaaactcctgggagcagacccgggctggcagttatgacttcaggctggatgccatccccttccagactgcccgggcatctagggagatcgccagtgatttccggtacaaagaggctttcctgcgggaccgaggcctgcagatcgggtaccgcagtgtcgacgatgacccaaggatgaagcatttcctcaacgttggcaggctccagagtgacaatgagtacaagaaggactttgccaagagtcggtcccagtttcacagcagcacagaccagcccggcctccttcaggccaagaggagccagcagctggccagtgatgtgcactacaggcagcccctgccccagcccacctgcgacccggagcagctgggcctcaggcatgctcagaaggcccaccagctgcagagtgatgtcaagtataaatcagacttgaacctgaccagaggtgttggctggacccctcctggctcctacaaagtggaaatggctcggcgggctgcggaactggccaacgcaaggggcctgggtctccagggagcttaccggggggcagaagcagtggaggctggagatcatcagagtggggaggtgaacccagatgccactgagattctgcacgtcaaaaagaagaaggccctgctgttgtgagccatgtccaccctgattcctgagaggccagagaggaagtttgttcaccagagacaggcttcagatggctttgatttcggcaagctggaatggcccaccagcccatcccagatcttcctttattaaaataataactctgaaagcagatggagaatgttgtatttgtggtcctctctgatacctagacgtggatggctgattctgttgagtgcctcgagtgtctgggctgaggaataaagatgtgatggtggttcccgct

SEQ ID NO: 258955 - DNA, 5192 bp, Artificial Sequence
  derived and/or modified sequence
atgaacgtgcagccatgttcgaggtgcgggtacggcgtgtatccagcagaaaagatcagttgcattgatcagatttggcataaggcatgtttccactgtgaggtgtgcaaaatgatgttatccgtaaacaacttcgtctctcaccagaagaagccctattgccatgcacataatccaaagaataatacttttacttccgtgtatcatacccccttaaatttgaacgttcgcacattccctgaagcgattagcggtattcatgaccaggaagacggagagcagtgcaagagtgtgttccattgggacatgaagagcaaagataaagagggtgcacctaatcggcagccgcttgccaatgaaagagcatactggaccggatacggcgaggggaacgcgtggtgtcccggagcgctgccagaccctgagattgtgagaatggtggaggctagaaagagtctgggggaggaatataccgaagactacgaacagccgagagggaaaggcagtttccccgctatgatcacacccgcttaccagagagctaaaaaggccaaccagttggcgagccaggtggagtacaagcggggtcacgatgagaggattagtcgtttcagtaccgtggtcgacacaccggaactgctgcgtagcaaagccggagcccaactccagtcagacgtccgctacacagaggactacgaacaacagagaggtaagggaagcttccctgcgatgatcacccccgcttatcagatcgctaagcgcgctaacgagctcgcttcggatgtgcgataccaccagcaatatcagaaggagatgaggggtatggcgggacctgccataggggctgagggcattctcactcgggagtgcgccgaccagtacggtcaaggctaccccgaagaatatgaagagcatcgcggaaaggggagctttcctgcgatgatcactccggcatatcagaatgcgaagaaagcgcatgagcttgcgagtgacatcaagtacaggcaggattttaataaaatgaagggcgcagcgcattaccactctctgcccgcacaggataatctggtgctgaagcaggctcaatccgtcaacaagctggtgtcggaggttgaatacaagaaggatctcgagtccagcagaggccactctatcaattactgtgaaacccctcaatttcgcaatgtatcaaagatcagcaaattcacctcggataacaaatacaaagaaaactaccagaaccatatgcgtgggagatatgagggagtgggaatggacagaagaaccctgcatgcaatgaaagttggaagcttggcctcaaacgtggcctataaagctgactataagcacgatattgtggattacaactaccccgctacgctaaccccatcataccagaccgcgatgaagctagtgcctctcaaggacgcaaactaccggcaaagcatcgacaaattgaagtattctagcgttacagacacgccccaaattgtgcaagccaaaatcaatgcgcagcagctatctcacgtgaattaccgcgcagattatgagaaaaataaactcaactacactctgccccaggatgtgccacaattggtgaaagccaagaccaatgcaaagctgttcagcgaggtcaagtacaaggaaggatgggaaaagactaaaggaaaggggtttgagatgaagctggatgccatgtcgctgctagcggcaaaagccagcggggaattggcgtctaacatcaagtataaggaggagtatgagaagacaaagggcaaagccatggggactgctgactcgagacttttacacagtctgcagattgccaagatgtcatcagaggtggaatacaagaagggtttcgaagagagcaaaacacggtttcaccttcctatggatatggtcaacatccggcatgccaaaaaagcacagacccttgcctcagatctggactatcggaaaaagttgcacgaatataccgtgctccctgaggatatgaagacccagtgggctaagaaggcctacgggctgcaatcggaactacagtataaggccgatctggcttggatgaagggagtgggctggttaacagaggggtcccttaatctggagcaggctaagaaggctggacagctggtatccgagaagaactatcggcagcgcgtggacgaactgaagtttactagcgtgacagacagctctcagatggagcatgcgaaaaaaagccaagagctccagtctggcgtggcctacaaggctggtaatgagcagagcgtccaccagtacaccataagcaaagacgagcctctctttttgcaagcgcgtgctaatgcggctaatctgagtgagaagctgtacaagtcgtcctgggaaaatcagaaggcaaagggatttgagctacgcctggatagtctcactttcttggcagctaaagctaaaagagatctggcatccgaggtaaagtacaaagaagattatgagcggtcccggggaaagttgattggagccaaagatgttcagggagatagccagatgagtcacagtctgcagatgtccaagcttcagtccgagctagagtataagaaaggttttgaggacacaaagagtcagtgccatgtcagtctcgacatggtccatctagtgcatgcaaggaaggcacaacacctggctacagatgtgggatataagaccgccgagcaccactttactgccctgcccacagacatgaaggtggaatgggctaaaaaagcctacggcttacagagtgataaccagtacagggcagatgtgaagtggatgaaaggaatggggtgggtggccaccgggagtctgaacgtggaacaagcgaaaaaggccggagaactgataagtgagaagaagtacaggcaacaccccgatgcgctcaagttcactagcattaaggacacccctgaaatggtgcaggctagaatttcctatacccaggccgtcgatcgattgtatagggaacagggagagaatataaaacatcactacactccaactgcggaccttcccgaggtgctgctggccaagcttaatgctatgaatattagcgaaacacgttacaaggagtcatggagtaagcttagggatggcggatacaaacttaggctcgatgcactcccctttcaggctgctaaggctagtggagagatcatttctgactataagtacaaggaggcatttgaaaagatgaagggccagatgctgggctctcgatcactggaagatgacataagcctagcccatagtgtgtacgccacctccctccaaagtgacgtcaattacaaaaaaggtttcgagcactcgaaggctcaatttcatttgcccctggatatggccgctctggtgcacgccaagaaggcacagacgctcgccagtaatcaggactacaaacacccgctgccgcagtacacgagcttggctgaggatctgcggcttagttgcgcaaagaaagcccacaagctgcaatctgaaaacttatataggtccgacctgaatttcatgcggggagtggcctgcgtgattcctggcacccttgagatcgaaggaaggaagaaggccagcgagttgataagtgagtcgaaatatcgacagcacccgcattcatttaagtacaccgccgtgaccgatacaccgaatctgcttcacgccaaattcagtaatcagattactaatgagaggctgtataaggctgccggagaagacgctagacacgagtacactatgacacttgggctgcctgagttcattcgggcaaaaaccaacgctgctaatctgtctgacgcacgctataaagagtcgtggaggaacctccgtgctcaggggtataagctgaccattgaggcactcccctttcaggccgctcgtgcatccggcgatattgccagcgactttctttataggcacgactttgtgaaagagagaggcaagctgattggaccacagtcagtacgagacgaccccagaatccagcattgtaggcgaatggggcagcttcagagcgagttgcagtaccggaggggtgccacgtcatctcaggcacagtttcacctcccgatggacatggtgcatctcgtccacgcgaagaacgcacaggccctcgcttcggaccatgactacagaacccagtaccataaatttacggccctgcctgaagatctgaagatggcctgggctaaaaaagctcatgctctccagtctgagctgagatacaaaagcgacctcataggcatgaaggggattgggtggttggctcttaggagtccccagatggaaagcgccaaaaaggcaggggagctcatttccgagaccaaataccggaagaagcccgacagcatcaagtttaccacagtcgtcgattcaccggacctggtccacgctaaaaacagttatatgcactgtaacgaacgcatgtaccgatctggagacgcagagagcctgcataggtacaccctgatacccgaccatcccgacttcactcgggcacggcttaatgctctacacttgtcagataaggtgtacaggaatagctgggagcagacccgggctggcagttacgattttaggctcgacgcaatccccttccaaacagccagagcatccagagagatcgcatcggacttccggtataaggaggccttccttagggatcgcggattgcagattggctacagaagcgtggacgacgacccccgtatgaagcattttcttaacgttgggaggctccagagcgataacgagtataagaaggacttcgctaagagcaggtcccaatttcacagctccaccgaccaacctggacttctgcaggctaaacgcagccagcagttggcgtctgatgtgcattataggcagccattgccacagcccacatgcgaccctgaacagctgggcctccgccatgcgcagaaggcgcaccagttacagagcgacgtaaagtacaaaagcgatttaaaccttacgagaggggtggggtggacgccacccggatcctacaaagtggagatggcacggagagccgcagaactggcaaatgctagaggcctcggccttcagggtgcatatcgtggagctgaggcggtcgaggccggagaccatcagtccggcgaagttaacccggacgcgacagagatcttgcatgtgaagaaaaagaaagcgctgcttctgta

SEQ ID NO: 258956 - DNA, 5217 bp, Artificial Sequence
  derived and/or modified sequence
atgaacgttcagccttgctctcggtgtggctacggagtctaccctgccgagaaaatttcttgcatcgaccagatttggcataaggcatgttttcactgtgaagtgtgcaagatgatgctgtcagttaataactttgtgagccaccaaaagaagccttactgtcatgctcataaccccaaaaacaacactttcacctcagtctatcacacacctctgaacctgaatgtgagaacgttcccggaggcgataagcggcattcacgatcaggaggacggagagcagtgtaagtctgtgtttcattgggatatgaaatctaaagataaggaaggcgctccgaatcgacaaccactcgctaacgagagagcctactggaccggttacggggaggggaacgcatggtgccccggagctctgcctgacccggaaattgtccgtatggttgaagctcgcaagtcactgggggaagaatacactgaggattatgaacagccacgcggtaagggctcatttcctgccatgatcacgcctgcataccagcgagcaaaaaaagccaatcagctcgcttctcaggtggaatataaacgaggccacgacgagcggatctctagatttagtaccgtcgtcgataccccagagctgctgaggagcaaagctggcgcacagctgcagtccgatgtgagatacactgaggattatgaacagcagagaggtaagggctccttccctgccatgataacacctgcgtaccagatcgccaaacgcgcaaatgagctggctagtgacgtgagatatcaccagcagtatcagaaggaaatgcgcggaatggccggtcctgccattggtgctgagggaatcctcacacgcgagtgtgccgatcagtatggccaaggttatcccgaggaatacgaagagcacagaggaaaaggatctttccctgcaatgattacccccgcttatcagaacgctaagaaggctcatgagttagcctcagatatcaagtatcgccaagattttaataagatgaaaggtgccgcacattaccacagccttccagcacaggacaatcttgttcttaagcaagcacagtcagtcaataaactggtgagtgaggtggaatataagaaagacctcgagagctctcgtggtcatagtatcaactactgcgagaccccacagttcaggaatgtatccaagattagcaaatttacctccgacaataagtacaaggagaactaccagaatcacatgagagggagatatgagggcgttggcatggaccgtagaacattacacgccatgaaggtgggctcactagcctcaaatgtggcatacaaggctgactacaaacatgatatcgttgattataactacccagcaacccttaccccaagttatcagactgccatgaagttggtccccctgaaagacgcaaactatagacagtctatcgataagctcaaatacagtagtgtgaccgacaccccacaaatcgtccaggctaagataaacgcacagcagctgagtcatgtaaattatagagcagattatgagaagaacaaactgaactacacactgcctcaagatgtcccccagttggtgaaggctaagaccaacgccaaactgttctccgaggtgaaatacaaggagggttgggaaaaaaccaagggtaaaggcttcgagatgaagttagatgctatgtcactgctggctgcaaaagcatcaggagagttagcttcgaacgtgcatctgttattgtccctcaagattaaatataaagaagagtacgaaaaaacaaaaggcaaggcaatgggtaccgccgactctcggcttctgcacagcttgcaaatcgccaaaatgtcctccgaggtcgaatacaagaaggggtttgaagaatctaagacccgctttcacctccctatggatatggtcaacatcagacatgctaagaaagctcagacactggcctctgaccttgattacaggaagaaactccacgaatacacagtgctcccagaagatatgaagactcagtgggctaagaaggcatacggactgcagtctgaactccagtataaggccgatctcgcgtggatgaagggcgtaggatggcttacagagggatcacttaatctcgaacaggccaaaaaagcgggacagctcgtttctgaaaagaactataggcagcgggtggacgaactgaagtttacaagcgttaccgacagtagccaaatggagcacgccaagaaaagccaagagctccagagcggggttgcatataaggccggaaacgaacagtctgtgcaccagtacactatttccaaagacgaaccactttttcttcaagctcgtgccaacgctgccaatctctctgaaaagttgtataagagtagttgggaaaatcagaaagctaagggcttcgagctgagactggattcgctcactttcttggctgcgaaagccaaacgcgaccttgccagtgaggtcaaatataaagaggactacgagcggtctcgcggaaaactcatcggggcaaaagacgtacaaggggattctcagatgtctcacagcctgcagatgagtaagctgcaatcagagctcgaatacaaaaagggtttcgaagacacaaaatcacagtgtcacgtgagcctggacatggtccacctcgtgcatgctcggaaggctcagcatctcgctactgatgtaggctataaaactgcggagcaccactttacagccctgcctacagacatgaaggtggagtgggccaaaaaggcatacggactgcagagtgataatcagtatcgggcagacgtgaaatggatgaaaggcatgggctgggtggctactgggtccctgaacgtggagcaggccaagaaagccggagaactgatatctgaaaagaagtacaggcagcatcctgatgctctgaaattcacgtccattaaggatacaccagagatggtgcaggctcgaatatcatatactcaggcagtggacagattatatagggagcagggagagaacatcaagcaccactacactccaaccgctgatctcccagaagttctgctggccaagctgaatgctatgaacatatcagaaacccgttacaaggagtcctggagcaagcttcgggacggcggttacaagctaagactggatgcgctacccttccaggccgcaaaagcgagcggagagattatcagtgactacaaatacaaagaagcttttgaaaagatgaaggggcagatgctgggtagcaggtccctcgaggatgatattagtcttgcccattctgtctacgcaacctcactgcagtcagacgtgaattataaaaaaggcttcgaacattctaaagcacagttccacctacccctggacatggctgctttggttcatgccaaaaaggcccagaccctggcttctaaccaggactataagcaccctctacctcagtacacatccttggctgaggatctgagattaagctgcgcaaagaaggcccataaacttcaaagcgaaaacctttatcgctcagacctgaactttatgcggggagtcgcgtgtgtaatccccggtacgctcgaaattgagggaagaaaaaaggcatccgaactgattagtgaatccaagtacagacagcatcctcattccttcaaatacacagccgtgacagacactcctaacctgctccacgctaagttctcgaaccaaataacgaatgagcggttgtacaaagcagctggtgaagacgcaaggcatgagtacaccatgaccctcggcctgcccgaattcataagggcgaaaactaacgccgctaatttaagcgatgctcgctataaagagtcatggaggaacctccgggctcagggctataaattgacaattgaggccctaccttttcaggccgctagagcatctggggacatagcgtctgacttcctgtacagacacgacttcgtcaaggaaagaggtaaactaatcggtcctcagagtgtcagggacgacccgagaatacagcattgcagaagaatgggccagctgcaatctgagttacagtacaggcggggagctacatctagccaagctcaatttcacttgccaatggatatggtgcatttagtgcatgccaaaaacgcccaagcgttggcatcagatcacgattatagaacccagtatcacaaatttaccgctctcccagaagacttgaagatggcctgggcaaagaaagcccacgctttgcagtctgagctccgctacaagtccgacttgatcggcatgaagggcatcggctggctcgcacttcgaagtccgcaaatggaatcagcgaaaaaagccggagaacttatcagcgagacaaagtacagaaagaaacctgatagtataaaattcactacagttgtagactcgccagatctcgtacacgctaaaaacagctacatgcactgtaatgaacggatgtaccggtcaggggatgcagagtcattacacagatatacactcataccagatcatccagatttcaccagggctcggcttaatgcgctgcatctgtcagataaggtttaccgaaactcatgggagcaaacccgcgctggtagctacgatttcaggctggacgctatccccttccagaccgcacgagcgtctagagaaatcgcttctgacttccgatataaagaggcgtttctgagagacaggggactgcagattggctaccgctccgtggacgacgatcctcgaatgaaacacttcctcaatgtggggagactacaaagtgataatgaatataaaaaggatttcgctaagtccaggagccagtttcacagtagcacagaccagccagggcttcttcaggctaagcggagccaacagttggccagcgacgtgcactaccggcagccgctgccacagccaacttgcgatccagagcagctaggtttacggcatgctcagaaggcccatcagctgcaatctgatgtcaagtataaatccgacctgaatctcacacggggtgtaggttggacccctccagggtcctacaaagttgagatggcccgtagggctgccgagcttgctaatgcgcgtggcctgggactgcagggcgcttatcggggtgccgaagcagtcgaggccggagaccaccagtcaggggaggtgaacccggacgccacagagatactgcatgtgaagaaaaaaaaggcacttctgctgtag

SEQ ID NO: 258957 - DNA, 5193 bp, Artificial Sequence
  derived and/or modified sequence
atgaacgtgcagccctgcagcagatgcggctacggcgtgtaccccgccgagaagatcagctgcatcgaccagatctggcacaaggcctgcttccactgcgaggtgtgcaagatgatgctgagcgtgaacaacttcgtgagccaccagaagaagccctactgccacgcccacaaccccaagaacaacaccttcaccagcgtgtaccacacccccctgaacctgaacgtgagaaccttccccgaggccatcagcggcatccacgaccaggaggacggcgagcagtgcaagagcgtgttccactgggacatgaagagcaaggacaaggagggcgcccccaacagacagcccctggccaacgagagagcctactggaccggctacggcgagggcaacgcctggtgccccggcgccctgcccgaccccgagatcgtgagaatggtggaggccagaaagagcctgggcgaggagtacaccgaggactacgagcagcccagaggcaagggcagcttccccgccatgatcacccccgcctaccagagagccaagaaggccaaccagctggccagccaggtggagtacaagagaggccacgacgagagaatcagcagattcagcaccgtggtggacacccccgagctgctgagaagcaaggccggcgcccagctgcagagcgacgtgagatacaccgaggactacgagcagcagagaggcaagggcagcttccccgccatgatcacccccgcctaccagatcgccaagagagccaacgagctggccagcgacgtgagataccaccagcagtaccagaaggagatgagaggcatggccggccccgccatcggcgccgagggcatcctgaccagagagtgcgccgaccagtacggccagggctaccccgaggagtacgaggagcacagaggcaagggcagcttccccgccatgatcacccccgcctaccagaacgccaagaaggcccacgagctggccagcgacatcaagtacagacaggacttcaacaagatgaagggcgccgcccactaccacagcctgcccgcccaggacaacctggtgctgaagcaggcccagagcgtgaacaagctggtgagcgaggtggagtacaagaaggacctggagagcagcagaggccacagcatcaactactgcgagaccccccagttcagaaacgtgagcaagatcagcaagttcaccagcgacaacaagtacaaggagaactaccagaaccacatgagaggcagatacgagggcgtgggcatggacagaagaaccctgcacgccatgaaggtgggcagcctggccagcaacgtggcctacaaggccgactacaagcacgacatcgtggactacaactaccccgccaccctgacccccagctaccagaccgccatgaagctggtgcccctgaaggacgccaactacagacagagcatcgacaagctgaagtacagcagcgtgaccgacaccccccagatcgtgcaggccaagatcaacgcccagcagctgagccacgtgaactacagagccgactacgagaagaacaagctgaactacaccctgccccaggacgtgccccagctggtgaaggccaagaccaacgccaagctgttcagcgaggtgaagtacaaggagggctgggagaagaccaagggcaagggcttcgagatgaagctggacgccatgagcctgctggccgccaaggccagcggcgagctggccagcaacatcaagtacaaggaggagtacgagaagaccaagggcaaggccatgggcaccgccgacagcagactgctgcacagcctgcagatcgccaagatgagcagcgaggtggagtacaagaagggcttcgaggagagcaagaccagattccacctgcccatggacatggtgaacatcagacacgccaagaaggcccagaccctggccagcgacctggactacagaaagaagctgcacgagtacaccgtgctgcccgaggacatgaagacccagtgggccaagaaggcctacggcctgcagagcgagctgcagtacaaggccgacctggcctggatgaagggcgtgggctggctgaccgagggcagcctgaacctggagcaggccaagaaggccggccagctggtgagcgagaagaactacagacagagagtggacgagctgaagttcaccagcgtgaccgacagcagccagatggagcacgccaagaagagccaggagctgcagagcggcgtggcctacaaggccggcaacgagcagagcgtgcaccagtacaccatcagcaaggacgagcccctgttcctgcaggccagagccaacgccgccaacctgagcgagaagctgtacaagagcagctgggagaaccagaaggccaagggcttcgagctgagactggacagcctgaccttcctggccgccaaggccaagagagacctggccagcgaggtgaagtacaaggaggactacgagagaagcagaggcaagctgatcggcgccaaggacgtgcagggcgacagccagatgagccacagcctgcagatgagcaagctgcagagcgagctggagtacaagaagggcttcgaggacaccaagagccagtgccacgtgagcctggacatggtgcacctggtgcacgccagaaaggcccagcacctggccaccgacgtgggctacaagaccgccgagcaccacttcaccgccctgcccaccgacatgaaggtggagtgggccaagaaggcctacggcctgcagagcgacaaccagtacagagccgacgtgaagtggatgaagggcatgggctgggtggccaccggcagcctgaacgtggagcaggccaagaaggccggcgagctgatcagcgagaagaagtacagacagcaccccgacgccctgaagttcaccagcatcaaggacacccccgagatggtgcaggccagaatcagctacacccaggccgtggacagactgtacagagagcagggcgagaacatcaagcaccactacacccccaccgccgacctgcccgaggtgctgctggccaagctgaacgccatgaacatcagcgagaccagatacaaggagagctggagcaagctgagagacggcggctacaagctgagactggacgccctgcccttccaggccgccaaggccagcggcgagatcatcagcgactacaagtacaaggaggccttcgagaagatgaagggccagatgctgggcagcagaagcctggaggacgacatcagcctggcccacagcgtgtacgccaccagcctgcagagcgacgtgaactacaagaagggcttcgagcacagcaaggcccagttccacctgcccctggacatggccgccctggtgcacgccaagaaggcccagaccctggccagcaaccaggactacaagcaccccctgccccagtacaccagcctggccgaggacctgagactgagctgcgccaagaaggcccacaagctgcagagcgagaacctgtacagaagcgacctgaacttcatgagaggcgtggcctgcgtgatccccggcaccctggagatcgagggcagaaagaaggccagcgagctgatcagcgagagcaagtacagacagcacccccacagcttcaagtacaccgccgtgaccgacacccccaacctgctgcacgccaagttcagcaaccagatcaccaacgagagactgtacaaggccgccggcgaggacgccagacacgagtacaccatgaccctgggcctgcccgagttcatcagagccaagaccaacgccgccaacctgagcgacgccagatacaaggagagctggagaaacctgagagcccagggctacaagctgaccatcgaggccctgcccttccaggccgccagagccagcggcgacatcgccagcgacttcctgtacagacacgacttcgtgaaggagagaggcaagctgatcggcccccagagcgtgagagacgaccccagaatccagcactgcagaagaatgggccagctgcagagcgagctgcagtacagaagaggcgccaccagcagccaggcccagttccacctgcccatggacatggtgcacctggtgcacgccaagaacgcccaggccctggccagcgaccacgactacagaacccagtaccacaagttcaccgccctgcccgaggacctgaagatggcctgggccaagaaggcccacgccctgcagagcgagctgagatacaagagcgacctgatcggcatgaagggcatcggctggctggccctgagaagcccccagatggagagcgccaagaaggccggcgagctgatcagcgagaccaagtacagaaagaagcccgacagcatcaagttcaccaccgtggtggacagccccgacctggtgcacgccaagaacagctacatgcactgcaacgagagaatgtacagaagcggcgacgccgagagcctgcacagatacaccctgatccccgaccaccccgacttcaccagagccagactgaacgccctgcacctgagcgacaaggtgtacagaaacagctgggagcagaccagagccggcagctacgacttcagactggacgccatccccttccagaccgccagagccagcagagagatcgccagcgacttcagatacaaggaggccttcctgagagacagaggcctgcagatcggctacagaagcgtggacgacgaccccagaatgaagcacttcctgaacgtgggcagactgcagagcgacaacgagtacaagaaggacttcgccaagagcagaagccagttccacagcagcaccgaccagcccggcctgctgcaggccaagagaagccagcagctggccagcgacgtgcactacagacagcccctgccccagcccacctgcgaccccgagcagctgggcctgagacacgcccagaaggcccaccagctgcagagcgacgtgaagtacaagagcgacctgaacctgaccagaggcgtgggctggaccccccccggcagctacaaggtggagatggccagaagagccgccgagctggccaacgccagaggcctgggcctgcagggcgcctacagaggcgccgaggccgtggaggccggcgaccaccagagcggcgaggtgaaccccgacgccaccgagatcctgcacgtgaagaagaagaaggccctgctgctgtag

SEQ ID NO: 258958 - DNA, 5217 bp, Artificial Sequence
  derived and/or modified sequence
atgaacgtgcagccctgcagcagatgcggctacggcgtgtaccccgccgagaagatcagctgcatcgaccagatctggcacaaggcctgcttccactgcgaggtgtgcaagatgatgctgagcgtgaacaacttcgtgagccaccagaagaagccctactgccacgcccacaaccccaagaacaacaccttcaccagcgtgtaccacacccccctgaacctgaacgtgagaaccttccccgaggccatcagcggcatccacgaccaggaggacggcgagcagtgcaagagcgtgttccactgggacatgaagagcaaggacaaggagggcgcccccaacagacagcccctggccaacgagagagcctactggaccggctacggcgagggcaacgcctggtgccccggcgccctgcccgaccccgagatcgtgagaatggtggaggccagaaagagcctgggcgaggagtacaccgaggactacgagcagcccagaggcaagggcagcttccccgccatgatcacccccgcctaccagagagccaagaaggccaaccagctggccagccaggtggagtacaagagaggccacgacgagagaatcagcagattcagcaccgtggtggacacccccgagctgctgagaagcaaggccggcgcccagctgcagagcgacgtgagatacaccgaggactacgagcagcagagaggcaagggcagcttccccgccatgatcacccccgcctaccagatcgccaagagagccaacgagctggccagcgacgtgagataccaccagcagtaccagaaggagatgagaggcatggccggccccgccatcggcgccgagggcatcctgaccagagagtgcgccgaccagtacggccagggctaccccgaggagtacgaggagcacagaggcaagggcagcttccccgccatgatcacccccgcctaccagaacgccaagaaggcccacgagctggccagcgacatcaagtacagacaggacttcaacaagatgaagggcgccgcccactaccacagcctgcccgcccaggacaacctggtgctgaagcaggcccagagcgtgaacaagctggtgagcgaggtggagtacaagaaggacctggagagcagcagaggccacagcatcaactactgcgagaccccccagttcagaaacgtgagcaagatcagcaagttcaccagcgacaacaagtacaaggagaactaccagaaccacatgagaggcagatacgagggcgtgggcatggacagaagaaccctgcacgccatgaaggtgggcagcctggccagcaacgtggcctacaaggccgactacaagcacgacatcgtggactacaactaccccgccaccctgacccccagctaccagaccgccatgaagctggtgcccctgaaggacgccaactacagacagagcatcgacaagctgaagtacagcagcgtgaccgacaccccccagatcgtgcaggccaagatcaacgcccagcagctgagccacgtgaactacagagccgactacgagaagaacaagctgaactacaccctgccccaggacgtgccccagctggtgaaggccaagaccaacgccaagctgttcagcgaggtgaagtacaaggagggctgggagaagaccaagggcaagggcttcgagatgaagctggacgccatgagcctgctggccgccaaggccagcggcgagctggccagcaacgtgcacctgctgctgagcctgaagatcaagtacaaggaggagtacgagaagaccaagggcaaggccatgggcaccgccgacagcagactgctgcacagcctgcagatcgccaagatgagcagcgaggtggagtacaagaagggcttcgaggagagcaagaccagattccacctgcccatggacatggtgaacatcagacacgccaagaaggcccagaccctggccagcgacctggactacagaaagaagctgcacgagtacaccgtgctgcccgaggacatgaagacccagtgggccaagaaggcctacggcctgcagagcgagctgcagtacaaggccgacctggcctggatgaagggcgtgggctggctgaccgagggcagcctgaacctggagcaggccaagaaggccggccagctggtgagcgagaagaactacagacagagagtggacgagctgaagttcaccagcgtgaccgacagcagccagatggagcacgccaagaagagccaggagctgcagagcggcgtggcctacaaggccggcaacgagcagagcgtgcaccagtacaccatcagcaaggacgagcccctgttcctgcaggccagagccaacgccgccaacctgagcgagaagctgtacaagagcagctgggagaaccagaaggccaagggcttcgagctgagactggacagcctgaccttcctggccgccaaggccaagagagacctggccagcgaggtgaagtacaaggaggactacgagagaagcagaggcaagctgatcggcgccaaggacgtgcagggcgacagccagatgagccacagcctgcagatgagcaagctgcagagcgagctggagtacaagaagggcttcgaggacaccaagagccagtgccacgtgagcctggacatggtgcacctggtgcacgccagaaaggcccagcacctggccaccgacgtgggctacaagaccgccgagcaccacttcaccgccctgcccaccgacatgaaggtggagtgggccaagaaggcctacggcctgcagagcgacaaccagtacagagccgacgtgaagtggatgaagggcatgggctgggtggccaccggcagcctgaacgtggagcaggccaagaaggccggcgagctgatcagcgagaagaagtacagacagcaccccgacgccctgaagttcaccagcatcaaggacacccccgagatggtgcaggccagaatcagctacacccaggccgtggacagactgtacagagagcagggcgagaacatcaagcaccactacacccccaccgccgacctgcccgaggtgctgctggccaagctgaacgccatgaacatcagcgagaccagatacaaggagagctggagcaagctgagagacggcggctacaagctgagactggacgccctgcccttccaggccgccaaggccagcggcgagatcatcagcgactacaagtacaaggaggccttcgagaagatgaagggccagatgctgggcagcagaagcctggaggacgacatcagcctggcccacagcgtgtacgccaccagcctgcagagcgacgtgaactacaagaagggcttcgagcacagcaaggcccagttccacctgcccctggacatggccgccctggtgcacgccaagaaggcccagaccctggccagcaaccaggactacaagcaccccctgccccagtacaccagcctggccgaggacctgagactgagctgcgccaagaaggcccacaagctgcagagcgagaacctgtacagaagcgacctgaacttcatgagaggcgtggcctgcgtgatccccggcaccctggagatcgagggcagaaagaaggccagcgagctgatcagcgagagcaagtacagacagcacccccacagcttcaagtacaccgccgtgaccgacacccccaacctgctgcacgccaagttcagcaaccagatcaccaacgagagactgtacaaggccgccggcgaggacgccagacacgagtacaccatgaccctgggcctgcccgagttcatcagagccaagaccaacgccgccaacctgagcgacgccagatacaaggagagctggagaaacctgagagcccagggctacaagctgaccatcgaggccctgcccttccaggccgccagagccagcggcgacatcgccagcgacttcctgtacagacacgacttcgtgaaggagagaggcaagctgatcggcccccagagcgtgagagacgaccccagaatccagcactgcagaagaatgggccagctgcagagcgagctgcagtacagaagaggcgccaccagcagccaggcccagttccacctgcccatggacatggtgcacctggtgcacgccaagaacgcccaggccctggccagcgaccacgactacagaacccagtaccacaagttcaccgccctgcccgaggacctgaagatggcctgggccaagaaggcccacgccctgcagagcgagctgagatacaagagcgacctgatcggcatgaagggcatcggctggctggccctgagaagcccccagatggagagcgccaagaaggccggcgagctgatcagcgagaccaagtacagaaagaagcccgacagcatcaagttcaccaccgtggtggacagccccgacctggtgcacgccaagaacagctacatgcactgcaacgagagaatgtacagaagcggcgacgccgagagcctgcacagatacaccctgatccccgaccaccccgacttcaccagagccagactgaacgccctgcacctgagcgacaaggtgtacagaaacagctgggagcagaccagagccggcagctacgacttcagactggacgccatccccttccagaccgccagagccagcagagagatcgccagcgacttcagatacaaggaggccttcctgagagacagaggcctgcagatcggctacagaagcgtggacgacgaccccagaatgaagcacttcctgaacgtgggcagactgcagagcgacaacgagtacaagaaggacttcgccaagagcagaagccagttccacagcagcaccgaccagcccggcctgctgcaggccaagagaagccagcagctggccagcgacgtgcactacagacagcccctgccccagcccacctgcgaccccgagcagctgggcctgagacacgcccagaaggcccaccagctgcagagcgacgtgaagtacaagagcgacctgaacctgaccagaggcgtgggctggaccccccccggcagctacaaggtggagatggccagaagagccgccgagctggccaacgccagaggcctgggcctgcagggcgcctacagaggcgccgaggccgtggaggccggcgaccaccagagcggcgaggtgaaccccgacgccaccgagatcctgcacgtgaagaagaagaaggccctgctgctgtag

SEQ ID NO: 258959 - protein, 607 aa, Artificial Sequence
  derived and/or modified sequence
MTAQSRSPTTPTFPGPSQRTPLTPCPVQTPRLGKALIHCWTDPGQPLGEQQRVRRQRTETSEPTMRLHRLRARLSAVACGLLLLLVRGQGQDSASPIRTTHTGQVLGSLVHVKGANAGVQTFLGIPFAKPPLGPLRFAPPEPPESWSGVRDGTTHPAMCLQDLTAVESEFLSQFNMTFPSDSMSEDCLYLSIYTPAHSHEGSNLPVMVWIHGGALVFGMASLYDGSMLAALENVVVVIIQYRLGVLGFFSTGDKHATGNWGYLDQVAALRWVQQNIAHFGGNPDRVTIFGESAGGTSVSSLVVSPISQGLFHGAIMESGVALLPGLIASSADVISTVVANLSACDQVDSEALVGCLRGKSKEEILAINKPFKMIPGVVDGVFLPRHPQELLASADFQPVPSIVGVNNNEFGWLIPKVMRIYDTQKEMDREASQAALQKMLTLLMLPPTFGDLLREEYIGDNGDPQTLQAQFQEMMADSMFVIPALQVAHFQCSRAPVYFYEFQHQPSWLKNIRPPHMKADHVKFTEEEEQLSRKMMKYWANFARNGNPNGEGLPHWPLFDQEEQYLQLNLQPAVGRALKAHRLQFWKKALPQKIQELEEPEERHTEL

SEQ ID NO: 258960 - DNA, 1824 bp, Artificial Sequence
  derived and/or modified sequence
atgaccgcccagagcagaagccccaccacccccaccttccccggccccagccagagaacccccctgaccccctgccccgtgcagacccccagactgggcaaggccctgatccactgctggaccgaccccggccagcccctgggcgagcagcagagagtgagaagacagagaaccgagaccagcgagcccaccatgagactgcacagactgagagccagactgagcgccgtggcctgcggcctgctgctgctgctggtgagaggccagggccaggacagcgccagccccatcagaaccacccacaccggccaggtgctgggcagcctggtgcacgtgaagggcgccaacgccggcgtgcagaccttcctgggcatccccttcgccaagccccccctgggccccctgagattcgccccccccgagccccccgagagctggagcggcgtgagagacggcaccacccaccccgccatgtgcctgcaggacctgaccgccgtggagagcgagttcctgagccagttcaacatgaccttccccagcgacagcatgagcgaggactgcctgtacctgagcatctacacccccgcccacagccacgagggcagcaacctgcccgtgatggtgtggatccacggcggcgccctggtgttcggcatggccagcctgtacgacggcagcatgctggccgccctggagaacgtggtggtggtgatcatccagtacagactgggcgtgctgggcttcttcagcaccggcgacaagcacgccaccggcaactggggctacctggaccaggtggccgccctgagatgggtgcagcagaacatcgcccacttcggcggcaaccccgacagagtgaccatcttcggcgagagcgccggcggcaccagcgtgagcagcctggtggtgagccccatcagccagggcctgttccacggcgccatcatggagagcggcgtggccctgctgcccggcctgatcgccagcagcgccgacgtgatcagcaccgtggtggccaacctgagcgcctgcgaccaggtggacagcgaggccctggtgggctgcctgagaggcaagagcaaggaggagatcctggccatcaacaagcccttcaagatgatccccggcgtggtggacggcgtgttcctgcccagacacccccaggagctgctggccagcgccgacttccagcccgtgcccagcatcgtgggcgtgaacaacaacgagttcggctggctgatccccaaggtgatgagaatctacgacacccagaaggagatggacagagaggccagccaggccgccctgcagaagatgctgaccctgctgatgctgccccccaccttcggcgacctgctgagagaggagtacatcggcgacaacggcgacccccagaccctgcaggcccagttccaggagatgatggccgacagcatgttcgtgatccccgccctgcaggtggcccacttccagtgcagcagagcccccgtgtacttctacgagttccagcaccagcccagctggctgaagaacatcagacccccccacatgaaggccgaccacgtgaagttcaccgaggaggaggagcagctgagcagaaagatgatgaagtactgggccaacttcgccagaaacggcaaccccaacggcgagggcctgccccactggcccctgttcgaccaggaggagcagtacctgcagctgaacctgcagcccgccgtgggcagagccctgaaggcccacagactgcagttctggaagaaggccctgccccagaagatccaggagctggaggagcccgaggagagacacaccgagctgtag

SEQ ID NO: 258961 - DNA, 1824 bp, Artificial Sequence
  derived and/or modified sequence
atgacggcccaaagccggagccctactaccccaacgttccctggaccctctcagcgaacaccactaacaccctgtcccgtgcagacacccagactcggcaaagctctcatccattgttggactgatccaggacagccccttggcgagcagcagagagtcagaagacagcgcactgagacgtccgaaccgaccatgcggcttcaccggctgcgggcgaggctcagcgcagtggcctgcggtctgcttctcctgctcgttcgtggacagggccaagattccgcttcccctatccgaacaactcacactggtcaggtgttgggttccctggtgcacgtgaaaggggctaatgcaggtgttcaaacattccttgggattcctttcgctaagcctcctcttgggccactcaggtttgcaccgcctgagcccccagagtcatggtcgggcgtgagggacggtaccacacacccagctatgtgcctgcaggatctcacagcagtggaatcagaatttctgagtcaatttaatatgactttccctagtgatagcatgtccgaagattgtctctacctgtcgatatataccccagcgcactctcacgagggcagtaacctgcctgtaatggtgtggattcatggaggcgccctagtatttggcatggccagtttatacgacgggtcaatgctcgcagcactagaaaatgtggtagtcgtgattatccagtatcgcctgggcgtgctgggattcttcagcaccggggacaagcacgctaccgggaactggggatatctggatcaagtggctgctctccggtgggttcagcagaatatagcacatttcgggggtaacccagaccgggtgacaattttcggggagtccgcgggtgggacctctgtcagctcactggtcgtgtccccgatttcacagggactttttcacggagcaattatggagtctggtgtggctctgctgcctggactgatcgcttcctcagctgatgtgatcagcaccgtcgtggcaaatctcagcgcctgtgaccaagtggacagcgaggcccttgtcggctgcctgcgaggcaagagcaaagaggaaatcttggccataaacaagccttttaaaatgatccctggtgttgtcgatggggtgtttctacccagacaccctcaggagctactggcgtccgccgactttcagcccgtgccatccatagtgggggtcaataacaacgaattcggatggctgataccgaaggtgatgagaatttatgatacccaaaaggaaatggatcgcgaggcgtcacaggcagcgctccaaaaaatgctgaccttgttgatgctgcctcccactttcggagatcttctcagggaggagtacatcggtgataatggggatccacagactttacaggcccaatttcaggagatgatggctgactcaatgtttgtcatacccgcgctgcaggttgcccactttcagtgctctagagcccctgtgtacttctacgaatttcaacatcagccttcctggctgaagaatataaggccacctcacatgaaggcagatcacgtgaagttcaccgaagaggaggaacagttgtctcggaagatgatgaaatattgggcgaactttgctaggaatgggaaccctaatggcgaggggttacctcattggcctcttttcgatcaggaagaacagtacctccagctgaacctgcaacccgctgtgggtcgggcactcaaggcacatcgtctccagttttggaagaaagctctgcctcagaaaatccaggagctggaagaacctgaggagcggcatacagaactctag

SEQ ID NO: 258962 - DNA, 1824 bp, Artificial Sequence
  derived and/or modified sequence
atgacagcccagagccgcagccccaccacccccaccttccctggccccagccagaggacccccctgaccccctgccctgtgcagaccccccggctgggcaaggccctgatccactgctggacagatcctggccagcccctgggggagcagcagagggtgcggcggcagaggacagagaccagcgagcccaccatgaggctgcaccggctgcgggcccggctgtctgctgtggcctgtggcctgctgctgctgctggtgcggggccagggccaggacagcgccagccccatccgcaccacccacacaggccaggtgctgggcagcctggtgcacgtgaagggggccaatgccggcgtgcagaccttcctgggcatcccctttgccaagccacccctgggccccctgcgctttgcccctcctgagcccccagagagctggagcggcgtgagagatggcaccacccacccagccatgtgcctgcaggacctgacagctgtggagagcgagttcctgagccagttcaacatgaccttccccagcgacagcatgtctgaggactgcctgtacctgagcatctacaccccagcccacagccatgagggcagcaacctgcctgtgatggtgtggattcatggaggagccctggtgtttggcatggccagcctgtatgatggctccatgctggccgccctggagaatgtggtggtggtgatcatccagtaccgcctgggcgtgctgggcttcttcagcactggagacaagcacgccactggaaactggggctacctggaccaggtggccgccctgcgctgggtgcagcagaacatcgcccactttggaggcaacccagacagagtgaccatctttggagagagcgctgggggcacctctgtgagcagcctggtggtgagccccatcagccagggcctcttccacggggccatcatggagagcggcgtggccctgctgcccggcctgattgccagcagcgcagatgtgatcagcacagtggtggccaacctgagcgcctgtgaccaggtggacagcgaggccctggtgggctgcctgcggggcaagagcaaggaggagatcctggccatcaacaagcccttcaagatgatccctggggtggtggatggagtcttcctgcccaggcacccccaggagctgctggccagcgctgacttccagcctgtgcccagcatcgtgggcgtgaacaacaatgaatttggctggctgatccccaaggtgatgaggatctatgacacccagaaggagatggaccgggaggccagccaggccgccctgcagaagatgctgaccctgctgatgctgccccccacctttggagacctgctgcgggaggagtacatcggggacaatggagacccccagaccctgcaggcccagttccaggagatgatggctgacagcatgtttgtgatcccagccctgcaggtggcccacttccagtgcagccgggcccctgtgtacttctatgagttccagcaccagcccagctggctgaagaacatccggcccccccacatgaaggctgaccacgtgaagttcacagaggaggaggagcagctgagcaggaagatgatgaagtactgggccaactttgccagaaatggaaaccccaatggagagggcctgccccactggcccctgtttgaccaggaggagcagtacctgcagctgaacctgcagcctgctgtgggccgggccctgaaggcccaccggctgcagttctggaagaaggccctgccccagaagatccaggagctggaggagcctgaggagcggcacacagagctgtag

SEQ ID NO: 258963 - DNA, 1824 bp, Artificial Sequence
  derived and/or modified sequence
atgaccgcccagagccggagccccaccacccccaccttccccggcccaagccagagaacccccttgacgccttgtccagtgcaaacgccaagactcggaaaagcactcatccactgctggactgatcctggtcaacccctcggagaacagcagcgggtgcggcggcagagaacagagacatccgaacctactatgaggctgcataggttgcgcgccaggctgagcgcagttgcttgcgggctgttgctccttctagtgcgcggccaggggcaggattcagcgagccccatccgcactactcacactggccaggtgctcgggtccctggttcatgtcaagggggccaatgcaggagtgcagacctttcttggaatcccatttgccaagcctcccctcgggccccttcggtttgccccgccagaaccccccgagagctggtcaggggtacgggatgggacgacacaccccgccatgtgcctgcaagatttgactgccgtggaatcagagttcctgagccaattcaatatgactttcccaagcgattccatgtctgaagattgtttatacctttctatctacacacctgcacattcccacgaagggtccaatttgccagtcatggtctggatacatggaggggccttggtctttggcatggcttccctgtatgacggctctatgcttgcagcattggagaatgttgtagtggtgattattcagtatcgcctcggcgttctcggcttttttagcactggggacaaacatgctaccggaaactggggctacttggaccaggtggccgctttacggtgggttcagcagaacatagcccacttcggcggcaatcccgaccgggtgaccatctttggcgaaagcgcaggaggaacaagcgtgagctcattggtagtgtcgcctatatcccaggggctgttccatggagctattatggagtctggtgtagcacttctccctggcttgatcgccagtagtgcagatgtaatatcaaccgttgtggctaacttgtcggcctgtgaccaagtggatagcgaggcattggttggatgcctccgaggtaaaagtaaggaggaaatcctggcaatcaacaaaccatttaagatgatccccggtgtggtcgatggagtgttcctgcctcggcacccacaggagctcctggcttccgccgacttccagcctgtcccatccatcgtgggagtaaacaacaatgaattcggctggctgatccccaaagtgatgagaatctatgacacgcagaaggagatggacagagaagccagccaagccgctttgcagaaaatgctgaccctgctgatgttgcctccaactttcggggatcttttgcgggaagagtatatcggggacaacggcgatccacagacgctgcaggcccaattccaggagatgatggccgacagcatgttcgtcattcctgctctgcaggttgctcactttcaatgcagccgagcccctgtgtacttctacgagtttcagcatcaaccctcctggctgaaaaacatccggcctcctcacatgaaagccgaccatgtgaaatttaccgaggaagaggaacagctaagtcgcaaaatgatgaagtattgggcaaatttcgcccggaacggaaatccaaacggtgagggcctgccacactggccactttttgatcaggaggagcagtatctgcagctgaatctgcaacccgcagttggcagagcattgaaggctcacaggttgcagttctggaagaaagctctccctcagaaaatacaagaactcgaggaacctgaggagaggcacacggaactgtag

SEQ ID NO: 258964 - DNA, 1824 bp, Artificial Sequence
  derived and/or modified sequence
atgaccgcccagagcaggtcacccacaaccccaacatttccaggccctagtcagcgcactcccctcaccccctgtcccgtccagaccccccgtttgggcaaggcactgatacattgctggacagatcccggtcagcccttaggtgaacagcaaagagtgcgccgacaaaggacagagactagcgagcctacaatgcgcctccatagactccgcgcacgcctgtcagccgtcgcctgtggactcctcctactgctggtccgcggacagggccaggacagtgcctctccaatcagaacaacacacacaggacaggtcttgggttccttagttcatgttaagggagccaacgctggtgttcagacctttctgggcatcccttttgcgaagcccccacttggccctctcagattcgctccgcctgagcccccagagagctggagcggcgtcagagatgggacaacacatcccgcaatgtgcttacaggatttgactgccgtggagtccgagttcctgtcccaattcaacatgacttttccttccgactcaatgtctgaggattgcctgtacctgtcaatctacacacctgcacatagtcatgaagggtccaatcttcccgtgatggtctggattcatggcggtgcccttgttttcggcatggccagtttatatgatggcagtatgctcgcggcactggaaaacgttgtcgtcgtcatcatccagtacagactgggggtgctgggattttttagcaccggtgataaacacgcaacaggtaactggggctatctggatcaggtggccgcattgcggtgggtgcaacaaaacattgcccattttgggggtaatcccgatagggtgacaatttttggagagtctgccggtgggacgtctgttagtagcctggttgtaagccccatctcccaaggcctattccacggcgcaattatggagtccggggtcgcgcttctgcctgggctgattgcaagctccgcagacgtgatctccactgtggtggcaaacttatccgcttgcgaccaagttgattctgaggctctggtgggatgtctgcgcggaaaatctaaggaggagatccttgccataaacaagccatttaagatgattccaggggtggtcgacggagtcttcttaccaagacacccgcaggagcttttagcaagcgccgatttccagcctgtgcccagcattgtgggggtaaacaataatgaattcgggtggttgatcccaaaggtgatgcgcatctacgatactcagaaggaaatggacagggaggcctcacaggctgctctgcagaaaatgctcactttgttgatgctgccccctacttttggggatttgttaagggaagaatatatcggtgacaacggagacccccagaccctgcaggcccagttccaggaaatgatggccgacagtatgtttgtgatcccggctctccaggttgcccacttccagtgctcgagggcgccagtgtatttctacgagtttcaacaccagccttcctggctgaaaaacatccgaccacctcatatgaaagccgatcacgtgaagttcactgaggaggaggaacagctctcccgaaaaatgatgaagtattgggccaattttgccagaaacggcaatccaaacggcgagggactcccgcactggcctctttttgaccaggaggaacagtacctccagcttaacctgcaacctgcagtggggagggcactgaaggcgcaccggctccagttttggaagaaggctttgcctcagaagattcaagagctagaagagcccgaggagagacacacagagctgtag

SEQ ID NO: 258965 - DNA, 3868 bp, Artificial Sequence
  derived and/or modified sequence
gtggcgtggcgacggagtcgcgcgagggacacgccgcgttgtgggttctcggcctgaggtgcgagagaagcggtgaccgcggccctggctgctcggacccgggaacatgatggtcgctggagcagaaggcgctgagaagggaccacggcggcgctgggtcgtgcgagccagtagcgggctgaaacgtagaggccagaaccaggtctcagggggcactaaaggcggtcggaggtaatccccacaccgcttcctcctggaagtcaggctggccgggagctcccgtatccaggacggttggtcgcctctggcctggcagggatcctagtgtctcgggacctcccggtgacgcgcctgcctcccctgctgcaccataggcccgggagtacggcgtccccacagcttggaccggcaggggctcgtgaaatgtttgtcaagtggataaatgaccatggccgtggtctccgcgggaggtgaggaaactgaaagccaccgaggaaaaggggggcgctccttaagaagtgccgcggtcacgtgtacgtttcaaaagaatggcgtgactgagtagggaggggaccgcggagaccctcagaccctggactgtaaggagatgaggggccgtgaaggggaacccaggaaactgagtcctgaaagcaaggaggaacttccagaatgaagggcgccgacactccttcctgcctttgctcaagcggttccttcaccccgatcaagttccttcccatttctccatctgggggatcctgaacgtgcacatcctcagagaagccctcctggggtctccaattctagtttattgccccctcctatcgatcccccagcgcgctcatcgggcctgtggacaaggacaggtttgaagagaggattccctggatcgcggaagggctgcaggaatggcacagccccttccgaggatgccaaaggagcccgggcaaaggaaagtggccgtgcccgggcctgcctaccactagatccccacccacctatgactgctcagtcccgctctcctaccacacccacctttcccggcccaagccagcgcaccccgctgactccctgcccagtccaaactccaaggctgggcaaggcactgatccactgctggacagacccggggcagcctctgggtgaacagcagcgtgtccgccggcagcgaaccgagaccagcgagccgaccatgcggctgcacagacttcgtgcgcggctgagcgcggtggcctgtgggcttctgctgcttcttgtccggggccagggccaggactcagccagtcccatccggaccacacacacggggcaggtgctggggagtcttgtccatgtgaagggcgccaatgccggggtccaaaccttcctgggaattccatttgccaagccacctctaggtccgctgcgatttgcaccccctgagccccctgaatcttggagtggtgtgagggatggaaccacccatccggccatgtgtctacaggacctcaccgcagtggagtcagagtttcttagccagttcaacatgaccttcccttccgactccatgtctgaggactgcctgtacctcagcatctacacgccggcccatagccatgaaggctctaacctgccggtgatggtgtggatccacggtggtgcgcttgtttttggcatggcttccttgtatgatggttccatgctggctgccttggagaacgtggtggtggtcatcatccagtaccgcctgggtgtcctgggcttcttcagcactggagacaagcacgcaaccggcaactggggctacctggaccaagtggctgcactacgctgggtccagcagaatatcgcccactttggaggcaaccctgaccgtgtcaccatttttggcgagtctgcgggtggcacgagtgtgtcttcgcttgttgtgtcccccatatcccaaggactcttccacggagccatcatggagagtggcgtggccctcctgcccggcctcattgccagctcagctgatgtcatctccacggtggtggccaacctgtctgcctgtgaccaagttgactctgaggccctggtgggctgcctgcggggcaagagtaaagaggagattcttgcaattaacaagcctttcaagatgatccccggagtggtggatggggtcttcctgcccaggcacccccaggagctgctggcctctgccgactttcagcctgtccctagcattgttggtgtcaacaacaatgaattcggctggctcatccccaaggtcatgaggatctatgatacccagaaggaaatggacagagaggcctcccaggctgctctgcagaaaatgttaacgctgctgatgttgcctcctacatttggtgacctgctgagggaggagtacattggggacaatggggatccccagaccctccaagcgcagttccaggagatgatggcggactccatgtttgtgatccctgcactccaagtagcacattttcagtgttcccgggcccctgtgtacttctacgagttccagcatcagcccagctggctcaagaacatcaggccaccgcacatgaaggcagaccatgttaaattcactgaggaagaggagcagctaagcaggaagatgatgaagtactgggccaactttgcgagaaatgggaaccccaatggcgagggtctgccacactggccgctgttcgaccaggaggagcaatacctgcagctgaacctacagcctgcggtgggccgggctctgaaggcccacaggctccagttctggaagaaggcgctgccccaaaagatccaggagctcgaggagcctgaagagagacacacagagctgtagctccctgtgccggggaggagggggtgggttcgctgacaggcgagggtcagcctgctgtgcccacacacacccactaaggagaaagaagttgattccttcattcacttcgccattcattcatacttccgtccatccattcagaaagcatttattaagaatttactcaggcatgatggcccatacttgtaatcccagctattgggaaggatgagatgggaggatggcttgaggccagaggtttgagaccgaccagccagggcaacacagtgagaccccttctcaaaaaaaaaaaaaaaaaagagagagtgtgtgattagaagctaaataggaaagttttgagcttcaagtcagtgaggagtaaaaaagatttttaaaaagcaaagaaaacaaaatataagggaaaaatatgagaaaaataaaaataaaaagagaataataggccaggcactgtggctcatgcccctaatcccagcacttttgggaggtcaaggtgagcagaacacctgaggacaggagtttgagaccagcctgcccaacgtggtgaaaccccatctctatgaaaaatacaaaaatcagacgggcacagtggtggtgcccacctgtgatcccagctactcaggaggctgaggcaggagaattacttgaacctgggaggcagaggttgcagtgagctgagattgtgccactgtactccagcctgggcaacaagagcgagactccgtttccaaaaaaataagagagaatagaagaagctactgcatgatgttagttaccaagcctgccatgggtcctctcttgctagacacactccatagatccccccactgagctgtggatgggcaaaccccggtggaatcccaccctccccaacaccccactgagccctgggccccctcctcccttcctcacctccaccttctccctgccttctctcttctctcgtctgagcccccaggccttttccactttgagggaggtgcttcgaagaatgttgcccacacctaagtgttagaagcctatgtccgttcatccctgagaggtctg

SEQ ID NO: 258966 - protein, 192 aa, Artificial Sequence
  derived and/or modified sequence
MSPRRTLPRPLSLCLSLCLCLCLAAALGSAQSGSCRDKKNCKVVFSQQELRKRLTPLQYHVTQEKGTESAFEGEYTHHKDPGIYKCVVCGTPLFKSETKFDSGSGWPSFHDVINSEAITFTDDFSYGMHRVETSCSQCGAHLGHIFDDGPRPTGKRYCINSAALSFTPADSSGTAEGGSGVASPAQADKAEL

SEQ ID NO: 258967 - DNA, 579 bp, Artificial Sequence
  derived and/or modified sequence
atgtctccgagacgcacattgccaagacctctgagcctgtgtttatccctgtgcctgtgcctctgtttagctgcagccctcggaagtgcccaatccggatcttgtcgcgataaaaagaactgtaaagtcgtgttcagccaacaggagctgcgcaagaggctgacaccacttcagtaccacgttacacaggaaaagggcacggaaagcgcattcgaaggagaatacacacaccacaaagaccccggtatctataagtgtgtcgtttgcggcacgcccctgtttaagtccgagaccaaatttgattctggctctggttggccgtcattccatgacgtgattaactctgaagccattacttttactgacgatttttcatacggtatgcaccgcgtcgagacttcgtgctcacagtgcggcgcgcaccttggacatatttttgacgatggccctcgccctacggggaagagatattgcattaattctgccgccctgtcattcacacccgccgattcatcaggaactgccgaaggtggcagcggagtagcgagcccagctcaggcagacaaggctgaactgtag

SEQ ID NO: 258968 - DNA, 579 bp, Artificial Sequence
  derived and/or modified sequence
atgagccccaggaggaccctgccccggcccctgagcctgtgcctgagcctgtgcctgtgcctgtgcctggccgccgccctgggcagcgcccagagcggcagctgccgggacaagaagaactgcaaggtggtgttcagccagcaggagctgaggaagaggctgacccccctgcagtaccacgtgacccaggagaagggcacagaaagtgcctttgaaggagagtacacccaccacaaggaccccggcatctacaagtgtgtggtgtgtggcacccccctcttcaagtctgagaccaagtttgacagcggcagcggctggcccagcttccatgatgtgatcaacagcgaggccatcaccttcacagatgacttctcctatggcatgcaccgggtggagaccagctgcagccagtgtggggcccacctgggccacatctttgatgatggcccccggcccaccgggaagcgctactgcatcaacagcgctgccctgtccttcaccccagctgacagcagcggcacagctgagggcggcagcggcgtggccagccctgcccaggccgacaaggccgagctgtag

SEQ ID NO: 258969 - DNA, 4289 bp, Artificial Sequence
  derived and/or modified sequence
atatttggactcggctgcccgtgcccaggaatttcccgtcatgcctcccgccgccccgtccgtcgcccggagccggggagggagggagcgaggttcggacaccggcggcggctgcctggcctttccatgagcccgcggcggaccctcccgcgccccctctcgctctgcctctccctctgcctctgcctctgcctggccgcggctctgggaagtgcgcagtccgggtcgtgtagggataaaaagaactgtaaggtggtcttttcccagcaggaactgaggaagcggctaacacccctgcagtaccatgtcactcaggagaaagggaccgaaagtgcctttgaaggagaatacacacatcacaaagatcctggaatatataaatgtgttgtttgtggaactccattgtttaagtcagaaaccaaatttgactccggttcaggttggccttcattccacgatgtgatcaattctgaggcaatcacattcacagatgacttttcctatgggatgcacagggtggaaacaagctgctctcagtgtggtgctcaccttgggcacatttttgatgatgggcctcgtccaactgggaaaagatactgcataaattcggctgccttgtcttttacacctgcggatagcagtggcaccgccgagggaggcagtggggtcgccagcccggcccaggcagacaaagcggagctctagagtaatggagagtgatggaaacaaagtgtacttaatgcacagcttattaaaaaaatcaaaattgttatcttaatagatatattttttcaaaaactataagggcagttttgtgctattgatattttttcttcttttgcttaaacagaagccctggccatccatgtattttgcaattgactagatcaagaactgtttatagctttagcaaatggagacagctttgtgaaacttcttcacaagccacttataccctttggcattcttttctttgagcacatggcttcttttgcagtttttccccctttgattcagaagcagagggttcatggtcttcaaacatgaaaatagagatctcctctgcagtgtagagaccagagctgggcagtgcagggcatggagacctgcaagacacatggccttgaggcctttgcacagacccacctaagataaggttggagtgatgttttaatgagactgttcagctttgtggaaagtttgagctaaggtcatttttttttttctcactgaaagggtgtgaaggtctaaagtctttccttatgttaaattgttgccagatccaaaggggcatactgagtgttgtggcagagaagtaaacattaccacactgttaggcctttattttattttattttccatcgaaagcattggaggcccagtgcaatggctcacgcctgtgatcccagcactttgggaggccaaggcgggtggatcacgaggtcaggagatggagaccatcctggctaacatggtgaaaccccgtctctactaaaaatacgaaaaattagccaggcgtggtggtgggcacctgtagtcccagctactcaggaggctgaggcaggagaatggcgtgaacccggaaggcggagcttgcagttagccgagatcatgccactgcactccagcctacatgacaatgtgacactccatctcaaaaaataataataataacaatataagaactagctgggcatggtggcgcatgcatgtagtcccagctactcctgaggctcagtcaggagaatcgcttgaacttgggaggcggaggttgcagtgagctgagctcataccactgcactccagcctgaacagagtgagatcctgtcaaaaaagaaaagaaaaagaaagcagcattcaaatgtaagacaactgtaaaatattgagccccacttggtctaaaattcaaaaagaagaacgcctgtccatcgcctttttataagtccttctctccacacctaaaagcagctgcagctggaagggcacaaattccactgtgtaaaataaaatattaggggcaacacacttcatcaaggcagcaggaatgagagagagcagagaagatcaaggatgaagtcttgggtactgaaaaattcagtgctgggcagaaaaactgacagggcagtacaagtaacaaacagaatccaagtggggtggcccttgtgcacagagctccaggtgacctctggagagacatgggcattcacatggaaagctaaaacggaagctcaagtttcatactcaacataatcttctgtgtgacaaaggacaagccatgtagcctctctgtgcctatttcttcatgcataaactgggactcataatatttgtaaaatgtattgatactctcagggcaaattcactatattgctatacagttgagatcagtgttgtaaaattaaactgatctggttctaattgcctcaaaggccaaagcccaggcatttgaaatggaaagaagcagagaggaggctgacttagctgattggtatggaaacagttgggccaagagccagaatttccctttgtagcaacacggctagttttactttgagaagctctgctcagctgctttataacattaagtctggcggaatggatgtcactgtgcacaataaagttttcacaagtataaacaatggtgatgtaagtcaacattgctgtagccaggtgtgaaggttgtatggtgtgtgacgaatgtacatcatgtttgtaggtttggatgctaatcttgaattgtagtttaaaaaatacgtatttttgtaactctttgaaagtttatgaagactgacagctttccttgtaagcactaagagaaaaaaaagaaagagggacatttgacaattttaaagaaacaacaagaaattagaatgaaaatctgtgacaaacagcgtcagtgtggccatgtccacattcctacatgtctctctctacaagcacctctctaagaagcctgacatcccggtggactctttatagtcatgtacacttgattccagatgagctctggtcttatctggatgctcagataagaggtttctatctgagcatccagatgttccctcaggttccaagacatttcaccccaggccctgggttcactctggaattcgtaggcttcacgtctctctagaaatgacgtgtaaaatttaagaccagacctcagccatcagcgtccagaccatcctagaagtctttcccaatctcacagagaaagccctagtatttcccagtgaccccaggattccacgttggggtggccaaagaaataggtctctcagggctttgccacagcctccagcccatccttcagaggcacacacagcacctctcggctgctccagctctgtaggatagcctcccctggggtccgtgggacgcgggccacagtgttgaggtagacaaggaggatcagtgagaggcctcttccctctccacagagactggattgtcattgttccttcatttatatcgtagggcttaacatttcactcaaaaaaaagcccctctttttctaatccttagtctttgtttcaaggaaagccagtttttcttctaccacattttccaggatcgactttaagaaaaatgcaacatctattgaaaaaaagtggggtgtatgcatgtggtttaattccagattgcttttgggtttaagtggtatcaaatttcagtatatttctgtcttatgtgaaagaaatatattactaaaacgtcagtgagcaataatgtcagctgtcaagcactagatttatttttgcaggatatggagtgcaatgaactgagtcaatatggcaaggtgtatgtgatctgtgggagttatgccatttaacataggaagtgcatgggactttccctctctgcactccagctcttactgtaccattagaagatgcagaattctgttggtgtgcaaaaagtatagccttacattcaagcagaatggatctgaagaaagcagcaatatctgttactagagaacattcccatgtgtttaaactcttcacttcttagatgcatttaaattcttaatgcaaatgacgtagcaatttgaaaacttctccgtattacttgtgtttaaaatgtcttgctttaaatacaaaacaaatggtaaaggggattatcttttgtttagatggttaaatattatttttgccttagatagctttgtaataatttttctccagacagttcaacacttttgaaaaatgacatgaattttcattaaaaacccttttcctatgtttattgtatacaagaattatgcaataaaatttctttataaaaat

SEQ ID NO: 258970 - DNA, 579 bp, Artificial Sequence
  derived and/or modified sequence
atgagcccccggcggaccctgccccggcccctgagcctgtgcctgagcctctgcctctgcctatgtctcgcagctgccttggggtccgcgcagtcaggttcatgtagggacaagaagaactgtaaagtcgtcttttcccagcaggagttaaggaaaaggctgactccactgcaatatcacgtgacacaggaaaagggtaccgaatctgccttcgagggcgagtatactcatcacaaagatcccggtatttacaagtgtgtagtctgcggtactccccttttcaaaagcgaaacaaaatttgacagcggatccggctggcccagtttccacgacgtcatcaattctgaggcaatcacattcaccgacgattttagttacggcatgcacagagtagagacttcctgctcccagtgtggagcgcacctgggccatatcttcgacgatggtcctcgccccaccgggaaacggtactgtatcaattctgctgccctatcattcacacccgctgactcctcaggcactgccgagggcgggagcggggtggcaagtccggcccaggcagataaggcagaactttag

SEQ ID NO: 258971 - DNA, 579 bp, Artificial Sequence
  derived and/or modified sequence
atgagccccagacggaccctgccacgccctctgtccctttgtttatctctttgtctgtgtctgtgcttagccgcagccctgggctcggctcagtccggaagttgccgtgacaagaaaaactgcaaggtggttttctcgcagcaagaactacgcaagagactgactcccttgcagtatcacgttacacaggagaagggtaccgagtccgcatttgagggggagtatacccaccacaaagaccctgggatctacaagtgcgtcgtctgcgggacgcccctctttaaatccgagactaagtttgattccgggtccggctggccctccttccatgacgtgatcaacagcgaagccattactttcaccgatgacttcagctatggcatgcaccgtgtcgaaactagttgttcacagtgtggggctcatcttgggcatatatttgacgacggacccaggccgactgggaaaaggtattgcatcaacagtgcagcattgtctttcacccccgcagatagctccggcacggcagaaggaggaagcggggtcgcaagtcctgcccaggctgacaaggctgaactttag

SEQ ID NO: 258972 - DNA, 579 bp, Artificial Sequence
  derived and/or modified sequence
atgagccccagaagaaccctgcccagacccctgagcctgtgcctgagcctgtgcctgtgcctgtgcctggccgccgccctgggcagcgcccagagcggcagctgcagagacaagaagaactgcaaggtggtgttcagccagcaggagctgagaaagagactgacccccctgcagtaccacgtgacccaggagaagggcaccgagagcgccttcgagggcgagtacacccaccacaaggaccccggcatctacaagtgcgtggtgtgcggcacccccctgttcaagagcgagaccaagttcgacagcggcagcggctggcccagcttccacgacgtgatcaacagcgaggccatcaccttcaccgacgacttcagctacggcatgcacagagtggagaccagctgcagccagtgcggcgcccacctgggccacatcttcgacgacggccccagacccaccggcaagagatactgcatcaacagcgccgccctgagcttcacccccgccgacagcagcggcaccgccgagggcggcagcggcgtggccagccccgcccaggccgacaaggccgagctgtag

SEQ ID NO: 258973 - protein, 414 aa, Artificial Sequence
  derived and/or modified sequence
MQSQRIPGRKRGRPSLHSTPMKMAVHNLYSASAGSLPAVKIPKKRGRKPGYKIKSRVLMTPLALSPPRSTPEPDLSSIPQDAATVPSLAAPQALTVCLYINKQANAGPYLERKKVQQLPEHFGPERPSAVLQQAVQACIDCAHQQKLVFSLVKQGYGGEMVSVSASFDGKQHLRSLPVVNSIGYVLRFLAKLCRSLLCDDLFSHQPFPRGCSASEKVQEKEEGRMESVKTVTTEEYLVNPVGMNRYSVDTSASTFNHRGSLHPSSSLYCKRQNSGDSHLGGGPAATAGGPRTSPMSSGGPSAPGLRPPASSPKRNTTSLEGNRCASSPSQDAQDARRPRSRNPSAWTVEDVVWFVKDADPQALGPHVELFRKHEIDGNALLLLKSDMVMKYLGLKLGPALKLCYHIDKLKQAKF

SEQ ID NO: 258974 - DNA, 1245 bp, Artificial Sequence
  derived and/or modified sequence
atgcagtcgcagaggattccagggcggaaaagaggtcggccgtccctccacagcacaccgatgaaaatggctgtgcacaatttgtactctgcaagcgcaggctcgctaccagcagtgaaaattcccaaaaagcgtggccgcaaacctgggtataaaattaaaagcagggttctcatgacccctcttgccctatctccgccacgctctacccctgaacctgatctgagttcgatcccccaagacgctgccacagttcctagtctggccgccccccaggctctcactgtgtgtctatatatcaataaacaggccaatgcaggcccttatctcgagcgcaagaaagtgcaacagctgcccgaacattttggccctgagcgtcccagcgccgtgctgcagcaggcggtccaggcctgtattgattgtgcccaccagcagaaacttgtgttctctttggtgaagcagggatatggaggagaaatggtgtccgtcagcgcttctttcgacgggaaacaacatctccgaagccttcctgtagtgaacagcataggatacgtactccgatttctcgctaagctgtgtcgatcgttactctgcgacgatctcttcagtcaccagccatttccaaggggctgtagcgctagtgagaaagtccaagaaaaggaggaaggccgcatggagtcagtgaagacagtaacaaccgaggaatatctggtgaaccctgtgggcatgaacaggtattccgtagatacttcggcttccacctttaatcataggggctcgctgcacccttcctcctcactgtactgtaagcgacaaaacagcggggatagtcacttgggcggagggcccgcagcgacagcgggcggcccaaggaccagtccgatgtcaagtggcgggccatctgcgccaggtctgagacccccagcttcctcacctaaacggaacacgactagcttggagggcaaccgttgtgcttcatctccctcccaggatgctcaagatgcccggaggcccaggtctaggaatccttctgcctggactgttgaagatgtggtctggttcgtaaaggacgccgacccccaggcactagggcctcacgtggagctgtttcgcaaacacgagatcgacggaaacgccctgctattgctgaagagcgacatggtgatgaagtacctcggtctcaagcttggtccagcactgaaactctgttatcatattgacaagctaaaacaggcaaagttctag

SEQ ID NO: 258975 - DNA, 1245 bp, Artificial Sequence
  derived and/or modified sequence
atgcagagccagagaattcctggcaggaagaggggccggcccagcctgcacagcacccccatgaagatggctgtgcacaacctgtacagcgccagcgctggcagcctgcctgctgtgaagatccccaagaagaggggcaggaagccaggctacaagatcaagagccgggtgctgatgacccccctggccctgagcccccccaggagcaccccagagccagacctgagcagcatcccccaggatgctgccaccgtgcccagcctggccgccccccaggccctgactgtgtgcctgtacatcaacaagcaggccaatgccggcccctacctggagaggaagaaggtgcagcagctgcctgagcacttcggccctgagcggcccagcgctgtgctgcagcaggccgtgcaggcctgcatcgactgtgcccaccagcagaagctggtgttcagcctggtgaagcagggctacggcggggagatggtgtctgtgtctgccagctttgatggcaagcagcacctgcggagcctgcctgtggtgaacagcatcggctacgtgctgcgcttcctggccaagctgtgccgcagcctgctgtgtgatgacctcttcagccaccagcccttcccccggggctgcagcgccagcgagaaggtgcaggagaaggaggagggccgcatggagagcgtgaagacagtgaccacagaggagtacctggtgaaccctgtgggcatgaaccgctacagcgtggacaccagcgccagcaccttcaaccaccggggcagcctgcaccccagcagcagcctgtactgcaagaggcagaacagcggggacagccacctgggcggcggccctgctgccacagctgggggccccaggaccagccccatgagcagcggcggccccagcgcccctggcctgcggcccccagccagcagccccaagaggaacaccaccagcctggagggcaacagatgtgccagcagccccagccaggatgcccaggatgcccggcggcccaggagcaggaaccccagcgcctggacagtggaggatgtggtgtggtttgtgaaggatgctgacccccaggccctgggcccccacgtggagctgttcaggaagcatgaaattgatggaaatgccctgctgctgctgaagagtgacatggtgatgaagtacctgggcctgaagctgggccctgccctgaagctgtgctaccacatcgacaagctgaagcaggccaagttctag

SEQ ID NO: 258976 - DNA, 1245 bp, Artificial Sequence
  derived and/or modified sequence
atgcagagccagcggatccccggccggaagcggggccggcccagccttcacagcactccaatgaaaatggccgttcataatctctattccgcctccgcgggtagtctgccagccgtcaaaatccccaaaaagaggggccgcaagcctggatataaaattaagtctcgcgtactcatgacaccactcgctctgtctccacccagaagcactccggagccagacctgtcctctatcccacaagatgctgctaccgtcccctcattggcagccccccaggctctgacagtgtgtctctacataaataagcaagctaatgccggcccatacctggaaagaaagaaagttcagcaacttccagaacacttcggaccggaaaggccgtctgccgtgctgcagcaggccgttcaggcttgtatcgactgtgcacaccagcagaaattggtgttttcgctggtgaaacaggggtatggcggcgagatggtgagcgtgagcgcatcttttgacggaaagcagcaccttaggagcctgcccgtggtgaattcgatcgggtacgtattaaggttcctggccaagctgtgcagatcgttactgtgtgacgacctgttttcgcaccaaccattccctagaggctgttctgctagcgagaaggtgcaggagaaggaagaggggcgtatggaatccgtgaagaccgtgaccactgaggagtacctggtgaatccggttggcatgaatcgttactccgttgataccagcgcttcaacattcaatcaccggggaagcttgcatccatcaagctcactgtactgtaaacgccagaattctggggacagccacctcggcggcggcccagctgctaccgccggaggtcctcgcacgtccccaatgagcagcggcggcccaagcgctccggggctccggcctcctgcgtcatctccgaagcggaacacaacaagtctcgaaggcaatcgctgcgcttcaagtccgagccaggatgctcaagatgctagaagaccacgcagccgcaatccatccgcgtggacggtagaagacgtggtgtggtttgtgaaggacgccgatccacaggcactagggccgcacgttgaattattccggaagcatgaaatagatggtaatgccttacttttgttgaagtcagacatggtgatgaaatatcttggactcaaactgggcccggccctcaagctatgctatcatattgacaaactgaagcaagccaaattctag

SEQ ID NO: 258977 - DNA, 1245 bp, Artificial Sequence
  derived and/or modified sequence
atgcaaagccagaggatccctggcagaaaaaggggtcggccaagcctccactcaacaccaatgaaaatggctgtccacaacctttactctgcgtcggccggaagcttacccgcagttaaaataccgaaaaagcggggacgaaagccgggttataagatcaaaagtcgcgtgctgatgactcctcttgcgttgtccccaccacgatcaaccccagagcccgacctatcatccatcccccaagatgccgctacggtccccagcctggctgctccacaagccctcacagtttgcctgtacattaacaagcaggcgaatgccggtccctatctcgaaagaaagaaggtccagcagctgcccgagcacttcgggccagagaggccgtcagctgtgctgcaacaggcggtacaggcatgtatcgattgcgcacatcagcagaagctcgtcttctctttggtgaagcaaggctacggcggagaaatggtctccgtttctgcctctttcgatggtaaacagcaccttagaagcttgcccgtcgtcaattctataggctacgtcctccgcttcctggccaagttatgccggtcactcctgtgcgacgatctgttctctcatcagccctttcctcggggatgttccgcatccgaaaaggtgcaggaaaaagaagaggggcgaatggagtctgttaagacagtcacaactgaagaatatctggtgaatccggtcgggatgaatcgatacagcgtcgatacttctgcgtctacgtttaaccaccggggtagtctgcatccctcaagctcactatactgcaaaaggcagaattctggtgattcccacctcggagggggaccagcagccacagccggaggacccagaaccagccctatgtcttctggaggaccgtcagccccaggactgcgtccccctgcgtctagcccaaagcgaaacaccacaagtttggaggggaatcgttgcgctagctctccctcacaggacgctcaggatgccaggaggcccagaagccggaatccttctgcttggacagtggaggacgtcgtttggttcgtgaaggacgctgacccccaggcgctaggccctcatgtcgaactgtttcggaaacacgagatagatgggaacgccctactgctgctcaagagtgatatggtcatgaaatatctcgggctgaaactgggaccggctttaaagctctgttaccacattgacaaattaaagcaggcaaaattctag

SEQ ID NO: 258978 - DNA, 1245 bp, Artificial Sequence
  derived and/or modified sequence
atgcagagccagagaatccccggcagaaagagaggcagacccagcctgcacagcacccccatgaagatggccgtgcacaacctgtacagcgccagcgccggcagcctgcccgccgtgaagatccccaagaagagaggcagaaagcccggctacaagatcaagagcagagtgctgatgacccccctggccctgagcccccccagaagcacccccgagcccgacctgagcagcatcccccaggacgccgccaccgtgcccagcctggccgccccccaggccctgaccgtgtgcctgtacatcaacaagcaggccaacgccggcccctacctggagagaaagaaggtgcagcagctgcccgagcacttcggccccgagagacccagcgccgtgctgcagcaggccgtgcaggcctgcatcgactgcgcccaccagcagaagctggtgttcagcctggtgaagcagggctacggcggcgagatggtgagcgtgagcgccagcttcgacggcaagcagcacctgagaagcctgcccgtggtgaacagcatcggctacgtgctgagattcctggccaagctgtgcagaagcctgctgtgcgacgacctgttcagccaccagcccttccccagaggctgcagcgccagcgagaaggtgcaggagaaggaggagggcagaatggagagcgtgaagaccgtgaccaccgaggagtacctggtgaaccccgtgggcatgaacagatacagcgtggacaccagcgccagcaccttcaaccacagaggcagcctgcaccccagcagcagcctgtactgcaagagacagaacagcggcgacagccacctgggcggcggccccgccgccaccgccggcggccccagaaccagccccatgagcagcggcggccccagcgcccccggcctgagaccccccgccagcagccccaagagaaacaccaccagcctggagggcaacagatgcgccagcagccccagccaggacgcccaggacgccagaagacccagaagcagaaaccccagcgcctggaccgtggaggacgtggtgtggttcgtgaaggacgccgacccccaggccctgggcccccacgtggagctgttcagaaagcacgagatcgacggcaacgccctgctgctgctgaagagcgacatggtgatgaagtacctgggcctgaagctgggccccgccctgaagctgtgctaccacatcgacaagctgaagcaggccaagttctag

SEQ ID NO: 258979 - DNA, 366 bp, Artificial Sequence
  derived and/or modified sequence
atgggcaagagctaccaccccggctgcttcagatgcatcgtgtgcaacaagtgcctggacggcatccccttcaccgtggacttcagcaaccaggtgtactgcgtgaccgactaccacaagaactacgcccccaagtgcgccgcctgcggccagcccatcctgcccagcgagggctgcgaggacatcgtgagagtgatcagcatggacagagactaccacttcgagtgctaccactgcgaggactgcagaatgcagctgagcgacgaggagggctgctgctgcttccccctggacggccacctgctgtgccacggctgccacatgcagagactgaacgccagacagccccccgccaactacatctag

SEQ ID NO: 258980 - DNA, 243 bp, Artificial Sequence
  derived and/or modified sequence
atgggcaagagctaccaccccggctgcttcagatgcatcgtgtgcaacaagtgcctggacggcatccccttcaccgtggacttcagcaaccaggtgtactgcgtgaccgactaccacaagaactacgcccccaagtgcgccgcctgcggccagcccatcctgcccagcgagggctgcgaggacatcgtgagagtgatcagcatggacagagactaccacttcgagtgctaccactgcgagtag

SEQ ID NO: 258981 - DNA, 198 bp, Artificial Sequence
  derived and/or modified sequence
atgggcaagagctaccaccccggctgcttcagatgcatcgtgtgcaacaagtgcctggacggcatccccttcaccgtggacttcagcaaccaggtgtactgcgtgaccgactaccacaagaactacgcccccaagtgcgccgcctgcggccagcccatcctgcccagcgagggctgcgaggacatcgtgagagtgtag

SEQ ID NO: 258982 - DNA, 366 bp, Artificial Sequence
  derived and/or modified sequence
atggggaaatcctaccatccaggttgtttccggtgtattgtgtgtaacaagtgcctggacggcataccattcactgtcgacttctctaatcaggtgtactgcgtaaccgattatcacaagaactacgctcccaaatgcgctgcatgcggtcagccgatcctgccatcagaagggtgcgaggatatagttcgggtaatctcaatggaccgggactaccactttgagtgctatcactgcgaggattgtaggatgcaactatccgatgaggagggatgttgctgttttcctctcgatggacatctgttgtgtcacggctgtcacatgcagagattgaacgcccgacagccacccgccaattacatatag

SEQ ID NO: 258983 - DNA, 243 bp, Artificial Sequence
  derived and/or modified sequence
atgggaaaatcttaccatcccggctgtttcaggtgtatcgtttgcaataagtgtctggacggcataccatttactgtggatttcagtaatcaggtgtactgtgtgactgactaccacaagaactacgcccccaaatgcgcggcatgtggtcagcctattctgccttccgaaggttgtgaagacatagtacgggtcatatcaatggaccgggattaccatttcgaatgctaccactgtgagtag

SEQ ID NO: 258984 - DNA, 198 bp, Artificial Sequence
  derived and/or modified sequence
atggggaaatcttatcaccccgggtgctttagatgcatagtatgcaacaaatgcctggatggcatccccttcacagttgacttttcgaaccaggtgtactgtgtcaccgactaccataagaattatgctcctaaatgtgcagcttgcgggcagcccatcctcccttctgagggatgtgaggacatagttcgcgtgtag

SEQ ID NO: 258985 - DNA, 243 bp, Artificial Sequence
  derived and/or modified sequence
atgggaaaatcctatcaccccggctgctttagatgcattgtgtgtaacaagtgtctcgatgggatcccctttactgtggatttctcaaatcaggtttactgcgtaaccgattatcacaaaaactacgcccctaagtgtgcagcttgtggacagcccatacttcccagtgaaggatgtgaagacatcgtccgcgtgatctccatggatagagattaccacttcgagtgttatcactgtgagtag

SEQ ID NO: 258986 - DNA, 366 bp, Artificial Sequence
  derived and/or modified sequence
atgggcaagagctaccaccctggctgcttccgctgcatcgtgtgcaacaagtgcctggatggcatccccttcaccgtggacttcagcaaccaggtgtactgtgtgacagactaccacaagaactatgcccccaagtgtgccgcctgtggccagcccatcctgcccagcgagggctgtgaggacatcgtgcgggtcatctccatggaccgggactaccactttgagtgctaccactgtgaggactgcaggatgcagctgagtgatgaggagggctgctgctgcttccccctggatggccacctgctgtgccacggctgccacatgcagaggctgaatgcccggcagcccccagccaactacatctag

SEQ ID NO: 258987 - DNA, 243 bp, Artificial Sequence
  derived and/or modified sequence
atgggcaagagctaccaccctggctgcttccgctgcatcgtgtgcaacaagtgcctggatggcatccccttcaccgtggacttcagcaaccaggtgtactgtgtgacagactaccacaagaactatgcccccaagtgtgccgcctgtggccagcccatcctgcccagcgagggctgtgaggacatcgtgcgggtcatctccatggaccgggactaccactttgagtgctaccactgtgagtag

SEQ ID NO: 258988 - DNA, 198 bp, Artificial Sequence
  derived and/or modified sequence
atgggcaagagctaccaccctggctgcttccgctgcatcgtgtgcaacaagtgcctggatggcatccccttcaccgtggacttcagcaaccaggtgtactgtgtgacagactaccacaagaactatgcccccaagtgtgccgcctgtggccagcccatcctgcccagcgagggctgtgaggacatcgtgcgggtgtag

SEQ ID NO: 258989 - DNA, 366 bp, Artificial Sequence
  derived and/or modified sequence
atgggcaagagctaccaccccggctgcttccggtgcatcgtgtgcaataagtgtctggacgggatacccttcacggtggactttagcaatcaagtatactgcgtaactgattaccacaagaattatgcccccaagtgcgctgcctgtggtcagcccatccttccaagcgaaggctgcgaggacatagtccgtgtcatctccatggatcgcgattaccacttcgagtgctatcactgcgaagactgccgcatgcagttgagcgacgaagaggggtgctgttgcttccccctggatggacatctcctatgtcacggatgtcatatgcagaggctcaacgcgcgccaaccccctgcaaattatatttag

SEQ ID NO: 258990 - DNA, 243 bp, Artificial Sequence
  derived and/or modified sequence
atgggcaagagctaccaccccggctgcttccggtgcatcgtgtgcaataagtgtttagacggtattccattcactgtggacttctccaaccaggtgtactgtgtgactgattaccacaagaactatgcccccaaatgcgcagcgtgtgggcagccgatcttgccatcggaggggtgcgaggatatcgtgcgagtcatctctatggatcgcgattatcacttcgagtgttatcactgtgaatag

SEQ ID NO: 258991 - DNA, 198 bp, Artificial Sequence
  derived and/or modified sequence
atgggcaagagctaccaccccggctgcttccggtgcatcgtgtgcaacaaatgcttggatggaattccgtttaccgtggacttttccaatcaggtttattgcgtgactgactaccacaagaattacgcccctaagtgtgccgcatgtggccagcccattctgcccagcgaggggtgcgaagacatcgtcagagtttag

SEQ ID NO: 258992 - DNA, 243 bp, Artificial Sequence
  derived and/or modified sequence
atgggcaagagctaccaccccggctgcttccggtgcatcgtgtgcaacaaatgcctggacggaatcccattcaccgtcgatttttcgaatcaggtttactgtgtcacagattaccacaagaattatgctcccaagtgcgcagcgtgcggtcagccaattttgccatccgagggttgtgaggacatcgtgcgtgtgatctcgatggaccgcgactatcatttcgagtgctatcattgcgagtag

SEQ ID NO: 258993 - DNA, 366 bp, Artificial Sequence
  derived and/or modified sequence
atgggaaaatcatatcaccctggttgttttcgttgcatcgtgtgcaacaagtgcctggacggcattcctttcacagtggatttttctaaccaagtgtactgtgttacagactaccacaagaattatgcgccaaaatgcgctgcctgtgggcagcctatcctgccatcagagggttgcgaggacatagttagagtgatttctatggaccgtgactaccatttcgaatgctatcattgtgaggattgccggatgcagctcagtgacgaagagggctgctgctgttttcccctcgacggccatctgctatgccatggttgtcacatgcagcggctcaatgccaggcagccacctgctaactacatctag

SEQ ID NO: 258994 - DNA, 243 bp, Artificial Sequence
  derived and/or modified sequence
atgggcaaatcttatcacccaggctgtttccgatgcatcgtctgtaacaaatgtctggatggcattccctttaccgtagactttagcaatcaggtgtactgcgtaactgactatcataagaactacgcccctaaatgtgccgcatgcggacagcctatattgccttctgaaggctgcgaagacatcgtcagagtcattagtatggacagggactaccactttgagtgctaccattgcgagtag

SEQ ID NO: 258995 - DNA, 198 bp, Artificial Sequence
  derived and/or modified sequence
atggggaagtcataccacccgggttgcttccggtgtatcgtgtgtaacaagtgcctggatgggatcccgttcacagtcgatttctcaaatcaggtctactgtgtgacagattatcataagaactacgccccaaagtgtgcagcttgtgggcagccaatcctgccaagtgagggctgtgaagacatcgtcagagtgtag

SEQ ID NO: 258996 - DNA, 243 bp, Artificial Sequence
  derived and/or modified sequence
atggggaaaagttatcatccaggttgcttccgctgcattgtgtgtaataagtgcctagacggcatcccatttactgtggacttttctaatcaagtgtactgcgtgacagactaccacaagaactacgcgccaaagtgtgcggcatgcggacaacctattctcccttcagagggatgcgaggacatcgttcgagtcatttctatggacagggactaccactttgagtgttaccattgcgagtag

SEQ ID NO: 258997 - protein, 446 aa, Artificial Sequence
  derived and/or modified sequence
LTLHSLTCYEDLVTFLQQSIHQFEVGPYGCILLTLSAILSRSTELIRQDFDVPTSHLIGAHGYCTQELVNLLLTGKAVSNVFNDVVELDSGDGNITLLRGIAARSDIGFLSLFEHYNMCQVGCFLKTPRFPIWVVCSESHFSILFSLQPGLLRDWRTERLFDLYYYDGLANQQEQIRLTIDTTQTISEDTDNDLVPPLELCIRTNIGSALGFKYPVGNNQTAVQDNVKVSLAFGLSIATLAQSVGHISGAHLNPAVTLGLLLSCQISIFRALMYIIAQCVGAIVATAILSGITSSLTGNSLGRNDLADGVNSGQGLGIEIIGTLQLVLCVLATTDRRRRDLGGSAPLAIGLSVALGHLLAIDYTGCGINPARSFGSAVITHNFSNHWIFWVGPFIGGALAVLIYDFILAPRSSDLTDRVKVWTSGQVEEYDLDADDINSRVEMKPK

SEQ ID NO: 258998 - protein, 228 aa, Artificial Sequence
  derived and/or modified sequence
MYIIAQCVGAIVATAILSGITSSLTGNSLGRNDLADGVNSGQGLGIEIIGTLQLVLCVLATTDRRRRDLGGSAPLAIGLSVALGHLLAIDYTGCGINPARSFGSAVITHNFSNHWIFWVGPFIGGALAVLIYDFILAPRSSDLTDRVKVWTSGQVEEYDLDADDINSRSFLGTKIYQFTHSLEVVEEVKERDPPASRPSEHDGRCARKSPLAPKLLTDSPAQVPGILP

SEQ ID NO: 258999 - protein, 269 aa, Artificial Sequence
  derived and/or modified sequence
MASEFKKKLFWRAVVAEFLATTLFVFISIGSALGFKYPVGNNQTAVQDNVKVSLAFGLSIATLAQSVGHISGAHLNPAVTLGLLLSCQISIFRALMYIIAQCVGAIVATAILSGITSSLTGNSLGRNDLADGVNSGQGLGIEIIGTLQLVLCVLATTDRRRRDLGGSAPLAIGLSVALGHLLAIDYTGCGINPARSFGSAVITHNFSNHWIFWVGPFIGGALAVLIYDFILAPRSSDLTDRVKVWTSGQVEEYDLDADDINSRVEMKPK

SEQ ID NO: 259000 - protein, 254 aa, Artificial Sequence
  derived and/or modified sequence
MASEFKKKLFWRAVVAEFLATTLFVFISIGSALGFKYPVGNNQTAVQDNVKVSLAFGLSIATLAQSVGHISGAHLNPAVTLGLLLSCQISIVATAILSGITSSLTGNSLGRNDLADGVNSGQGLGIEIIGTLQLVLCVLATTDRRRRDLGGSAPLAIGLSVALGHLLAIDYTGCGINPARSFGSAVITHNFSNHWIFWVGPFIGGALAVLIYDFILAPRSSDLTDRVKVWTSGQVEEYDLDADDINSRVEMKPK

SEQ ID NO: 259001 - protein, 329 aa, Artificial Sequence
  derived and/or modified sequence
MCQVGCFLKTPRFPIWVVCSESHFSILFSLQPGLLRDWRTERLFDLYYYDGLANQQEQIRLTIDTTQTISEDTDNDLVPPLELCIRTNIGSALGFKYPVGNNQTAVQDNVKVSLAFGLSIATLAQSVGHISGAHLNPAVTLGLLLSCQISIFRALMYIIAQCVGAIVATAILSGITSSLTGNSLGRNDLADGVNSGQGLGIEIIGTLQLVLCVLATTDRRRRDLGGSAPLAIGLSVALGHLLAIDYTGCGINPARSFGSAVITHNFSNHWIFWVGPFIGGALAVLIYDFILAPRSSDLTDRVKVWTSGQVEEYDLDADDINSRVEMKPK

SEQ ID NO: 259002 - DNA, 1341 bp, Artificial Sequence
  derived and/or modified sequence
ctgaccttacatagcttgacatgctacgaggacctcgtgaccttcctccagcagtcaatacatcaatttgaggtgggaccgtacggatgtattctcctcaccctgtccgccattctgagccgcagtactgaacttattaggcaagactttgacgtgccgacttcccacctgatcggcgctcacggctactgcacacaagagctggtgaatctcttgctgaccggaaaggccgtgtcgaacgtgttcaatgatgttgtggagctcgattctggcgatggtaacatcaccctccttagaggcatcgcagctcgatctgacatcggatttctcagcttatttgagcattacaatatgtgccaggttgggtgcttcttgaaaaccccgaggtttcccatttgggtggtgtgttccgagtctcacttttcaattttattttccctgcagcctggcctactgagggactggcgaacagagcggctgttcgacctgtactactacgacgggctggccaaccagcaggagcagatcagactcacaattgacactacacagaccatcagtgaggatacagataacgacttggtccccccattggagctgtgtattagaaccaacatcggcagtgcactgggctttaagtacccggttggaaacaatcagacagcagtgcaggacaacgttaaagtctctctggctttcggactgtccatcgctacactggctcaatccgtcgggcatatttcgggcgctcacctcaatcccgcagtgaccctcggcctgctcctgtcatgtcagatcagcatattccgagcattaatgtatattattgcccaatgtgttggcgcaatcgtggcaaccgctatacttagcggaatcacttccagcttgacaggcaatagcctgggtagaaatgatttggcggatggcgtcaatagtggccaggggctgggcattgagatcatcggcactcttcagctggtgttgtgcgtccttgccactaccgaccgccgaagacgcgacctgggaggcagtgcgcctctggcaatagggctgtcggtggccctcgggcacctgctggccatcgattacactggctgtgggatcaaccccgctaggtccttcggaagcgcggttatcacgcacaacttctctaaccattggatcttttgggtgggccctttcatcggcggagcactggcagtattaatctacgacttcatcctggctccaagaagctccgacctgacggacagagtgaaggtgtggacaagcggccaagttgaagagtacgatctggatgccgacgatattaattcaagggtggaaatgaaacctaaatag

SEQ ID NO: 259003 - DNA, 1341 bp, Artificial Sequence
  derived and/or modified sequence
ctgaccttgcactctttaacttgttatgaagatcttgtgacctttttacaacagtccatccatcagtttgaagtggggccttacggatgcatcctgctgacactgtcagctatcctctctagatccactgaactgatcagacaggacttcgacgtaccaacatcccatttaattggcgcacacggctactgcacacaagagctggtcaaccttctactaactggcaaggctgtctctaacgtgttcaatgatgtggtggagctagacagcggagatgggaacataacactactccgagggatcgctgcccggagcgacataggctttttgtctctattcgaacactacaatatgtgccaggtaggctgcttcttaaaaacccccaggttccccatttgggttgtgtgctctgagagtcacttcagcatcttgttctctttgcagcccggcctgctgcgggactggcgcacagagcgactgttcgacctttattattatgacggcttggctaaccagcaagaacagattaggttaaccatcgatacgactcagaccatttctgaagacacagataatgacctcgtgccaccgctggaactatgtatcagaactaatatcggatccgctctcggcttcaaatacccagttggcaataaccaaacagcagtgcaagataacgtaaaggttagtctggcctttggcctatcgattgcgacgctggcgcagtctgttggtcacatctccggcgcccacttgaacccggcagttactttggggctgctcctttcatgccagatttccatcttcagagccttgatgtacatcatcgctcagtgcgttggagctattgtggccacggccatcctgtccggcataacatcctctctgacaggcaacagccttggcagaaatgatctggctgacggtgttaactcaggacagggactcggcattgaaatcataggcaccctgcagctggtactgtgtgtgctggccactacagacagaaggagacgcgatcttgggggctcagccccactcgctattggtttgagtgtcgcattgggacatttgctggcgatcgattacaccggttgcggaattaaccccgctagatctttcggaagcgctgtaattactcacaactttagcaaccactggatattttgggtggggccctttatcggtggtgccctggctgtcttgatatacgactttatattggccccgcgaagtagtgacctgaccgatagagtgaaggtgtggacaagcgggcaggtcgaagagtatgatctcgatgccgacgacatcaactctagagtggaaatgaagcccaagtag

SEQ ID NO: 259004 - DNA, 1341 bp, Artificial Sequence
  derived and/or modified sequence
ctgactctccactctctcacgtgttacgaggacctggtcaccttcctccagcagtctattcaccaatttgaagtcggcccctacggttgcattttactcacattatctgccatcctgtcgagatccaccgagcttatccgccaggactttgacgtgcccacgagccatcttattggagcacacggatattgtacccaagaactcgtgaacctgctcctaaccggaaaggcagttagcaatgtttttaatgacgtggtagagctcgactcaggggacgggaacatcaccttactaaggggcatagctgcgcggtcagacattgggtttctcagcctcttcgaacactataacatgtgccaagtagggtgttttttgaaaacgccccgatttccaatatgggttgtctgctctgaatcacatttcagtatcttattctcactgcagccaggactgctgcgagactggcgcaccgaacgactgtttgatctttactattacgacggccttgcgaatcagcaggaacagatccgacttactatcgatactacacagaccatctccgaggacaccgacaatgatctcgtgcctccattagagctgtgtattcgcaccaacatcggttcagccctgggattcaagtaccccgtgggaaacaaccagaccgcagtacaggacaacgtgaaagtatccctggccttcgggctttccattgccaccttagcacaatccgtcggacacatcagcggcgctcacctaaatcccgcagttaccctcggcctactcctttcctgccagatttcgattttccgggcattgatgtacattatcgcacagtgcgtcggagcgatagtcgctaccgcaatcctgagcgggatcacaagctctttaaccggcaacagcctggggaggaatgatcttgcggatggagtcaactctgggcaggggctcggtatcgaaatcattgggactcttcagctcgtgctctgtgttctcgcaacaactgatcggcgtagacgagatttggggggaagtgcccctttagccatcgggctcagcgtggctctgggtcaccttttggccatcgattataccggctgcggaatcaatcctgcacgaagtttcgggtcagccgtaatcacacataattttagcaatcactggatcttttgggttggcccctttattggcggcgcattagcggtgttgatctatgattttatcctggcacccagatccagcgacttgaccgacagagtgaaagtgtggacatcaggacaagtggaggagtacgatctcgacgctgatgatattaattccagagttgaaatgaagcccaagtag

SEQ ID NO: 259005 - DNA, 1524 bp, Artificial Sequence
  derived and/or modified sequence
cttacgcttcacagtttgacctgctatgaggacctggtgacttttcttcaacaaagcattcatcagtttgaagtgggcccctatggctgcatcctgctcaccctttctgccatcctgtccaggtctacagagctcatccgccaggactttgatgtccccaccagccacctgattggagcacatggctactgtacacaggaacttgtcaatctgctcctgactgggaaagctgtgtccaacgttttcaacgatgtggttgagctggattctggggatgggaacatcacacttctcagaggcattgctgcacgcagtgatattggcttcttatctctctttgagcattacaacatgtgccaggttggctgcttcctgaagaccccgaggttccccatctgggtggtttgcagtgagagccacttcagcatcctctttagcctgcagccggggctcctgcgtgactggaggactgagaggctctttgacttgtactactacgatggcctggccaaccagcaggagcagatccggctgaccattgacaccacccaaaccatctctgaggacacagacaacgaccttgtcccacccctcgagctctgcatcagaaccaacatcggttctgccctgggcttcaaatacccggtggggaacaaccagacggcggtccaggacaacgtgaaggtgtcgctggccttcgggctgagcatcgccacgctggcgcagagtgtgggccacatcagcggcgcccacctcaacccggctgtcacactggggctgctgctcagctgccagatcagcatcttccgtgccctcatgtacatcatcgcccagtgcgtgggggccatcgtcgccaccgccatcctctcaggcatcacctcctccctgactgggaactcgcttggccgcaatgacctggctgatggtgtgaactcgggccagggcctgggcatcgagatcatcgggaccctccagctggtgctatgcgtgctggctactaccgaccggaggcgccgtgaccttggtggctcagccccccttgccatcggcctctctgtagcccttggacacctcctggctattgactacactggctgtgggattaaccctgctcggtcctttggctccgcggtgatcacacacaacttcagcaaccactggattttctgggtggggccattcatcgggggagccctggctgtactcatctacgacttcatcctggccccacgcagcagtgacctcacagaccgcgtgaaggtgtggaccagcggccaggtggaggagtatgacctggatgccgacgacatcaactccagggtggagatgaagcccaaatagaaggggtctggcccgggcatccacgtagggggcaggggcaggggcgggcggagggaggggaggggtgaaatccatactgtagacactctgacaagctggccaaagtcacttccccaagatctgccagacctgcatggtcaagcctcttatgggggtgtttctatctctttctttctctttctg

SEQ ID NO: 259006 - DNA, 1341 bp, Artificial Sequence
  derived and/or modified sequence
ctgaccctgcacagcctgacctgctacgaggacctggtgaccttcctgcagcagagcatccaccagttcgaggtgggcccctacggctgcatcctgctgaccctgagcgccatcctgagcagaagcaccgagctgatcagacaggacttcgacgtgcccaccagccacctgatcggcgcccacggctactgcacccaggagctggtgaacctgctgctgaccggcaaggccgtgagcaacgtgttcaacgacgtggtggagctggacagcggcgacggcaacatcaccctgctgagaggcatcgccgccagaagcgacatcggcttcctgagcctgttcgagcactacaacatgtgccaggtgggctgcttcctgaagacccccagattccccatctgggtggtgtgcagcgagagccacttcagcatcctgttcagcctgcagcccggcctgctgagagactggagaaccgagagactgttcgacctgtactactacgacggcctggccaaccagcaggagcagatcagactgaccatcgacaccacccagaccatcagcgaggacaccgacaacgacctggtgccccccctggagctgtgcatcagaaccaacatcggcagcgccctgggcttcaagtaccccgtgggcaacaaccagaccgccgtgcaggacaacgtgaaggtgagcctggccttcggcctgagcatcgccaccctggcccagagcgtgggccacatcagcggcgcccacctgaaccccgccgtgaccctgggcctgctgctgagctgccagatcagcatcttcagagccctgatgtacatcatcgcccagtgcgtgggcgccatcgtggccaccgccatcctgagcggcatcaccagcagcctgaccggcaacagcctgggcagaaacgacctggccgacggcgtgaacagcggccagggcctgggcatcgagatcatcggcaccctgcagctggtgctgtgcgtgctggccaccaccgacagaagaagaagagacctgggcggcagcgcccccctggccatcggcctgagcgtggccctgggccacctgctggccatcgactacaccggctgcggcatcaaccccgccagaagcttcggcagcgccgtgatcacccacaacttcagcaaccactggatcttctgggtgggccccttcatcggcggcgccctggccgtgctgatctacgacttcatcctggcccccagaagcagcgacctgaccgacagagtgaaggtgtggaccagcggccaggtggaggagtacgacctggacgccgacgacatcaacagcagagtggagatgaagcccaagtag

SEQ ID NO: 259007 - DNA, 1341 bp, Artificial Sequence
  derived and/or modified sequence
ctgacactgcatagcttgacctgctatgaggatctggtgacttttcttcagcaatccatccatcagttcgaggtgggcccatacgggtgcatcctgctgacactttcagccatactttctcgatcaaccgaactgattcgacaggactttgatgtgccaaccagccacctgatcggcgcccatgggtactgcactcaagagctcgtaaatttgttgttgaccgggaaggctgtttcgaatgtctttaacgatgtggtagaacttgatagcggcgacggaaacatcacgcttctcaggggcatagccgctcgctccgacattggatttttatcactgtttgaacattacaacatgtgccaggtcggctgctttctcaagacgccgcgctttccaatctgggtggtgtgtagcgaaagtcatttctctatcctgttctccctccagcctggactcttgcgggactggaggactgagcggctgtttgatctatattactacgacggacttgcaaaccagcaggagcagattcgattgacaattgacaccacgcaaaccatctccgaggacaccgataatgatttggtccctcctctggagctttgtataagaactaacataggttctgcacttggattcaagtacccagttgggaacaaccaaactgccgtccaggataacgtgaaagtgagcctggcattcgggctgtctattgctacgcttgcccagtctgtcggacacatcagtggcgctcacctcaacccagctgttacactgggactactcctgagctgtcagatatccatttttcgagccctgatgtacatcatagcccagtgcgtaggggccatcgtcgccactgcaattctctctggcattacatccagcttaactggaaattcccttggaagaaatgacctcgctgacggcgtgaactcagggcagggcctgggcatcgagatcatcggcaccctgcagctggtcttgtgcgtactcgccactactgatcgtaggcggcgagacctcggaggctctgcacccttagctataggcctgagcgtggctctggggcacctgctggcaatagactacacgggctgcggcataaaccctgcaaggtccttcggatctgccgttatcacccataacttcagcaatcattggatcttttgggtgggaccattcattggaggggcacttgctgtgttgatctacgacttcatcttggctcccaggtcttccgacctgactgaccgggtcaaggtctggaccagcggacaggtcgaggaatatgacttggacgcggacgacatcaattcacgggtggagatgaagcctaagtag

SEQ ID NO: 259008 - DNA, 1341 bp, Artificial Sequence
  derived and/or modified sequence
ctgaccctgcacagcctgacctgctatgaggacctggtgaccttcctgcagcagagcatccaccagtttgaggtgggcccctacggctgcatcctgctgaccctgagcgccatcctgagccgcagcacagagctgatccggcaggactttgatgtgcccaccagccacctgattggagcccacggctactgcacccaggagctggtgaacctgctgctgaccgggaaggctgtgtccaatgtgttcaatgatgtggtggagctggacagcggagatggcaacatcaccctgctgcggggcattgctgcccggagtgacatcggcttcctgagcctgtttgagcactacaacatgtgccaggtgggctgcttcctgaagaccccccgcttccccatctgggtggtgtgcagcgagagccacttcagcatcctcttcagcctgcagcccggcctgctgcgggactggaggacagagcggctgtttgacctgtactactatgatggcctggccaaccagcaggagcagatccggctgaccatcgacaccacccagaccatcagcgaggacacagacaatgacctggtgccccccctggagctgtgcatccgcaccaacatcggcagcgccctgggcttcaagtaccctgtgggcaacaaccagacagctgtgcaggacaacgtgaaggtgtccctggccttcggcctgagcatcgccaccctggcccagagcgtgggccacatcagcggggcccacctgaacccagctgtgaccctgggcctgctgctgagctgccagatcagcatcttccgggccctgatgtacatcatcgcccagtgtgtgggcgccatcgtggccacagccatcctgagcggcatcaccagcagcctgactggaaacagcctgggcagaaatgacctggctgatggagtgaacagcggccagggcctgggcatcgagatcatcggcaccctgcagctggtgctgtgtgtgctggccaccacagacagaagaagaagagacctgggcggcagcgcccccctggccatcggcctgtctgtggccctgggccacctgctggccatcgactacacaggctgcggcatcaacccagcccggagctttggcagcgctgtgatcacccacaacttcagcaaccactggatcttctgggtgggccccttcatcggcggggccctggccgtgctgatctatgacttcatcctggcccccaggagcagtgacctgacagacagagtgaaggtgtggaccagcggccaggtggaggagtatgacctggatgctgatgacatcaacagccgggtggagatgaagcccaagtag

SEQ ID NO: 259009 - DNA, 1341 bp, Artificial Sequence
  derived and/or modified sequence
ctgaccctgcacagcctgacctgctacgaggacctggtgaccttcctgcaacagtcaatacaccagttcgaggttgggccttacggctgtatcttgttgaccctgtctgccatactgagcaggtctactgaactgattaggcaggatttcgacgtaccaaccagccacttgatcggtgcacatggctattgtacacaggagctggtgaatctgctgctgacgggcaaggccgtatctaatgtttttaatgacgtggtggaattggacagtggtgatgggaacatcacactccttcgagggatagccgctcgctctgacattgggttcctatccctgtttgagcattacaacatgtgccaggtcgggtgctttcttaagacccctagatttcccatctgggtcgtatgtagtgagtcacatttcagtatactcttttccctgcagcctgggctattgcgagactggcgcaccgaacgtcttttcgacctttactactatgacggactcgctaaccagcaggaacagatccggctcactattgacacgacccagacaataagcgaggacacagataatgacttggtgccgcctctggaactatgtatccgcacaaatataggaagcgccctgggtttcaaataccctgtcggaaacaaccaaaccgccgtccaggacaacgtgaaagtctctcttgctttcgggctctccattgccaccctcgctcagagtgtggggcacataagcggagcccacctaaaccccgccgtaactttgggactgctgctgtcctgccagattagtatctttagggcgctcatgtatatcatcgcccagtgcgtgggcgccattgtagccactgctattctgagtgggataacttcatccctcacaggcaacagtctgggaaggaacgacttggccgatggagtgaactccggccagggcttgggtatcgaaatcatcggaacactgcagctagtgctgtgtgtcttggccactacagaccggaggaggcgcgatctgggagggtccgctccactcgccattgggctttcagtggctctcggccatctgctggccatcgattacaccggctgtggaataaaccctgccaggagctttggttcagccgtgattacccacaattttagtaatcattggattttctgggtggggcccttcatcggcggagccctggccgtcctgatttatgactttatactcgccccaaggagcagtgatctgaccgatcgagtcaaagtgtggactagcggccaagtcgaggagtacgacctagatgctgacgacatcaattcccgggttgaaatgaaacctaagtag

SEQ ID NO: 259010 - DNA, 687 bp, Artificial Sequence
  derived and/or modified sequence
atgtatatcatcgcgcaatgtgtgggcgctattgtcgcaacagctattctctccggaatcaccagctccttgactggcaatagtctcggaaggaatgaccttgcggacggcgtcaactccggccagggcctgggaatcgagattattggcaccctgcagctggttctctgtgtgttggctacaaccgatcggagacgcagggatctgggcgggtctgcacccctggctattggtctcagcgtggccctgggacacttgctagccatcgactataccggatgtgggatcaacccagccaggtcgttcggctcagcagttattacgcataatttcagcaatcattggattttctgggttggaccatttattggtggtgccctggcggttcttatttatgatttcattctcgcgccacggtcttctgatctgacggaccgggtcaaggtatggactagcggccaagtggaggaatacgacctggatgcagatgatattaatagccgtagtttcttgggcacaaaaatctatcagtttacacactcactagaagtggtggaggaggtgaaagaacgcgatccccctgcttctcgtccaagtgaacatgatggcaggtgcgctcgcaaatcaccactggctcctaagctactcactgatagtcccgctcaggttcccgggatactcccctag

SEQ ID NO: 259011 - DNA, 810 bp, Artificial Sequence
  derived and/or modified sequence
atggcatctgagtttaagaagaagttgttctggcgcgctgtggtcgctgagttcttagctaccaccctgtttgtatttatctcaatcggaagcgcactagggtttaagtaccctgtcggcaataaccaaaccgcggtccaggataatgtgaaggtttccttagctttcgggctcagcatagcaactctcgctcagtctgtggggcatatttctggtgctcacttgaacccagctgtgaccctgggcttactgctgtcttgccaaatctctattttccgtgctttaatgtacattattgcccagtgtgttggggctattgtcgccaccgcaatcctctcaggcatcaccagtagcctaaccggaaacagcctcggacgcaatgacctcgccgatggggtgaacagtggtcagggcctgggtattgagattatcgggacactgcagttggtgttgtgcgtgctagcaaccacagacagaagacgcagggacttgggcggcagtgcgccacttgccataggtcttagcgtcgcgctggggcacctattggccatcgactatactggatgcggaattaatcccgcccgcagtttcggctctgcagtaatcacccacaatttcagtaaccactggatcttctgggtggggcccttcatagggggcgctctggcggtgctgatatatgactttatccttgcacctagatcaagcgacttaacggatagagtgaaggtttggacatcaggtcaggtagaagagtatgacctggatgctgacgacatcaactcccgcgtggaaatgaaacccaagtag

SEQ ID NO: 259012 - DNA, 765 bp, Artificial Sequence
  derived and/or modified sequence
atggcttccgaattcaaaaaaaaacttttttggcgcgccgtcgtggctgaatttctcgccactacgctgttcgtattcatcagtattggctcagcactcgggttcaaatatccggtaggcaataaccagacagcagtccaggacaatgttaaggtatctctcgccttcgggctttccatcgctaccctcgcccaatctgttggccatatatcaggagctcatctgaatcctgcagtgacactaggactgctgctgtcttgccagatctcaattgtggccacagcaatcctttctggcattacaagctctctgacggggaactccttgggccggaacgatttggcggacggtgtaaacagtggccaaggactcgggatagagattattggaactctgcaacttgtgctctgcgtgctcgccacaaccgacagacggcggagagacctggggggatctgcccctctggcaattgggctctcggtcgctctcggacacctcttggctattgactacacaggttgtggcattaacccagcccggtccttcgggagtgcggtaataacacataacttctcaaatcactggatcttttgggtgggccccttcatcgggggagcattggccgtcctgatctacgacttcatcctcgctccaaggtcttcggacctcaccgatagggtgaaggtctggacttccgggcaagttgaggagtacgacctagacgccgatgatattaactcccgtgtcgaaatgaaaccaaaatag

SEQ ID NO: 259013 - DNA, 990 bp, Artificial Sequence
  derived and/or modified sequence
atgtgtcaggtgggctgctttctcaaaactccccggttccccatctgggtggtgtgctctgagtctcatttttctatcctcttctctctgcaaccgggattactgcgcgactggagaaccgagaggctctttgatctgtactattatgacgggctggcaaaccagcaagagcagataagacttacaatcgataccactcaaacaatatccgaagacaccgataacgacttggtgccccccctcgagctatgcatcagaactaacataggctccgccctgggtttcaaatatcccgtcgggaataaccaaaccgctgttcaagataacgttaaggtaagcctggcctttgggctgtctatcgcgacgctggctcaatctgtgggccatatttccggagctcacttaaatcctgccgtaacactgggacttctgctgtcctgtcaaatctctattttccgcgctctgatgtacatcatagcacagtgtgtgggcgcgatcgtcgcgaccgctatcctgtccggaatcaccagctcgctgaccggtaattctttgggtcggaatgaccttgccgacggagtgaactccggtcaggggttaggtatcgaaattatcggcacactccagctcgtcctatgtgtgctggcaaccacagaccggcgacgaagagatctggggggatccgctccactcgccatcggactcagcgttgcactgggacacttgctggccattgactatactgggtgcgggataaaccctgcgcgctctttcggaagcgcagtgattacccacaatttcagcaatcactggatattctgggtggggccgtttattgggggggctcttgccgtgctgatctacgactttattttggcgccccggtcatctgatctaaccgatcgagttaaggtttggaccagcggccaggtcgaagaatacgatctcgatgcggacgacatcaattcaagggtcgagatgaagcccaaatag

SEQ ID NO: 259014 - DNA, 687 bp, Artificial Sequence
  derived and/or modified sequence
atgtacatcatcgcccagtgtgtgggcgccatcgtggccacagccatcctgagcggcatcaccagcagcctgactggaaacagcctgggcagaaatgacctggctgatggagtgaacagcggccagggcctgggcatcgagatcatcggcaccctgcagctggtgctgtgtgtgctggccaccacagacagaagaagaagagacctgggcggcagcgcccccctggccatcggcctgtctgtggccctgggccacctgctggccatcgactacacaggctgcggcatcaacccagcccggagctttggcagcgctgtgatcacccacaacttcagcaaccactggatcttctgggtgggccccttcatcggcggggccctggccgtgctgatctatgacttcatcctggcccccaggagcagtgacctgacagacagagtgaaggtgtggaccagcggccaggtggaggagtatgacctggatgctgatgacatcaacagccgctccttcctgggcaccaagatctaccagttcacccacagcctggaggtggtggaggaggtgaaggagcgggaccccccagccagccggcccagcgagcatgatggccgctgtgccaggaagagccccctggcccccaagctgctgacagacagccctgcccaggtgcccggcatcctgccctag

SEQ ID NO: 259015 - DNA, 810 bp, Artificial Sequence
  derived and/or modified sequence
atggccagcgagttcaagaagaagctgttctggagggctgtggtggccgagttcctggccaccaccctgtttgtgttcatcagcatcggcagcgccctgggcttcaagtaccctgtgggcaacaaccagacagctgtgcaggacaacgtgaaggtgtccctggccttcggcctgagcatcgccaccctggcccagagcgtgggccacatcagcggggcccacctgaacccagctgtgaccctgggcctgctgctgagctgccagatcagcatcttccgggccctgatgtacatcatcgcccagtgtgtgggcgccatcgtggccacagccatcctgagcggcatcaccagcagcctgaccggcaacagcctgggcagaaatgacctggctgatggagtgaacagcggccagggcctgggcatcgagatcatcggcaccctgcagctggtgctgtgtgtgctggccaccacagacagaagaagaagagacctgggcggcagcgcccccctggccatcggcctgtctgtggccctgggccacctgctggccatcgactacacaggctgcggcatcaacccagcccggagctttggatctgctgtgatcacccacaacttcagcaaccactggatcttctgggtgggccccttcatcggcggggccctggccgtgctgatctatgacttcatcctggcccccaggagcagtgacctgacagacagagtgaaggtgtggaccagcggccaggtggaggagtatgacctggatgctgatgacatcaacagccgggtggagatgaagcccaagtag

SEQ ID NO: 259016 - DNA, 765 bp, Artificial Sequence
  derived and/or modified sequence
atggccagcgagttcaagaagaagctgttctggagggctgtggtggccgagttcctggccaccaccctgtttgtgttcatcagcatcggcagcgccctgggcttcaagtaccctgtgggcaacaaccagacagctgtgcaggacaacgtgaaggtgtccctggccttcggcctgagcatcgccaccctggcccagagcgtgggccacatcagcggggcccacctgaacccagctgtgaccctgggcctgctgctgagctgccagatcagcatcgtggccacagccatcctgagcggcatcaccagcagcctgactggaaacagcctgggcagaaatgacctggctgatggagtgaacagcggccagggcctgggcatcgagatcatcggcaccctgcagctggtgctgtgtgtgctggccaccacagacagaagaagaagagacctgggcggcagcgcccccctggccatcggcctgtctgtggccctgggccacctgctggccatcgactacacaggctgcggcatcaacccagcccggagctttggcagcgctgtgatcacccacaacttcagcaaccactggatcttctgggtgggccccttcatcggcggggccctggccgtgctgatctatgacttcatcctggcccccaggagcagtgacctgacagacagagtgaaggtgtggaccagcggccaggtggaggagtatgacctggatgctgatgacatcaacagccgggtggagatgaagcccaagtag

SEQ ID NO: 259017 - DNA, 990 bp, Artificial Sequence
  derived and/or modified sequence
atgtgccaggtgggctgcttcctgaagaccccccgcttccccatctgggtggtgtgcagcgagagccacttcagcatcctcttcagcctgcagcccggcctgctgcgggactggaggacagagcggctgtttgacctgtactactatgatggcctggccaaccagcaggagcagatccggctgaccatcgacaccacccagaccatcagcgaggacacagacaatgacctggtgccccccctggagctgtgcatccgcaccaacatcggcagcgccctgggcttcaagtaccctgtgggcaacaaccagacagctgtgcaggacaacgtgaaggtgtccctggccttcggcctgagcatcgccaccctggcccagagcgtgggccacatcagcggggcccacctgaacccagctgtgaccctgggcctgctgctgagctgccagatcagcatcttccgggccctgatgtacatcatcgcccagtgtgtgggcgccatcgtggccacagccatcctgagcggcatcaccagcagcctgaccggcaacagcctgggcagaaatgacctggctgatggagtgaacagcggccagggcctgggcatcgagatcatcggcaccctgcagctggtgctgtgtgtgctggccaccacagacagaagaagaagagacctgggcggcagcgcccccctggccatcggcctgtctgtggccctgggccacctgctggccatcgactacacaggctgcggcatcaacccagcccggagctttggatctgctgtgatcacccacaacttcagcaaccactggatcttctgggtgggccccttcatcggcggggccctggccgtgctgatctatgacttcatcctggcccccaggagcagtgacctgacagacagagtgaaggtgtggaccagcggccaggtggaggagtatgacctggatgctgatgacatcaacagccgggtggagatgaagcccaagtag

SEQ ID NO: 259018 - DNA, 687 bp, Artificial Sequence
  derived and/or modified sequence
atgtacatcatcgcccagtgcgtgggcgccatcgtggccaccgccattctgagtggaatcacgagtagcctcaccggcaactcgctcggaaggaacgacctggccgacggcgtcaattccggtcagggcctcggaattgaaataatcggcacccttcaattggtactgtgcgtacttgcaacaaccgatagaaggcgcagagacttaggagggagtgcccctttagcgatagggttaagtgtcgcgctggggcaccttctggccattgactacactggctgcgggattaacccggcgagatccttcgggtctgccgtgatcacccataatttctccaatcactggatcttttgggtgggtcccttcataggtggagctcttgcagttttgatttatgatttcatccttgccccgaggtcctccgatctgaccgaccgggttaaggtctggactagtgggcaggttgaggagtacgatttggacgcagacgatataaacagtagaagtttccttggcactaaaatctaccaatttacccacagtttggaggtcgtggaagaggtcaaagagcgtgatcctcccgcgtcacgtccgtcggagcatgacggccgatgcgcacgcaagtctcctctagccccgaagctgttaaccgactcccccgcacaggtacctggaattctgccttag

SEQ ID NO: 259019 - DNA, 810 bp, Artificial Sequence
  derived and/or modified sequence
atggccagcgagttcaagaagaagctgttctggcgggccgtggtggccgaatttctggccacaaccctctttgtgtttatctctatcgggagcgcccttggatttaaatatcccgtgggaaacaaccaaaccgcagttcaggataatgtgaaggttagtcttgcattcggcctgtccatcgccactctggcccagtcagtcggccacatttctggtgcgcacttaaatcccgccgtgaccctggggttgctgttatcctgtcagatctcaatctttcgggccttgatgtatattatagcccagtgcgtaggtgcaatagtcgccaccgcaatcttgagcgggatcacaagttctctgaccggaaacagtttgggacggaacgacctggctgacggtgttaatagcggccagggactgggcatagagattattggcaccctgcagctggtcctgtgcgtgttagccaccacggatcgacgacggagagatctcggagggtcagcccctctggccattggcctgtccgtggcactgggccacctcctcgctattgactatacaggctgtggaattaaccctgcacggtcctttgggtccgctgtcatcactcacaacttttctaatcattggattttttgggtggggccctttatcgggggagctttggcagtgcttatttacgatttcattctggcaccgcgttcttccgacttaactgatcgcgtgaaagtttggacctcaggacaggtggaagagtatgatctagacgccgacgatatcaactcgcgggtggaaatgaaaccaaagtag

SEQ ID NO: 259020 - DNA, 765 bp, Artificial Sequence
  derived and/or modified sequence
atggccagcgagttcaagaagaagctgttctggcgggccgtggtggcggagttccttgccactacacttttcgttttcatctctattgggtccgcgcttggctttaaatacccagttggcaataaccagacggccgttcaagacaacgtgaaagtgagcctggcattcgggctgtccatagccaccctagcccagtctgtcggccatatttccggagcccatttaaatcccgcagttacccttggtctactcttgagctgtcagataagcatagttgcaaccgccatcctcagtggtattacaagttccctgacgggcaacagcctcggccggaacgatttggccgatggcgtgaacagtggccagggattaggaattgagattatcggcaccctccagttggttttgtgcgtactggccacaactgacagacgaaggcgtgatcttgggggcagtgcaccgctcgctatagggctgagtgttgcgctcgggcacctgttggccattgattacactggttgtggaatcaatcccgccaggagcttcggttctgcagtcattacccataacttttcaaatcactggattttttgggtgggcccatttattggcggagcattggcagtgctgatatacgacttcatactggctccccgcagcagcgatctgacagatagggtaaaagtatggacctccggacaggtagaggagtacgaccttgatgccgacgatatcaacagccgcgttgaaatgaaaccgaagtag

SEQ ID NO: 259021 - DNA, 990 bp, Artificial Sequence
  derived and/or modified sequence
atgtgccaggtgggctgcttcctgaagaccccccggttccccatctgggtggtttgttctgaaagccacttctctattcttttttcactccagccagggctcctgagggactggcggaccgagcggctgtttgatctgtactattatgatggattggcgaaccagcaggagcagatcaggctcaccatcgataccacccaaaccatttcagaggataccgataatgatttggtaccccctttggagctgtgcatcagaactaatatagggagcgcgctcggcttcaagtatcctgtgggtaacaaccagacagctgtgcaggataacgtgaaggtgtctctggcattcggcctgagcatcgccactcttgcccagtcagttggacatataagtggagctcacttgaatcccgccgtcacactcgggcttctgctcagttgccaaatcagcattttcagggccctcatgtatatcatcgcacaatgtgttggcgctattgtagctactgctattctgtctggtatcacctcatccctgacaggcaattccctgggcaggaacgacctggcagatggggtcaattccgggcaaggccttggcatagagatcatcgggactctgcagttggttctgtgtgtgctggctaccactgatcgacgcagaagggaccttggtggatctgctcccctggccatcggcctgagcgtggctctcgggcacctgctggccatcgactataccggatgcggaatcaatccagcccgcagctttggaagtgccgtaatcacacataacttctctaaccattggattttttgggtcggaccttttattggaggagccctcgcagtgctaatttacgactttatcctggctcctaggtcatcagacctgactgatcgagttaaagtgtggaccagtggacaggtcgaggagtatgacctggacgctgatgacatcaattctcgcgttgagatgaagcctaagtag

SEQ ID NO: 259022 - DNA, 687 bp, Artificial Sequence
  derived and/or modified sequence
atgtatattatcgcccaatgcgtgggcgctatcgtggccactgccattctaagtggtataacctcctcactgactggaaattcccttggcagaaacgatttggcggacggagtgaacagtggtcagggcttgggcatcgaaatcatcggaacactccagctggttctgtgcgttcttgccactactgataggcggcgtagggacctagggggtagcgcacctctagcaatcggcctgagcgtggcactgggccatcttctcgctattgactacactggttgtgggatcaaccctgctcggtcctttggatcagccgttataacacacaatttcagtaaccattggattttttgggtgggaccgtttatcggcggagccctggcggtactgatctacgactttattttagccccaaggtcatctgatctaaccgatcgcgtgaaagtgtggaccagtggccaggtggaagagtacgaccttgacgccgatgatatcaactcccggagctttttgggtaccaaaatctatcagtttacacacagtctggaagtggtggaagaggtgaaggaaagggatcctcccgcatccaggccatctgagcacgatggtcggtgtgccagaaagtcacctcttgccccaaagctgctgaccgatagccccgcacaagtaccaggtattctgccatag

SEQ ID NO: 259023 - DNA, 810 bp, Artificial Sequence
  derived and/or modified sequence
atggccagtgagtttaaaaagaagctgttctggcgcgctgtggtggctgaattcctagcgactactctgttcgtatttatctctatcgggagcgcactcggctttaaataccccgttgggaataatcagactgctgtgcaggataatgtgaaagtaagtctggcgtttggactgagcatcgctacgctggcccagagcgtgggccacatatctggtgctcatctcaaccctgccgtcacactggggctgctcttgtcatgtcagatttccatcttccgagcactgatgtatataatcgcacagtgtgtcggggctatcgtggccacagcgatactaagtggaattacttcctcacttactgggaactctctgggtcgaaacgatctcgccgacggcgtcaattccggccagggattggggattgagatcatcggaactttgcagcttgtcttatgtgtgctggccactacagaccgaaggagaagagatctgggcggatctgcacctctagccattggtctgtctgttgcgcttggacacctgctggccatagattacacaggctgcgggataaacccagcaagaagttttggtagcgcggtgattactcataatttctctaaccattggattttttgggtgggaccctttattggaggagcgctcgctgtgctgatctacgacttcatcttggctcctcggagttcggatctcaccgaccgcgtcaaagtctggaccagcggtcaagtggaggagtacgacctcgacgcggacgatatcaactcccgcgtagagatgaaacccaagtag

SEQ ID NO: 259024 - DNA, 765 bp, Artificial Sequence
  derived and/or modified sequence
atggcctctgaatttaagaagaaactgttctggagagccgtcgtggcggaatttttggctaccactttgttcgtttttataagcatcgggtctgccttgggatttaagtatcctgttggaaataatcagaccgcggtgcaggataacgtgaaagtcagtctagcgttcggtctctcaatcgcaacccttgcgcagtctgtcgggcacattagtggggcacacctgaatccagccgtaactttgggacttttactgtcttgtcagatctctattgtggccaccgccatactcagcggcatcacaagctcgctgactggtaattccttggggcgaaacgacttagcagatggtgtaaattccggccagggactgggcattgaaattattggaacactccaactggtcctgtgtgtcctggccaccaccgatcggcgaagacgtgaccttgggggaagcgcgcctctcgctattggactctccgtagcccttgggcatctgctcgccattgactataccggctgcggaattaacccggctcggagctttggatcagctgttataacacacaacttttccaaccactggatcttctgggtcggcccttttataggcggtgccctggctgttctgatttacgacttcatcctcgctcctagatcttctgacctcacagaccgagtgaaagtttggacttccggacaagtagaggagtatgatctggatgctgacgatattaactccagagtggagatgaagccaaaatag

SEQ ID NO: 259025 - DNA, 990 bp, Artificial Sequence
  derived and/or modified sequence
atgtgccaggtcggctgctttctgaaaacacctcgttttcctatttgggttgtgtgttcggaaagccacttcagcattctgttttctctgcaaccaggactcctcagggactggaggactgagcgcctcttcgacttatattactacgacgggctggcaaatcagcaggagcaaatccggctgacgatcgacaccactcaaaccattagcgaggacaccgataatgatctggttccgccactggagctgtgcatccgcaccaacataggatcggccctggggtttaagtatcccgtcgggaataatcagacagcagtccaggacaatgtgaaggtctccctggcttttggcttgtctattgcaactctggctcagtcagtggggcatatttctggcgcacacttgaacccagcagtgactctcggtttgttattaagttgccaaatttctattttcagggcgctgatgtatataatcgcccagtgcgtcggcgctatcgtcgcaaccgccatcctgtccggaatcacttccagtctcacaggtaattctctgggcagaaatgacctggcggacggcgtgaactccggccagggcctgggcattgagattattggtaccctgcagctagtgctgtgtgtgctggccacaactgatcggcgtcgcagagatctcggtggctctgcccctcttgcgattgggctgtctgtcgcattgggacacctgctggcgatcgattatacaggttgtggaatcaatccagcacggtcgttcgggtccgccgttatcacacacaacttctccaatcattggatcttctgggtgggcccattcattggaggggctctggcagtattgatctacgacttcatcctggcccctagaagctcagatctgactgatcgagttaaggtatggacatccggacaggtggaggagtacgatttggatgccgacgatatcaatagccgggtggaaatgaaacctaagtag

SEQ ID NO: 259026 - DNA, 1029 bp, Artificial Sequence
  derived and/or modified sequence
agctctcagagggaattgagcacccggcagcggtctcaggccaagccccctgccagcatggccagcgagttcaagaagaagctcttctggagggcagtggtggccgagttcctggccacgaccctctttgtcttcatcagcatcggttctgccctgggcttcaaatacccggtggggaacaaccagacggcggtccaggacaacgtgaaggtgtcgctggccttcgggctgagcatcgccacgctggcgcagagtgtgggccacatcagcggcgcccacctcaacccggctgtcacactggggctgctgctcagctgccagatcagcatcttccgtgccctcatgtacatcatcgcccagtgcgtgggggccatcgtcgccaccgccatcctctcaggcatcacctcctccctgactgggaactcgcttggccgcaatgacctggctgatggtgtgaactcgggccagggcctgggcatcgagatcatcgggaccctccagctggtgctatgcgtgctggctactaccgaccggaggcgccgtgaccttggtggctcagccccccttgccatcggcctctctgtagcccttggacacctcctggctattgactacactggctgtgggattaaccctgctcggtcctttggctccgcggtgatcacacacaacttcagcaaccactggattttctgggtggggccattcatcgggggagccctggctgtactcatctacgacttcatcctggccccacgcagcagtgacctcacagaccgcgtgaaggtgtggaccagcggccaggtggaggagtatgacctggatgccgacgacatcaactccaggagcttcctggggaccaagatttaccaattcacccactcccttgaagttgtggaggaggtgaaagaaagggacccacctgctagtcgcccctcagagcatgatgggaggtgtgccagaaagtcccccctcgccccaaagttgctcaccgactcacctgcgcaagtgcctgggattctaccgtaa

SEQ ID NO: 259027 - DNA, 2752 bp, Artificial Sequence
  derived and/or modified sequence
ctctcagagggaattgagcacccggcagcggtctcaggccaagccccctgccagcatggccagcgagttcaagaagaagctcttctggagggcagtggtggccgagttcctggccacgaccctctttgtcttcatcagcatcggttctgccctgggcttcaaatacccggtggggaacaaccagacggcggtccaggacaacgtgaaggtgtcgctggccttcgggctgagcatcgccacgctggcgcagagtgtgggccacatcagcggcgcccacctcaacccggctgtcacactggggctgctgctcagctgccagatcagcatcttccgtgccctcatgtacatcatcgcccagtgcgtgggggccatcgtcgccaccgccatcctctcaggcatcacctcctccctgactgggaactcgcttggccgcaatgacctggctgatggtgtgaactcgggccagggcctgggcatcgagatcatcgggaccctccagctggtgctatgcgtgctggctactaccgaccggaggcgccgtgaccttggtggctcagccccccttgccatcggcctctctgtagcccttggacacctcctggctattgactacactggctgtgggattaaccctgctcggtcctttggctccgcggtgatcacacacaacttcagcaaccactggattttctgggtggggccattcatcgggggagccctggctgtactcatctacgacttcatcctggccccacgcagcagtgacctcacagaccgcgtgaaggtgtggaccagcggccaggtggaggagtatgacctggatgccgacgacatcaactccagggtggagatgaagcccaaatagaaggggtctggcccgggcatccacgtagggggcaggggcaggggcgggcggagggaggggaggggtgaaatccatactgtagacactctgacaagctggccaaagtcacttccccaagatctgccagacctgcatggtcaagcctcttatgggggtgtttctatctctttctttctctttctgtttcctggcctcagagcttcctggggaccaagatttaccaattcacccactcccttgaagttgtggaggaggtgaaagaaagggacccacctgctagtcgcccctcagagcatgatgggaggtgtgccagaaagtcccccctcgccccaaagttgctcaccgactcacctgcgcaagtgcctgggattctaccgtaattgctttgtgcctttgggcacggccctccttcttttcctaacatgcaccttgctcccaatggtgcttggagggggaagagatcccaggaggtgcagtggagggggcaagctttgctccttcagttctgcttgctcccaagcccctgacccgctcggacttactgcctgaccttggaatcgtccctatatcagggcctgagtgacctccttctgcaaagtggcagggaccggcagagctctacaggcctgcagcccctaagtgcaaacacagcatgggtccagaagacgtggtctagaccagggctgctctttccacttgccctgtgttctttccccaggggcatgactgtcgccacacgcctctgtgtacatgtgtgcagagcagacaggctacaaagcagagatcgacagacagccaggtagttggaactttctgttccctatggagaggcttccctacacagggcctgctattgcagaatgaagccatttagagggtgaaggagaaatacccatgttacttctctgagttttagttggtctttccatctatcactgcattatcttgctcattcttcagttctctactccctcttgtcagtgtagacacaggtcaccattatgctggtgtatgtttatcaaagagcacttgagctgtctgaagcccaaagcctgaggacagaaagaccctgatgcaggtcagcccatggaggcagatgcccttgctgggcctgggggttttccaagccctcagctggtcctgaccaggatggagcaagctcttcccttgctcatgagctcctgatcagaggcatttgagcagctgaataacctgcacaggcttgctgtatgacccctggccacagccttccctctgcattgacctggaggggagaggtcagccttgacctaatgaggtagctatagttgcagcccaaggacagttcagagatcaggatcagctttgaaggctggattctatctacataagtcctttcaattccaccagggccagagcagctccaccactgtgcacttagccatgatggcaacagaaaccaagagacacaattacgcaggtatttagaagcagagggacaaccagaaggcccttaactatcaccagtgcatcacatctgcacactctcttctccattccctagcaggaacttctagctcatttaacagataaagaaactgaggcccacggtttcagctagacaatgatttggccaggcctagtaaccaaggccctgtctctggctactccctggaccacgaggctgattcctctcatttccagcttctcagtttctgcctgggcaatggccaggggccaggagtggggagagttgtgatggaggggagaggggtcacacccaccccctgcctggttctaggctgctgcacaccaaggccctgcatctgtctgctctgcatatatgtctctttggagttggaatttcattatatgttaagaaaataaaggaaaatgacttgtaaggtc

SEQ ID NO: 259028 - DNA, 2652 bp, Artificial Sequence
  derived and/or modified sequence
atggccagcgagttcaagaagaagctcttctggagggcagtggtggccgagttcctggccacgaccctctttgtcttcatcagcatcggttctgccctgggcttcaaatacccggtggggaacaaccagacggcggtccaggacaacgtgaaggtgtcgctggccttcgggctgagcatcgccacgctggcgcagagtgtgggccacatcagcggcgcccacctcaacccggctgtcacactggggctgctgctcagctgccagatcagcatcgtcgccaccgccatcctctcaggcatcacctcctccctgactgggaactcgcttggccgcaatgacctggctgatggtgtgaactcgggccagggcctgggcatcgagatcatcgggaccctccagctggtgctatgcgtgctggctactaccgaccggaggcgccgtgaccttggtggctcagccccccttgccatcggcctctctgtagcccttggacacctcctggctattgactacactggctgtgggattaaccctgctcggtcctttggctccgcggtgatcacacacaacttcagcaaccactggattttctgggtggggccattcatcgggggagccctggctgtactcatctacgacttcatcctggccccacgcagcagtgacctcacagaccgcgtgaaggtgtggaccagcggccaggtggaggagtatgacctggatgccgacgacatcaactccagggtggagatgaagcccaaatagaaggggtctggcccgggcatccacgtagggggcaggggcaggggcgggcggagggaggggaggggtgaaatccatactgtagacactctgacaagctggccaaagtcacttccccaagatctgccagacctgcatggtcaagcctcttatgggggtgtttctatctctttctttctctttctgtttcctggcctcagagcttcctggggaccaagatttaccaattcacccactcccttgaagttgtggaggaggtgaaagaaagggacccacctgctagtcgcccctcagagcatgatgggaggtgtgccagaaagtcccccctcgccccaaagttgctcaccgactcacctgcgcaagtgcctgggattctaccgtaattgctttgtgcctttgggcacggccctccttcttttcctaacatgcaccttgctcccaatggtgcttggagggggaagagatcccaggaggtgcagtggagggggcaagctttgctccttcagttctgcttgctcccaagcccctgacccgctcggacttactgcctgaccttggaatcgtccctatatcagggcctgagtgacctccttctgcaaagtggcagggaccggcagagctctacaggcctgcagcccctaagtgcaaacacagcatgggtccagaagacgtggtctagaccagggctgctctttccacttgccctgtgttctttccccaggggcatgactgtcgccacacgcctctgtgtacatgtgtgcagagcagacaggctacaaagcagagatcgacagacagccaggtagttggaactttctgttccctatggagaggcttccctacacagggcctgctattgcagaatgaagccatttagagggtgaaggagaaatacccatgttacttctctgagttttagttggtctttccatctatcactgcattatcttgctcattcttcagttctctactccctcttgtcagtgtagacacaggtcaccattatgctggtgtatgtttatcaaagagcacttgagctgtctgaagcccaaagcctgaggacagaaagaccctgatgcaggtcagcccatggaggcagatgcccttgctgggcctgggggttttccaagccctcagctggtcctgaccaggatggagcaagctcttcccttgctcatgagctcctgatcagaggcatttgagcagctgaataacctgcacaggcttgctgtatgacccctggccacagccttccctctgcattgacctggaggggagaggtcagccttgacctaatgaggtagctatagttgcagcccaaggacagttcagagatcaggatcagctttgaaggctggattctatctacataagtcctttcaattccaccagggccagagcagctccaccactgtgcacttagccatgatggcaacagaaaccaagagacacaattacgcaggtatttagaagcagagggacaaccagaaggcccttaactatcaccagtgcatcacatctgcacactctcttctccattccctagcaggaacttctagctcatttaacagataaagaaactgaggcccacggtttcagctagacaatgatttggccaggcctagtaaccaaggccctgtctctggctactccctggaccacgaggctgattcctctcatttccagcttctcagtttctgcctgggcaatggccaggggccaggagtggggagagttgtgatggaggggagaggggtcacacccaccccctgcctggttctaggctgctgcacaccaaggccctgcatctgtctgctctgcatatatgtctctttggagttggaatttcattatatgttaagaaaataaaggaaaatgacttgtaaggtc

SEQ ID NO: 259029 - DNA, 687 bp, Artificial Sequence
  derived and/or modified sequence
atgtacatcatcgcccagtgcgtgggcgccatcgtggccaccgccatcctgagcggcatcaccagcagcctgaccggcaacagcctgggcagaaacgacctggccgacggcgtgaacagcggccagggcctgggcatcgagatcatcggcaccctgcagctggtgctgtgcgtgctggccaccaccgacagaagaagaagagacctgggcggcagcgcccccctggccatcggcctgagcgtggccctgggccacctgctggccatcgactacaccggctgcggcatcaaccccgccagaagcttcggcagcgccgtgatcacccacaacttcagcaaccactggatcttctgggtgggccccttcatcggcggcgccctggccgtgctgatctacgacttcatcctggcccccagaagcagcgacctgaccgacagagtgaaggtgtggaccagcggccaggtggaggagtacgacctggacgccgacgacatcaacagcagaagcttcctgggcaccaagatctaccagttcacccacagcctggaggtggtggaggaggtgaaggagagagacccccccgccagcagacccagcgagcacgacggcagatgcgccagaaagagccccctggcccccaagctgctgaccgacagccccgcccaggtgcccggcatcctgccctag

SEQ ID NO: 259030 - DNA, 810 bp, Artificial Sequence
  derived and/or modified sequence
atggccagcgagttcaagaagaagctgttctggagagccgtggtggccgagttcctggccaccaccctgttcgtgttcatcagcatcggcagcgccctgggcttcaagtaccccgtgggcaacaaccagaccgccgtgcaggacaacgtgaaggtgagcctggccttcggcctgagcatcgccaccctggcccagagcgtgggccacatcagcggcgcccacctgaaccccgccgtgaccctgggcctgctgctgagctgccagatcagcatcttcagagccctgatgtacatcatcgcccagtgcgtgggcgccatcgtggccaccgccatcctgagcggcatcaccagcagcctgaccggcaacagcctgggcagaaacgacctggccgacggcgtgaacagcggccagggcctgggcatcgagatcatcggcaccctgcagctggtgctgtgcgtgctggccaccaccgacagaagaagaagagacctgggcggcagcgcccccctggccatcggcctgagcgtggccctgggccacctgctggccatcgactacaccggctgcggcatcaaccccgccagaagcttcggcagcgccgtgatcacccacaacttcagcaaccactggatcttctgggtgggccccttcatcggcggcgccctggccgtgctgatctacgacttcatcctggcccccagaagcagcgacctgaccgacagagtgaaggtgtggaccagcggccaggtggaggagtacgacctggacgccgacgacatcaacagcagagtggagatgaagcccaagtag

SEQ ID NO: 259031 - DNA, 765 bp, Artificial Sequence
  derived and/or modified sequence
atggccagcgagttcaagaagaagctgttctggagagccgtggtggccgagttcctggccaccaccctgttcgtgttcatcagcatcggcagcgccctgggcttcaagtaccccgtgggcaacaaccagaccgccgtgcaggacaacgtgaaggtgagcctggccttcggcctgagcatcgccaccctggcccagagcgtgggccacatcagcggcgcccacctgaaccccgccgtgaccctgggcctgctgctgagctgccagatcagcatcgtggccaccgccatcctgagcggcatcaccagcagcctgaccggcaacagcctgggcagaaacgacctggccgacggcgtgaacagcggccagggcctgggcatcgagatcatcggcaccctgcagctggtgctgtgcgtgctggccaccaccgacagaagaagaagagacctgggcggcagcgcccccctggccatcggcctgagcgtggccctgggccacctgctggccatcgactacaccggctgcggcatcaaccccgccagaagcttcggcagcgccgtgatcacccacaacttcagcaaccactggatcttctgggtgggccccttcatcggcggcgccctggccgtgctgatctacgacttcatcctggcccccagaagcagcgacctgaccgacagagtgaaggtgtggaccagcggccaggtggaggagtacgacctggacgccgacgacatcaacagcagagtggagatgaagcccaagtag

SEQ ID NO: 259032 - DNA, 990 bp, Artificial Sequence
  derived and/or modified sequence
atgtgccaggtgggctgcttcctgaagacccccagattccccatctgggtggtgtgcagcgagagccacttcagcatcctgttcagcctgcagcccggcctgctgagagactggagaaccgagagactgttcgacctgtactactacgacggcctggccaaccagcaggagcagatcagactgaccatcgacaccacccagaccatcagcgaggacaccgacaacgacctggtgccccccctggagctgtgcatcagaaccaacatcggcagcgccctgggcttcaagtaccccgtgggcaacaaccagaccgccgtgcaggacaacgtgaaggtgagcctggccttcggcctgagcatcgccaccctggcccagagcgtgggccacatcagcggcgcccacctgaaccccgccgtgaccctgggcctgctgctgagctgccagatcagcatcttcagagccctgatgtacatcatcgcccagtgcgtgggcgccatcgtggccaccgccatcctgagcggcatcaccagcagcctgaccggcaacagcctgggcagaaacgacctggccgacggcgtgaacagcggccagggcctgggcatcgagatcatcggcaccctgcagctggtgctgtgcgtgctggccaccaccgacagaagaagaagagacctgggcggcagcgcccccctggccatcggcctgagcgtggccctgggccacctgctggccatcgactacaccggctgcggcatcaaccccgccagaagcttcggcagcgccgtgatcacccacaacttcagcaaccactggatcttctgggtgggccccttcatcggcggcgccctggccgtgctgatctacgacttcatcctggcccccagaagcagcgacctgaccgacagagtgaaggtgtggaccagcggccaggtggaggagtacgacctggacgccgacgacatcaacagcagagtggagatgaagcccaagtag

SEQ ID NO: 259033 - RNA, 1341 nt, Artificial Sequence
  derived and/or modified sequence
cugaccuugcacucuuuaacuuguuaugaagaucuugugaccuuuuuacaacaguccauccaucaguuugaaguggggccuuacggaugcauccugcugacacugucagcuauccucucuagauccacugaacugaucagacaggacuucgacguaccaacaucccauuuaauuggcgcacacggcuacugcacacaagagcuggucaaccuucuacuaacuggcaaggcugucucuaacguguucaaugaugugguggagcuagacagcggagaugggaacauaacacuacuccgagggaucgcugcccggagcgacauaggcuuuuugucucuauucgaacacuacaauaugugccagguaggcugcuucuuaaaaacccccagguuccccauuuggguugugugcucugagagucacuucagcaucuuguucucuuugcagcccggccugcugcgggacuggcgcacagagcgacuguucgaccuuuauuauuaugacggcuuggcuaaccagcaagaacagauuagguuaaccaucgauacgacucagaccauuucugaagacacagauaaugaccucgugccaccgcuggaacuauguaucagaacuaauaucggauccgcucucggcuucaaauacccaguuggcaauaaccaaacagcagugcaagauaacguaaagguuagucuggccuuuggccuaucgauugcgacgcuggcgcagucuguuggucacaucuccggcgcccacuugaacccggcaguuacuuuggggcugcuccuuucaugccagauuuccaucuucagagccuugauguacaucaucgcucagugcguuggagcuauuguggccacggccauccuguccggcauaacauccucucugacaggcaacagccuuggcagaaaugaucuggcugacgguguuaacucaggacagggacucggcauugaaaucauaggcacccugcagcugguacugugugugcuggccacuacagacagaaggagacgcgaucuugggggcucagccccacucgcuauugguuugagugucgcauugggacauuugcuggcgaucgauuacaccgguugcggaauuaaccccgcuagaucuuucggaagcgcuguaauuacucacaacuuuagcaaccacuggauauuuuggguggggcccuuuaucgguggugcccuggcugucuugauauacgacuuuauauuggccccgcgaaguagugaccugaccgauagagugaagguguggacaagcgggcaggucgaagaguaugaucucgaugccgacgacaucaacucuagaguggaaaugaagcccaaguag

SEQ ID NO: 259034 - RNA, 1341 nt, Artificial Sequence
  derived and/or modified sequence
cugacucuccacucucucacguguuacgaggaccuggucaccuuccuccagcagucuauucaccaauuugaagucggccccuacgguugcauuuuacucacauuaucugccauccugucgagauccaccgagcuuauccgccaggacuuugacgugcccacgagccaucuuauuggagcacacggauauuguacccaagaacucgugaaccugcuccuaaccggaaaggcaguuagcaauguuuuuaaugacgugguagagcucgacucaggggacgggaacaucaccuuacuaaggggcauagcugcgcggucagacauuggguuucucagccucuucgaacacuauaacaugugccaaguaggguguuuuuugaaaacgccccgauuuccaauauggguugucugcucugaaucacauuucaguaucuuauucucacugcagccaggacugcugcgagacuggcgcaccgaacgacuguuugaucuuuacuauuacgacggccuugcgaaucagcaggaacagauccgacuuacuaucgauacuacacagaccaucuccgaggacaccgacaaugaucucgugccuccauuagagcuguguauucgcaccaacaucgguucagcccugggauucaaguaccccgugggaaacaaccagaccgcaguacaggacaacgugaaaguaucccuggccuucgggcuuuccauugccaccuuagcacaauccgucggacacaucagcggcgcucaccuaaaucccgcaguuacccucggccuacuccuuuccugccagauuucgauuuuccgggcauugauguacauuaucgcacagugcgucggagcgauagucgcuaccgcaauccugagcgggaucacaagcucuuuaaccggcaacagccuggggaggaaugaucuugcggauggagucaacucugggcaggggcucgguaucgaaaucauugggacucuucagcucgugcucuguguucucgcaacaacugaucggcguagacgagauuuggggggaagugccccuuuagccaucgggcucagcguggcucugggucaccuuuuggccaucgauuauaccggcugcggaaucaauccugcacgaaguuucgggucagccguaaucacacauaauuuuagcaaucacuggaucuuuuggguuggccccuuuauuggcggcgcauuagcgguguugaucuaugauuuuauccuggcacccagauccagcgacuugaccgacagagugaaaguguggacaucaggacaaguggaggaguacgaucucgacgcugaugauauuaauuccagaguugaaaugaagcccaaguag

SEQ ID NO: 259035 - protein, 3707 aa, Artificial Sequence
  derived and/or modified sequence
MKGIRKGESRAKESKPWEPGKRRCAKCGRLDFILMKKMGIKSGFTFWNLVFLLTVSCVKGFIYTCGGTLKGLNGTIESPGFPYGYPNGANCTWVIIAEERNRIQIVFQSFALEEEYDYLSLYDGHPHPTNFRTRLTGFHLPPPVTSTKSVFSLRLTSDFAVSAHGFKVYYEELQSSSCGNPGVPPKGVLYGTRFDVGDKIRYSCVTGYILDGHPQLTCIANSVNTASWDFPVPICRAEDACGGTMRGSSGIISSPSFPNEYHNNADCTWTIVAEPGDTISLIFTDFQMEEKYDYLEIEGSEPPTIWLSGMNIPPPIISNKNWLRLHFVTDSNHRYRGFSAPYQGSSTLTHTTSTGELEEHNRTTTGAIAVASTPADVTVSSVTAVTIHRLSEEQRVQVTSLRNSGLDPNTSKDGLSPHPADTQSTRRRPRHAEQIERTKELAVVTHRVKKAIDFKSRGFKLFPGKDNSNKFSILNEGGIKTASNLCPDPGEPENGKRIGSDFSLGSTVQFSCDEDYVLQGAKSITCQRIAEVFAAWSDHRPVCKVKTCGSNLQGPSGTFTSPNFPFQYDSNAQCVWVITAVNTNKVIQINFEEFDLEIGYDTLTIGDGGEVGDPRTVLQVLTGSFVPDLIVSMSSQMWLHLQTDESVGSVGFKVNYKEIEKESCGDPGTPLYGIREGDGFSNRDVLRFECQFGFELIGEKSIVCQENNQWSANIPICIFPCLSNFTAPMGTVLSPDYPEGYGNNLNCIWTIISDPGSRIHLSFNDFDLESQFDFLAVKDGDSPESPILGTFTGAEVPSHLTSNSHILRLEFQADHSMSGRGFNITYNTFGHNECPDPGIPINARRFGDNFQLGSSISVICEEGFIKTQGTETITCILMDGKVMWSGLIPKCGAPCGGHFSAPSGVILSPGWPGYYKDSLNCEWVIEAEPGHSIKITFERFQTELNYDVLEVHDGPNLLSPLLGSYNGTQVPQFLFSSSNFIYLLFTTDNSRSNNGFKIHYESVTVNTYSCLDPGIPVHGRRYGHDFSIGSTVSFSCDSGYRLSHEEPLLCEKNHWWSHPLPTCDALCGGDVRGPSGTILSPGYPEFYPNSLNCTWTVDVTHGKGVQFNFHTFHLEDHHDYLLITENGSFTQPLARLTGSDLPPTINAGLYGNFRAQLRFISDFSISYEGFNITFSEYNLEPCEDPGIPQYGSRIGFNFGIGDTLTFSCSSGYRLEGTSEIICLGGGRRVWSAPLPRCVAECGASATNNEGILLSPNYPLNYENNHECIYSIQVQAGKGINISARTFHLAQGDVLKIYDGKDKTTHLLGAFTGASMRGLTLSSTSNQLWLEFNSDTEGTDEGFQLVYTSFELSHCEDPGIPQFGYKISDQGHFAGSTIIYGCNPGYTLHGSSLLKCMTGERRAWDYPLPSCIAECGGRFKGESSGRILSPGYPFPYDNNLRCMWMIEVDPGNIVSLQFLAFDTEASHDILRVWDGPPENDMLLKEISGSLIPEGIHSTLNIVTIQFDTDFYISKSGFAIQFSSSVATACRDPGVPMNGTRNGDGREPGDTVVFQCDPGYELQGEERITCIQVENRYFWQPSPPVCIAPCGGNLTGSSGFILSPNFPHPYPHSRDCDWTITVNADYVISLAFISFSIEPNYDFLYIYDGPDSNSPLIGSFQDSKLPERIESSSNTMHLAFRSDGSVSYTGFHLEYKAKLRESCFDPGNIMNGTRLGMDYKLGSTVTYYCDAGYVLQGYSTLTCIMGDDGRPGWNRALPSCHAPCGSRSTGSEGTVLSPNYPKNYSVGHNCVYSIAVPKEFVVFGQFVFFQTSLHDVVEVYDGPTQQSSLLSSLSGSHSGESLPLSSGNQITIRFTSVGPITAKGFHFVYQAVPRTSSTQCSSVPEPRFGRRIGNEFAVGSSVLFDCNPGYILHGSIAIRCETVPNSLAQWNDSLPTCIVPCGGILTKRKGTILSPGYPEPYDNNLNCVWKITVPEGAGIQVQVVSFATEHNWDSLDFYDGGDNNAPRLGSYSGTTIPHLLNSTSNNLYLNFQSDISVSAAGFHLEYTAIGLDSCPEPQTPSSGIKIGDRYMVGDVVSFQCDQGYSLQGHSHITCMPGPVRRWNYPIPICLAQCGGAMSDFSGVILSPGFPGNYPSSLDCTWTINLPIGFGVHLQFVNFSTETIHDYLEVRSGSSETSTVIGRLSGPQIPSSLFSTTHETSLYFHSDYSQNKQGFHIVYQAYQLQSCPDPRPFRNGFVIGNDFTVGQTISFECFPGYTLIGNSALTCLHGVSRNWNHPLPRCEALCGGNITAMNGTIYSPGYPDEYPNFQDCFWLVRVPPGNGIYINFTVLQTEPIYDFITVWDGPDQNSPQIGQFSGNTALESVYSTSNQILIKFHSDFTTSGFFVLSYHAYQLRVCQPPPPVPNAEILTEDDEFEIGDIIRYQCLPGFTLVGNAILTCRLGERLQMDGAPPVCQVLCPANELRLDSTGVILSPGYPDSYPNLQMCAWSISVEKGYNITMFVEFFQTEKEFDVLQVYDGPNIQSPVLISLSGDYSSAFNITSNGHEVFLQWSADHGNNKKGFRIRYIAFYCSTPESPPHGYIISQTGGQLNSVVRWACDRGFRLVGKSSAVCRKSSYGYHAWDAPVPACQAISCGIPKAPTNGGILTTDYLVGTRVTYFCNDGYRLSSKELTTAVCQSDGTWSNHNKTPRCVVVTCPSINSFILEHGRWRIVNGSHYEYKTKVVFSCDPGYHGLGPASIECLPNGTWSWRNERPYCQIISCGELPTPPNGNKIGTQTSYGSTAIFTCDLGFMLVGSAVRECLSSGLWSESETRCLAGHCGIPELIVNGQVIGENYGYRDTVVYQCNPGFRLIGSSVRICQQDHNWSGQLPSCVPVSCGHPGSPIYGRTSGNGFNFNDVVTFSCNIGYLMQGPTKAQCQANRQWSHPPPMCKVVNCSDPGIPANSKRESKIEHGNFTYGTVVFYDCNPGYFLFGSSVLICQPNGQWDKPLPECIMIDCGHPGVPPNAVLSGEKYTFGSTVHYSCTGKRSLLGQSSRTCQLNGHWSGSQPHCSGDATGTCGDPGTPGHGSRQESNFRTKSTVRYACDTGYILHGSEERTCLANGSWTGRQPECKAVQCGNPGTTANGKVFRIDGTTFSSSVIYSCMEGYILSGPSVRQCTANGTWSGTLPNCTIISCGDPGIPANGLRYGDDYVVGQNVSYMCQPGYTMELNGSRIRTCTINGTWSGVMPTCRAVTCPTPPQISNGRLEGTNFDWGFSISYICSPGYELSFPAVLTCVGNGTWSGEVPQCLPKFCGDPGIPAQGKREGKSFIYQSEVSFSCNFPFILVGSSTRICQADGTWSGSSPHCIEPTQTSCENPGVPRHGSQNNTFGFQVGSVVQFHCKKGHLLQGSTTRTCLPDLTWSGIQPECIPHSCKQPETPAHANVVGMDLPSHGYTLIYTCQPGFFLAGGTEHRVCRSDNTWTGKVPICEAGSKILVKDPRPALGTPSPKLSVPDDVFAQNYIWKGSYNFKGRKQPMTLTVTSFNASTGRVNATLSNSNMELLLSGVYKSQEARLMLRIYLIKVPAHASVKKMKEENWAMDGFVSAEPDGATYVFQGFIQGKDYGQFGLQRLGLNMSEGSNSSNQPHGTNSSSVAIAILVPFFALIFAGFGFYLYKQRTAPKTQYTGCSVHENNNGQAAFENPMYDTNAKSVEGKAVRFDPNLNTVCTMV

SEQ ID NO: 259036 - protein, 3637 aa, Artificial Sequence
  derived and/or modified sequence
MKGIRKGESRAKESKPWEPGKRRCAKCGRLDFILMKKMGIKSGFTFWNLVFLLTVSCVKGFIYTCGGTLKGLNGTIESPGFPYGYPNGANCTWVIIAEERNRIQIVFQSFALEEEYDYLSLYDGHPHPTNFRTRLTGFHLPPPVTSTKSVFSLRLTSDFAVSAHGFKVYYEELQSSSCGNPGVPPKGVLYGTRFDVGDKIRYSCVTGYILDGHPQLTCIANSVNTASWDFPVPICRAEDACGGTMRGSSGIISSPSFPNEYHNNADCTWTIVAEPGDTISLIFTDFQMEEKYDYLEIEGSEPPTIWLSGMNIPPPIISNKNWLRLHFVTDSNHRYRGFSAPYQGSSTLTHTTSTGELEEHNRTTTGAIAVASTPADVTVSSVTAVTIHRLSEEQRVQVTSLRNSGLDPNTSKDGLSPHPADTQSTRRRPRHAEQIERTKELAVVTHRVKKAIDFKSRGFKLFPGKDNSNKFSILNEGGIKTASNLCPDPGEPENGKRIGSDFSLGSTVQFSCDEDYVLQGAKSITCQRIAEVFAAWSDHRPVCKVKTCGSNLQGPSGTFTSPNFPFQYDSNAQCVWVITAVNTNKVIQINFEEFDLEIGYDTLTIGDGGEVGDPRTVLQVLTGSFVPDLIVSMSSQMWLHLQTDESVGSVGFKVNYKEIEKESCGDPGTPLYGIREGDGFSNRDVLRFECQFGFELIGEKSIVCQENNQWSANIPICIFPCLSNFTAPMGTVLSPDYPEGYGNNLNCIWTIISDPGSRIHLSFNDFDLESQFDFLAVKDGDSPESPILGTFTGAEVPSHLTSNSHILRLEFQADHSMSGRGFNITYNTFGHNECPDPGIPINARRFGDNFQLGSSISVICEEGFIKTQGTETITCILMDGKVMWSGLIPKCGAPCGGHFSAPSGVILSPGWPGYYKDSLNCEWVIEAEPGHSIKITFERFQTELNYDVLEVHDGPNLLSPLLGSYNGTQVPQFLFSSSNFIYLLFTTDNSRSNNGFKIHYESVTVNTYSCLDPGIPVHGRRYGHDFSIGSTVSFSCDSGYRLSHEEPLLCEKNHWWSHPLPTCDALCGGDVRGPSGTILSPGYPEFYPNSLNCTWTVDVTHGKGVQFNFHTFHLEDHHDYLLITENGSFTQPLARLTGSDLPPTINAGLYGNFRAQLRFISDFSISYEGFNITFSEYNLEPCEDPGIPQYGSRIGFNFGIGDTLTFSCSSGYRLEGTSEIICLGGGRRVWSAPLPRCVAECGASATNNEGILLSPNYPLNYENNHECIYSIQVQAGKGINISARTFHLAQGDVLKIYDGKDKTTHLLGAFTGASMRGLTLSSTSNQLWLEFNSDTEGTDEGFQLVYTSFELSHCEDPGIPQFGYKISDQGHFAGSTIIYGCNPGYTLHGSSLLKCMTGERRAWDYPLPSCIAECGGRFKGESSGRILSPGYPFPYDNNLRCMWMIEVDPGNIVSLQFLAFDTEASHDILRVWDGPPENDMLLKEISGSLIPEGIHSTLNIVTIQFDTDFYISKSGFAIQFSSSVATACRDPGVPMNGTRNGDGREPGDTVVFQCDPGYELQGEERITCIQVENRYFWQPSPPVCIAPCGGNLTGSSGFILSPNFPHPYPHSRDCDWTITVNADYVISLAFISFSIEPNYDFLYIYDGPDSNSPLIGSFQDSKLPERIESSSNTMHLAFRSDGSVSYTGFHLEYKAKLRESCFDPGNIMNGTRLGMDYKLGSTVTYYCDAGYVLQGYSTLTCIMGDDGRPGWNRALPSCHAPCGSRSTGSEGTVLSPNYPKNYSVGHNCVYSIAVPKEFAVPRTSSTQCSSVPEPRFGRRIGNEFAVGSSVLFDCNPGYILHGSIAIRCETVPNSLAQWNDSLPTCIVPCGGILTKRKGTILSPGYPEPYDNNLNCVWKITVPEGAGIQVQVVSFATEHNWDSLDFYDGGDNNAPRLGSYSGTTIPHLLNSTSNNLYLNFQSDISVSAAGFHLEYTAIGLDSCPEPQTPSSGIKIGDRYMVGDVVSFQCDQGYSLQGHSHITCMPGPVRRWNYPIPICLAQCGGAMSDFSGVILSPGFPGNYPSSLDCTWTINLPIGFGVHLQFVNFSTETIHDYLEVRSGSSETSTVIGRLSGPQIPSSLFSTTHETSLYFHSDYSQNKQGFHIVYQAYQLQSCPDPRPFRNGFVIGNDFTVGQTISFECFPGYTLIGNSALTCLHGVSRNWNHPLPRCEALCGGNITAMNGTIYSPGYPDEYPNFQDCFWLVRVPPGNGIYINFTVLQTEPIYDFITVWDGPDQNSPQIGQFSGNTALESVYSTSNQILIKFHSDFTTSGFFVLSYHAYQLRVCQPPPPVPNAEILTEDDEFEIGDIIRYQCLPGFTLVGNAILTCRLGERLQMDGAPPVCQVLCPANELRLDSTGVILSPGYPDSYPNLQMCAWSISVEKGYNITMFVEFFQTEKEFDVLQVYDGPNIQSPVLISLSGDYSSAFNITSNGHEVFLQWSADHGNNKKGFRIRYIAFYCSTPESPPHGYIISQTGGQLNSVVRWACDRGFRLVGKSSAVCRKSSYGYHAWDAPVPACQAISCGIPKAPTNGGILTTDYLVGTRVTYFCNDGYRLSSKELTTAVCQSDGTWSNHNKTPRCVVVTCPSINSFILEHGRWRIVNGSHYEYKTKVVFSCDPGYHGLGPASIECLPNGTWSWRNERPYCQIISCGELPTPPNGNKIGTQTSYGSTAIFTCDLGFMLVGSAVRECLSSGLWSESETRCLAGHCGIPELIVNGQVIGENYGYRDTVVYQCNPGFRLIGSSVRICQQDHNWSGQLPSCVPVSCGHPGSPIYGRTSGNGFNFNDVVTFSCNIGYLMQGPTKAQCQANRQWSHPPPMCKVVNCSDPGIPANSKRESKIEHGNFTYGTVVFYDCNPGYFLFGSSVLICQPNGQWDKPLPECIMIDCGHPGVPPNAVLSGEKYTFGSTVHYSCTGKRSLLGQSSRTCQLNGHWSGSQPHCSGDATGTCGDPGTPGHGSRQESNFRTKSTVRYACDTGYILHGSEERTCLANGSWTGRQPECKAVQCGNPGTTANGKVFRIDGTTFSSSVIYSCMEGYILSGPSVRQCTANGTWSGTLPNCTIISCGDPGIPANGLRYGDDYVVGQNVSYMCQPGYTMELNGSRIRTCTINGTWSGVMPTCRAVTCPTPPQISNGRLEGTNFDWGFSISYICSPGYELSFPAVLTCVGNGTWSGEVPQCLPKFCGDPGIPAQGKREGKSFIYQSEVSFSCNFPFILVGSSTRICQADGTWSGSSPHCIEPTQTSCENPGVPRHGSQNNTFGFQVGSVVQFHCKKGHLLQGSTTRTCLPDLTWSGIQPECIPHSCKQPETPAHANVVGMDLPSHGYTLIYTCQPGFFLAGGTEHRVCRSDNTWTGKVPICEAGSKILVKDPRPALGTPSPKLSVPDDVFAQNYIWKGSYNFKGRKQPMTLTVTSFNASTGRVNATLSNSNMELLLSGVYKSQEARLMLRIYLIKVPAHASVKKMKEENWAMDGFVSAEPDGATYVFQGFIQGKDYGQFGLQRLGLNMSEGSNSSNQPHGTNSSSVAIAILVPFFALIFAGFGFYLYKQRTAPKTQYTGCSVHENNNGQAAFENPMYDTNAKSVEGKAVRFDPNLNTVCTMV

SEQ ID NO: 259037 - DNA, 11124 bp, Artificial Sequence
  derived and/or modified sequence
atgaagggcatcaggaaaggcgagtcccgagctaaagaatcaaagccctgggaaccaggaaagagaaggtgtgccaagtgcgggaggctcgatttcatccttatgaagaagatgggcattaaatccggcttcacattctggaatctggtctttctgctgaccgtttcttgtgttaagggctttatctatacttgcggaggaacattgaaagggctgaacgggaccatcgaatctcctggttttccgtacgggtacccgaatggagccaactgtacctgggtgatcattgcagaagaacggaaccgcatccaaatcgtgtttcagagttttgctctagaagaggagtacgactacctatccctttatgacggtcatccgcaccccaccaacttccgcacgagattgactggcttccatctgccccctccggtgactagcacgaagagcgttttctccctgaggttaaccagtgactttgcagtctcagcgcatggattcaaggtttactacgaggaactgcaaagctcctcctgtgggaaccccggggtgcctcccaagggcgtcctttacgggacaaggtttgacgtcggcgataagatcagatattcttgcgttaccgggtatatcctggatgggcacccacagctgacatgcatcgcgaactctgtgaacacagcctcttgggactttccagtcccaatctgcagagccgaagatgcctgcgggggaactatgagaggatcttccgggatcatctcctccccctcctttcccaacgaataccataacaacgccgactgtacctggaccattgtggctgagccaggcgacactatctcgctgatctttaccgatttccagatggaagaaaagtatgattacctggagatcgaaggatctgagccccccaccatttggctgtccgggatgaacatacctccacctataatttccaataagaactggctgaggttacacttcgtcacggattctaaccacagataccgggggttttctgcaccctatcagggctcgtcaaccctgacgcacacaactagcacaggtgaactggaggaacataatagaacaaccacaggggctattgccgttgcttcaactccagccgatgtgaccgtgtcctctgtcacggcagtgacgatccacaggctgtcggaggagcagcgtgttcaggtgacttccctgcgaaacagtggcctggacccgaatacgtcaaaagacgggctctccccgcacccggcagacacacagtccacacggcggcggcctagacacgctgaacagatcgaacgtacaaaagaactggccgtggttactcatagagtgaagaaggctatcgatttcaagtccagagggttcaagctgtttcccggtaaggataacagtaacaaattctcaatcctcaacgagggaggcattaagactgctagtaacctctgccctgaccctggcgagcccgagaacggaaagaggatcggctctgatttcagcctgggaagtacggtgcaattctcctgtgatgaagattacgtgctccaaggagcaaaatctataacgtgccagagaattgctgaggtgttcgccgcatggtctgaccacaggccagtgtgcaaggtcaaaacctgtggtagcaatcttcagggaccgagtggcacatttacatctccgaattttccttttcagtatgactccaatgctcaatgtgtctgggtaattacagccgttaatacaaataaggtcatccagataaatttcgaggagttcgaccttgaaatcggttacgacacgttaaccatcggcgacgggggagaggtcggggatcctcgcacagttctgcaggtcctcacgggaagttttgttccagatttaatagtatcgatgtcgtcacagatgtggctacatttgcaaaccgatgaaagcgtgggttcagtcggcttcaaagtgaattataaggaaattgagaaggagtcttgtggtgacccgggcactcctctctatgggatcagggaaggcgatggattcagcaatcgagacgtccttcgatttgaatgtcagtttggcttcgagctgataggcgagaaatccattgtttgtcaggaaaacaatcagtggtctgccaacattcctatttgcatctttccctgtctcagcaatttcaccgcgcctatgggaactgtgctgtcacccgattaccccgagggatacggcaacaatctgaactgcatttggacaattatctcggaccccggttcccgtatccacctgtccttcaacgattttgatctggagtcccagttcgacttcttggccgtcaaggatggagactccccagagagtcccatcctgggaaccttcacgggcgcggaggtgccatcacatcttacctctaactctcacatactgaggcttgaatttcaggcagaccattccatgtccggaaggggctttaacatcacgtacaatacttttggacataatgaatgtccagacccagggatcccaattaacgctaggagattcggggacaatttccagctgggaagctctatttctgttatttgtgaggagggattcatcaagacccagggaactgagaccatcacgtgcatcctcatggatgggaaagttatgtggtcaggcctgatccccaaatgtggagctccatgtggaggccattttagtgctccatccggagtgatattaagtcccggctggccaggctattacaaggactcccttaattgtgaatgggttatcgaggctgaacctggccactcaatcaagattactttcgagcgtttccaaacagagctcaattatgacgtgctggaggtgcacgacggcccaaaccttctcagcccgctgctcgggtcatataacggcacccaggtcccccagtttctgtttagcagcagcaatttcatctacctcctttttacgacggacaattcaagaagtaataacggtttcaaaatccactatgagtcggtgaccgtcaacacctacagttgcctggacccgggaatacccgtgcatggtagacgctatgggcacgacttttccatcgggagtacagtgtctttctcttgtgactctggatatagactgtcccacgaggagcccctgctgtgcgagaaaaaccattggtggtctcatcctttacccacgtgtgacgcactgtgtgggggagatgtgagaggaccctcaggtaccatcctaagtcctggatatcctgagttctacccaaactccctaaactgcacttggacggtggacgtgactcacggaaaaggagtgcagtttaactttcacacctttcatctcgaggaccatcacgactatcttctcatcaccgaaaacggtagcttcacccaacctctggcccggctgaccggaagcgacctgcccccgaccatcaacgctggactctacggcaatttcagggcccagttacgattcatctctgatttttcaatcagctacgaggggttcaacatcacatttagcgagtacaaccttgagccctgtgaagaccccggcattccccagtacggctctcgtatcggcttcaactttggaattggcgacactctcacgttctcatgttcatcagggtatcggctggaagggacttcggagatcatctgcctcggcggcggcaggcgggtttggagtgctcccttgccacgctgtgttgcagagtgcggagccagcgcgaccaataatgaggggattctgctgtctcccaattatccattgaactacgaaaataatcacgaatgtatttacagtattcaagtccaggcaggcaaggggataaatatcagtgcacgaacattccacctggcccagggagacgtgctgaaaatctatgatggcaaagacaagacaacccacctactgggagcgttcacaggtgcaagtatgagagggctgactctgagctctaccagcaaccagctctggctcgagttcaactctgacacagaaggcaccgacgagggattccaacttgtctacacttcttttgagttgagccattgcgaagaccctggtatcccacagttcggatacaagatctctgaccaaggtcattttgcgggatcaactatcatttacggatgcaatcccggatacacactgcatggtagctcgttgctgaagtgcatgaccggggagcggcgggcttgggactaccctttaccttcgtgtatcgctgaatgcggcgggcggttcaagggagaaagcagtggcagaattctctccccagggtatccgttcccttatgataataatttgaggtgcatgtggatgattgaagtggatcctggcaatatcgtgtcactgcagttcctggcgttcgacacagaagccagtcacgacatcctgcgggtctgggacggacccccggaaaatgatatgctacttaaggagatctcgggttcgctgatacctgaaggtatccactctactctaaatatcgtgaccatacagtttgacacagatttctacattagtaagagcggatttgccatccagttctccagctccgtggccacagcctgtcgcgacccaggcgtgcccatgaacggaacccggaatggtgacggtcgggagccaggagacaccgtggtttttcagtgcgatcctggctacgagttgcagggcgaggaaagaataacttgtatccaggtggagaatcggtatttctggcagccctcaccgcctgtgtgtatagcgccctgtggtggaaacctaacaggtagttctggcttcattctaagtcctaacttcccacatccttacccgcacagcagagattgtgattggacgatcactgtcaatgctgactacgtgatttccctcgccttcatcagtttctccatcgagccgaactatgacttcctatacatctatgacggtcccgactcgaactctcccctgatcggcagttttcaggatagcaagctgcctgaaagaatagaatcatctagcaatacaatgcacttagccttccgctccgatggctccgttagctacaccggcttccatcttgagtacaaggctaagctcagggaatcctgcttcgatccaggaaacataatgaatgggacaagactagggatggactacaagttggggagcacggtcacatactactgcgacgccggctatgtgctccaggggtattcaacgctgacttgtatcatgggtgatgacggacgtcccggatggaatagggcgctgcctagttgccatgccccatgcgggtccaggtctaccggcagcgagggcaccgtgcttagccccaattacccgaagaattactctgtgggccataattgcgtgtactctatagccgtaccaaaagagttcgttgttttcggccaattcgttttcttccagacgtcgctccatgacgtagtggaagtttacgatggcccgactcagcagtcctccctgctgtcgagtctctctggcagtcatagtggggagtctttacctctatctagtggaaatcagatcactatcaggtttactagtgtgggacccatcacagccaaaggattccacttcgtctatcaggcagtaccccggacttccagtacacagtgcagttccgttcccgagccccggtttgggaggcgaattgggaacgagtttgcagttggttcctcagttctgtttgattgcaatcctggatacatcctccacgggagtattgccatcaggtgtgaaactgtacccaattctttggctcagtggaacgattccctcccaacctgtattgtaccctgcggcggcatcctgacaaaaaggaaaggcactatcctgtcacctggatacccagagccctatgacaataatttgaattgtgtctggaagatcaccgtgcccgagggggctggtatccaggtccaggttgtgtccttcgctactgaacacaactgggactccctggatttctatgacgggggtgacaacaacgcgccacgcctcggctcgtactccggcacgaccatcccacatctcctgaatagcacttcaaataacctgtatctcaattttcagtctgatataagcgtatcggccgctgggtttcacttagagtataccgccatcggcctggacagctgtcctgagcctcagacgccttctagcggaattaaaataggagaccggtacatggtgggtgacgtcgtgagctttcagtgcgaccaaggctatagcctccaggggcattctcatattacgtgcatgcccggacctgtgcgcaggtggaactaccctatccccatctgtctcgcccagtgcggtggcgctatgtctgatttctcaggcgttattctttcccccggatttcccggtaactatccctcaagccttgattgcacatggaccatcaatctgcccattggattcggggtgcatctgcagtttgttaatttctctacagagacaatacatgactaccttgaagttagatcaggttcctcagaaacctcaactgtgattggaagactttccggccctcaaatacccagttctttattctccaccacccacgagacatccctctacttccactctgactatagccagaataagcagggcttccacatagtgtaccaggcctaccagttgcagagctgcccggacccacggccttttcggaacggttttgtaattggaaatgactttactgtcggccagaccatttcattcgagtgcttcccaggatacaccttgatcggaaacagtgccctcacatgtctgcatggcgttagcagaaattggaatcacccgctacctcggtgcgaggctctctgcggaggtaacatcactgcaatgaatgggacaatttatagtcccggataccccgatgagtacccaaatttccaggactgtttttggctggttagggtgccacccggcaacggcatatacattaactttaccgtgctgcaaacagaaccaatctatgattttatcaccgtttgggacggccccgatcagaattccccacagatagggcagttcagtggcaataccgccctggagtcagtttatagcacctctaaccaaatcctcatcaaattccacagtgattttaccaccagcgggttcttcgtcctgtcttatcatgcgtatcaactgagagtgtgtcagcctcctccccccgtacctaatgccgagatcctcaccgaagatgacgagttcgagatcggggatattatacggtaccagtgtctgcctggattcaccctggtcggaaacgcgatacttacttgtcggttaggagagcgcttgcaaatggacggtgcgcctccagtttgccaggtattatgtccggctaacgagctcaggctcgactcaaccggcgtgatcctttctcccggatatcccgactcttatccaaacctgcagatgtgcgcttggtctatctctgtcgaaaaaggatacaacatcactatgttcgtggaattcttccagaccgaaaaggaatttgatgtgttacaggtctatgacggtcccaatattcagtcccccgttttgatctcccttagtggcgactactcctccgccttcaacattaccagtaacggccatgaagtattccttcaatggtccgctgatcacggtaataataaaaaaggtttccgaattcgctacatagctttctactgttccactcctgaatcccctccccacgggtatattatatctcagaccggaggccaactcaacagtgtggttcgatgggcatgcgatcgcggatttagacttgtgggaaagtcctccgcagtttgccggaagtcttcctatggatatcacgcctgggacgccccagttcctgcttgtcaagccatctcttgcggtattcctaaggcgccaaccaacggcggaatcttgaccacagactacttagtaggcactcgagtcacgtacttctgcaacgacgggtacagattgtcctcaaaagagctaaccacagctgtttgtcagtccgacggcacctggtcaaatcacaacaagacccctagatgcgtggtcgtcacctgtccaagtattaactctttcattctggaacacggacgctggcggatagtgaacggaagccattacgagtataaaactaaggtggtgttttcatgtgatcccggataccacgggttgggcccagcaagtatcgagtgtctccctaatggcacttggtcctggcgtaatgaacggccatactgccaaattataagttgtggcgagcttcctacccctccgaacggcaacaaaattggaacccaaacgtcgtacggctccaccgccatcttcacatgcgatctgggtttcatgctcgtggggagcgctgtgcgcgaatgcctgagcagcggattatggagcgagagcgagacaaggtgcctcgccggacactgtggaatccctgagcttatcgtgaatggccaagttatcggggaaaattacggctatcgcgacactgtagtgtatcagtgcaaccctggattcagattaatcggctctagtgtgcgcatctgccagcaggaccacaactggtctggacaactgccctcctgtgttcccgtctcctgtggccacccaggttctcccatctacggacggacgtctggtaatggcttcaattttaatgatgttgtcactttttcgtgcaacatcggatacctgatgcagggacccactaaggcacagtgtcaggccaaccgccagtggtcacatccaccacccatgtgtaaggtcgtgaactgttccgaccctggaattccagctaattccaagcgggagagcaagatcgagcacggcaattttacctacggcacggtggtgttctacgattgcaaccccggatacttccttttcggttcgagcgtcctgatctgccagcccaacggccagtgggacaagccgctgcccgagtgcataatgattgactgcggccaccccggcgtgcctccaaacgctgttttgagcggggaaaagtatacattcgggtcaacagtccactactcctgcacggggaaaagaagcttattgggtcaatccagccgcacatgccaacttaatggccactggagtggctctcagcctcactgctctggcgacgctaccggaacctgcggtgaccccggcacccccggccatgggtcccgacaggagagcaatttccgtaccaagtcgactgtccgctacgcatgcgacactggctatatactgcatggaagcgaggagcggacttgcctggcaaatgggtcttggacaggtcgacaacctgagtgtaaggcggtgcagtgtggcaatcccggtacaaccgcgaacggcaaagtcttcagaattgacggaaccacctttagtagttcagttatctactcttgtatggaagggtacatcctctccggtccaagcgtgaggcaatgcaccgccaatggtacatggagtgggaccctaccaaactgcacaatcatcagctgcggggaccctggaatccctgccaatggtctccgttacggtgatgactacgtggtgggtcagaacgtgtcctacatgtgtcaacctggatacaccatggagctgaacggaagtagaatccgaacatgcactattaacggaacctggagtggagttatgccaacatgtcgggctgtgacttgtcctacccccccccagatatccaatgggagattagaaggcaccaactttgattggggattcagtatctcctatatctgctctcccgggtacgagttatccttccctgcagtgctgacctgcgttggaaacggaacctggtccggtgaggtccctcagtgcttaccgaaattctgcggcgatccaggcatcccagcacaggggaaacgagaaggcaagtcttttatttaccagtctgaggttagtttttcttgtaatttcccattcatcctggttggcagctctactagaatttgtcaggccgacggtacctggtccgggtcatctccgcattgcatcgaacccacacagacatcctgtgaaaatcccggggtgccgcggcacgggagccagaacaacacatttggcttccaagtgggttccgttgtgcaattccactgcaaaaagggacaccttctccaaggatcaaccacaagaacctgcttgccagacctaacatggtccggtattcagcccgaatgtattcctcatagctgtaagcagcctgagacacccgctcacgccaacgtggttggtatggatctgcctagccacgggtacacgctaatttacacatgccagcccggattttttctcgccggagggaccgagcaccgcgtgtgtaggtctgataatacttggacaggcaaagtgccaatctgtgaggctggatccaaaatcttggtgaaggacccgaggccagccttgggaaccccgtcaccaaagctgagcgtgcctgacgacgtcttcgctcagaattacatttggaagggttcctataactttaaagggagaaagcagccgatgacactgaccgtgacgtcattcaacgccagcactggacgcgtgaacgccactctgagcaactctaacatggaactgctgctgagcggcgtgtacaagtcccaagaagcccgcctgatgttacgcatttacctgattaaagtccccgcccacgcctctgttaagaaaatgaaggaggaaaattgggcaatggacggattcgtgagtgccgagcctgatggcgccacatacgtgtttcagggctttattcagggtaaggactatggtcagttcggcttacagcggctgggattaaacatgagtgaaggatccaattccagcaatcagccacatggtacgaactcttcctccgtggctatcgccatcctcgtcccattcttcgcccttatattcgccggatttggattttacttgtataaacaacggaccgctcccaaaacacagtatacaggatgtagcgtacatgaaaataataacggccaagctgcatttgaaaaccctatgtacgacaccaatgccaagtccgtggagggtaaggccgtgcggttcgaccctaacttaaatactgtttgtacgatggtgtag

SEQ ID NO: 259038 - DNA, 11124 bp, Artificial Sequence
  derived and/or modified sequence
atgaagggcatcaggaagggggagagccgggccaaggagagcaagccctgggagcccgggaagaggcgctgtgccaagtgtggccgcctggacttcatcctgatgaagaagatgggcatcaagagcggcttcaccttctggaacctggtgttcctgctgactgtgtcctgtgtgaagggcttcatctacacctgtggcggcaccctgaagggcctgaatggcaccatcgagagccctggcttcccctacggctacccaaatggagccaactgcacctgggtgatcatcgccgaggagaggaaccgcatccagatcgtgttccagagctttgccctggaggaggagtatgactacctgagcctgtatgatggccacccccaccccaccaacttccgcacccggctgaccggcttccacctgcccccacctgtgaccagcaccaagtctgtgttcagcctgcggctgaccagtgactttgctgtgtctgcccacggcttcaaggtgtactatgaggagctgcagagcagcagctgtggcaaccctggggtgccccccaagggcgtgctgtatggcaccaggtttgatgtgggggacaagatccgctacagctgtgtgacaggctacatcctggatggccacccccagctgacctgcatcgccaacagcgtgaacacagcctcctgggacttccctgtgcccatctgcagagcagaagatgcctgtggcggcaccatgaggggcagcagcggcatcatcagcagccccagcttccccaatgagtaccacaacaatgctgactgcacctggaccatcgtggccgagcccggggacaccatcagcctcatcttcacagacttccagatggaggagaagtatgactacctggagattgagggcagcgagccccccaccatctggctgagcggcatgaacatccccccacccatcatcagcaacaagaactggctgcggctgcactttgtgacagacagcaaccaccgctaccggggcttcagcgccccctaccagggcagcagcaccctgacccacaccaccagcactggagagctggaggagcacaacagaaccaccactggagccatcgctgtggccagcaccccagcagatgtgacagtgtcctctgtgacagctgtgaccatccaccggctgtctgaggagcagagggtgcaggtgaccagcctgaggaacagcggcctggaccccaacaccagcaaggatggcctgagcccccaccctgctgacacccagagcaccaggagaagacccaggcatgctgagcagattgaaagaaccaaggagctggccgtggtgacccaccgggtgaagaaggccatcgacttcaagagccggggcttcaagctgtttcctgggaaggacaacagcaacaagttcagcatcctgaatgaaggaggcatcaagacagccagcaacctgtgcccagaccctggagagccagaaaatggcaagagaattggaagtgacttcagcctgggcagcacagtgcagttcagctgtgatgaggactatgtgctgcagggcgccaagagcatcacctgccagagaattgctgaggtgtttgctgcctggagcgaccacaggcctgtgtgcaaggtgaagacctgtggcagcaacctgcagggccccagcggcaccttcaccagccccaacttccccttccagtatgacagcaatgcccagtgtgtgtgggtgatcacagctgtgaacaccaacaaggtgatccagatcaactttgaggagtttgacctggagatcggctatgacaccctgaccatcggagatggaggagaggtgggggaccccaggacagtgctgcaggtgctgaccggcagctttgtgcctgacctgattgtgtccatgagcagccagatgtggctgcacctgcagacagatgagagcgtgggctctgtgggcttcaaggtgaactacaaggagattgagaaggagagctgtggggaccccggcacccccctgtatggcatccgggagggagatggcttcagcaacagagatgtgctgcgctttgagtgccagtttggatttgagctgattggagagaagagcatcgtgtgccaggagaacaaccagtggagcgccaacatccccatctgcatcttcccctgcctgagcaacttcaccgcccccatgggcaccgtgctgagcccagactacccagagggctacggcaacaacctgaactgcatctggaccatcatcagtgaccccggcagccgcatccacctgtccttcaatgactttgacctggagagccagtttgacttcctggccgtgaaggatggagacagccctgagagccccatcctgggcaccttcaccggggctgaggtgcccagccacctgaccagcaacagccacatcctgcggctggagttccaggccgaccacagcatgagcggccggggcttcaacatcacctacaacaccttcggccacaatgaatgtcctgaccccggcatccccatcaatgccaggagatttggagacaacttccagctgggcagcagcatcagcgtcatctgtgaggagggcttcatcaagacccagggcacagagaccatcacctgcatcctgatggatggcaaggtgatgtggagcggcctcatccccaagtgtggggccccctgtggcggccacttcagcgcccccagcggggtcatcctgagccctggctggccaggctactacaaggacagcctgaactgtgagtgggtgattgaagctgagcccggccacagcatcaagatcacctttgagcgcttccagacagagctgaactatgatgtgctggaggtgcatgatggccccaacctgctgagccccctgctgggcagctacaacggcacccaggtgccccagttcctgttcagcagcagcaacttcatctacctgctcttcaccacagacaacagccgcagcaacaacggcttcaagatccactatgagagcgtgacagtgaacacctacagctgcctggaccccggcatccctgtgcacggccgccgctatggccatgacttcagcatcggcagcacagtgtccttcagctgtgacagcggctaccgcctgagccatgaggagcccctgctgtgtgagaagaaccactggtggagccaccccctgcccacctgtgatgccctgtgtggaggagatgtgcggggccccagcggcaccatcctgagccctggctacccagagttctaccccaacagcctgaactgcacctggacagtggatgtgacccatggaaaaggagtgcagttcaacttccacaccttccacctggaggaccaccacgactacctgctgatcacagaaaatggcagcttcacccagcccctggcccggctgactggaagtgacctgccccccaccatcaatgccggcctgtatggcaacttccgggcccagctgcgcttcatcagtgacttcagcatctcctatgagggcttcaacatcaccttcagcgagtacaacctggagccctgtgaagatcctggcatcccccagtatggcagccgcatcggcttcaactttggcatcggggacaccctgaccttcagctgcagcagcggctaccgcctggagggcaccagcgagatcatctgcctgggcggcggcagaagagtgtggagcgcccccctgccccgctgtgtggccgagtgtggggccagcgccaccaacaatgaaggcatcctgctgagccccaactaccccctgaactatgagaacaaccacgagtgcatctacagcatccaggtgcaggccggcaagggcatcaacatcagcgcccggaccttccacctggcccagggagatgtgctgaagatctatgatggcaaggacaagaccacccacctgctgggcgccttcaccggggcctccatgaggggcctgaccctgagcagcaccagcaaccagctgtggctggagttcaacagcgacacagagggcacagatgagggcttccagctggtgtacaccagctttgagctgagccactgtgaagatcctggcatcccccagtttggctacaagatcagtgaccagggccactttgctggcagcaccatcatctacggctgcaaccctggctacaccctgcacggcagcagcctgctgaagtgcatgactggagagcggcgggcctgggactaccccctgcccagctgcatcgcagaatgtggcggccgcttcaagggggagagcagcggccgcatcctgagccctggctaccccttcccctatgacaacaacctgcgctgcatgtggatgattgaggtggaccccggcaacatcgtgtccctgcagttcctggcctttgacacagaggccagccatgacatcctgcgggtgtgggatggccccccagaaaatgacatgctgctgaaggagatcagcggcagcctcatccctgagggcatccacagcaccctgaacatcgtgaccatccagtttgacacagacttctacatcagcaagagcggctttgccatccagttcagcagctctgtggccacagcctgccgggaccccggggtgcccatgaatggcaccagaaatggagatggccgggagcccggggacacagtggtgttccagtgtgaccccggctatgagctgcagggcgaggagcgcatcacctgcatccaggtggagaaccgctacttctggcagcccagcccccctgtgtgcatcgccccctgtggcggcaacctgaccggcagcagcggcttcatcctgagccccaacttcccccacccctacccccacagccgggactgtgactggaccatcaccgtgaatgctgactatgtgatcagcctggccttcatctccttcagcattgagcccaactatgacttcctgtacatctatgatggccctgacagcaacagccccctgattggcagcttccaggacagcaagctgcctgagagaattgagagcagcagcaacaccatgcacctggccttcagaagtgatggctctgtgtcctacacaggcttccacctggagtacaaggccaagctgcgggagagctgctttgaccccggcaacatcatgaatggcacccggctgggcatggactacaagctgggcagcacagtgacctactactgtgatgctggctacgtgctgcagggctacagcaccctgacctgcatcatgggagatgatggccggcccggctggaacagagccctgcccagctgccacgccccctgtggcagccgcagcactggaagtgagggcaccgtgctgagccccaactaccccaagaactacagcgtgggccacaactgtgtgtacagcattgctgtgcccaaggagtttgtggtgtttggccagtttgtgttcttccagaccagcctgcatgatgtggtggaggtgtatgatggccccacccagcagagcagcctgctgagcagcctgagcggcagccacagcggggagagcctgcccctgagcagcggcaaccagatcaccatccgcttcacctctgtgggccccatcacagccaagggcttccactttgtgtaccaggccgtgcccaggaccagcagcacccagtgcagctctgtgcctgagccccgcttcggcagaagaattggaaatgaatttgctgtgggcagctctgtgctgtttgactgcaaccctggctacatcctgcacggcagcatcgccatccgctgtgagaccgtgcccaacagcctggcccagtggaatgacagcctgcccacctgcatcgtgccctgtggcggcatcctgaccaagaggaagggcaccatcctgagccctggctacccagagccctatgacaacaacctgaactgtgtgtggaagatcaccgtgcctgagggcgccggcatccaggtgcaggtggtgtcctttgccacagagcacaactgggacagcctggacttctatgatggaggagacaacaatgccccccggctgggcagctacagcggcaccaccatcccccacctgctgaacagcaccagcaacaacctgtacctgaacttccagagcgacatctctgtgtctgctgctggcttccacctggagtacacagccatcggcctggacagctgcccagagccccagacccccagcagcggcatcaagatcggggaccgctacatggtgggagatgtggtgtccttccagtgtgaccagggctacagcctgcagggccacagccacatcacctgcatgcctggccctgtgcggcgctggaactaccccatccccatctgcctggcccagtgtggcggggccatgtctgacttctctggagtcatcctgagccctggcttccctggcaactaccccagcagcctggactgcacctggaccatcaacctgcccatcggctttggagtgcacctgcagtttgtgaacttcagcacagagaccatccatgactacctggaggtgcgcagcggcagcagcgagaccagcaccgtcatcggccgcctgagcggcccccagatccccagcagcctcttcagcaccacccatgagaccagcctgtacttccacagcgactacagccagaacaagcagggcttccacatcgtgtaccaggcctaccagctgcagagctgcccagacccccggcccttcagaaatggatttgtgattggaaatgacttcaccgtgggccagaccatcagctttgagtgcttccctggctacaccctgattggcaacagcgccctgacctgcctgcacggcgtgtccaggaactggaaccaccccctgccccgctgtgaggccctgtgtggcggcaacatcacagccatgaatggcaccatctacagccctggctacccagatgagtaccccaacttccaggactgcttctggctggtgcgggtgcccccaggaaatggcatctacatcaacttcaccgtgctgcagacagagcccatctatgacttcatcaccgtgtgggatggccctgaccagaacagcccccagatcggccagttcagcggcaacacagccctggagagcgtgtacagcaccagcaaccagatcctgatcaagttccacagcgacttcaccaccagcggcttctttgtgctgagctaccacgcctaccagctgcgggtgtgccagcccccacctcctgtgcccaatgctgagatcctgacagaagatgatgaatttgaaattggagacatcatccgctaccagtgcctgcccggcttcaccctggtgggcaatgccatcctgacctgccgcctgggggagcggctgcagatggatggagcccctcctgtgtgccaggtgctgtgcccagccaatgagctgcggctggacagcactggagtcatcctgagccctggctacccagacagctaccccaacctgcagatgtgtgcctggagcatctctgtggagaagggctacaacatcaccatgtttgtggagttcttccagacagagaaggagtttgatgtgctgcaggtgtatgatggccccaacatccagagccctgtgctgatcagcctgagcggggactacagcagcgccttcaacatcaccagcaatggacatgaggtgttcctgcagtggagcgctgaccacggcaacaacaagaagggcttccgcatccgctacatcgccttctactgcagcaccccagagagcccccctcatggctacatcatcagccagacaggaggccagctgaacagcgtggtgcgctgggcctgtgaccggggcttccggctggtgggcaagagcagcgctgtgtgcaggaagagcagctatggctaccacgcctgggatgcccctgtgcctgcctgccaggccatcagctgtggcatccccaaggcccccaccaacggcggcatcctgaccacagactacctggtgggcaccagggtgacctacttctgcaatgatggctaccgcctgagcagcaaggagctgaccacagctgtgtgccagagtgatggcacctggagcaaccacaacaagaccccccgctgtgtggtggtgacctgccccagcatcaacagcttcatcctggagcacggccgctggagaattgtgaatggcagccactatgagtacaagaccaaggtggtgttcagctgtgaccccggctaccacggcctgggccctgccagcattgagtgcctgcccaacggcacctggagctggagaaatgaaagaccctactgccagatcatcagctgtggggagctgcccaccccaccaaatggaaacaagattggcacccagaccagctatggcagcacagccatcttcacctgtgacctgggcttcatgctggtgggcagcgctgtgcgggagtgcctgagcagcggcctgtggagcgagagcgagacccgctgcctggccggccactgcggcatccctgagctgattgtgaatggccaggtgattggagaaaattatggctacagagacacagtggtgtaccagtgcaaccctggcttccgcctcatcggcagctctgtgcgcatctgccagcaggaccacaactggagcggccagctgcccagctgtgtgcctgtgtcctgtggccaccctggcagccccatctacggccgcaccagcggaaatggcttcaacttcaatgatgtggtgaccttcagctgcaacatcggctacctgatgcagggccccaccaaggcccagtgccaggccaaccggcagtggagccaccccccacccatgtgcaaggtggtgaactgcagcgaccccggcatcccagccaacagcaagcgggagagcaagattgagcacggcaacttcacctatggaacagtggtgttctatgactgcaaccctggctacttcctgtttggcagctctgtgctgatctgccagcccaacggccagtgggacaagcccctgcctgagtgcatcatgattgactgtggccaccctggggtgcccccaaatgctgtgctgtctggagagaagtacaccttcggcagcacagtgcactacagctgcaccgggaagaggagcctgctgggccagagcagcaggacctgccagctgaatggccactggagcggcagccagccccactgcagcggagatgccaccggcacctgtggggaccccggcaccccaggccacggcagccggcaggagagcaacttccgcaccaagagcacagtgcgctatgcctgtgacaccggctacatcctgcacggcagcgaggagaggacctgcctggccaacggctcctggacaggccggcagcctgagtgcaaggctgtgcagtgtggcaaccctggcaccacagccaacgggaaggtgttcagaattgatggcaccaccttcagcagcagcgtcatctacagctgcatggagggctacatcctgagcggccccagcgtgcggcagtgcacagccaacggcacctggagcggcaccctgcccaactgcaccatcatcagctgtggggaccccggcatcccagccaacggcctgcgctatggagatgattatgtggtgggccagaatgtgtcctacatgtgccagcccggctacaccatggagctgaatggcagccgcatccgcacctgcaccatcaatggcacctggagcggcgtgatgcccacctgcagagctgtgacctgccccaccccaccccagatcagcaatggccgcctggagggcaccaactttgactggggcttcagcatctcctacatctgcagccctggctatgagctgtccttccctgctgtgctgacctgtgtgggcaatggcacctggagcggggaggtgccccagtgcctgcccaagttctgtggggaccccggcatcccagcccagggcaagcgggagggcaagagcttcatctaccagagcgaggtgtccttcagctgcaacttccccttcatcctggtgggcagcagcacccgcatctgccaggctgatggcacctggagcggcagcagcccccactgcatcgagcccacccagaccagctgtgaaaatcctggggtgcccaggcatggcagccagaacaacaccttcggcttccaggtgggctctgtggtgcagttccactgcaagaagggccacctgctgcagggcagcaccaccaggacctgcctgcctgacctgacctggagcggcatccagcctgagtgcatcccccacagctgcaagcagcctgagaccccagcccacgccaacgtggtgggcatggacctgcccagccacggctacaccctcatctacacctgccagcccggcttcttcctggccggcggcacagagcaccgggtgtgccgcagtgacaacacctggacaggcaaggtgcccatctgtgaggccggcagcaagatcctggtgaaggaccccaggcctgccctgggcacccccagccccaagctgtctgtgcctgatgatgtgtttgcccagaactacatctggaagggcagctacaacttcaagggcaggaagcagcccatgaccctgactgtgaccagcttcaatgccagcacaggccgggtgaatgccaccctgagcaacagcaacatggagctgctgctgagcggcgtgtacaagagccaggaggcccggctgatgctgcgcatctacctgatcaaggtgcctgcccacgcctctgtgaagaagatgaaggaggagaactgggccatggatggctttgtgtctgctgagccagatggagccacctacgtgttccagggcttcatccagggcaaggactatggccagtttggcctgcagaggctgggcctgaacatgtctgagggcagcaacagcagcaaccagccccacggcaccaacagcagctctgtggccatcgccatcctggtgcccttctttgccctgatctttgctggcttcggcttctacctgtacaagcagaggacagcccccaagacccagtacacaggctgcagcgtgcatgagaacaacaacggccaggccgcctttgagaaccccatgtatgacaccaatgccaagtctgtggagggcaaggctgtgcgctttgaccccaacctgaacacagtgtgcaccatggtgtag

SEQ ID NO: 259039 - DNA, 11124 bp, Artificial Sequence
  derived and/or modified sequence
atgaagggcatccggaagggcgagagccgggccaaggagagcaagccctgggagcccggaaagaggaggtgtgcgaagtgtgggcgtctagacttcattctgatgaagaagatggggatcaaatctggcttcactttctggaatctggtttttcttttgactgtttcttgcgttaagggcttcatttatacttgtggcggaacacttaagggcctaaacggtactattgagagccccggcttcccttacggctatcctaacggcgccaattgcacatgggttattattgctgaagagcgaaatcgaatccaaatcgtgttccagagctttgcactggaagaggagtacgattatctgtcactgtatgatggacacccacatcccacaaatttccggacacgtttaaccggattccaccttcctcccccagtaacatccacgaagagtgtgttctccctgcggttgacctccgatttcgccgtcagcgcccacggcttcaaagtgtattatgaggaactgcagtcctcatcatgcggtaatcctggcgtaccaccaaaaggggtgctgtatgggacccggttcgacgtcggcgacaagatcaggtattcctgcgtcaccggttatattttggatggtcaccctcaacttacctgtatcgctaattcagtgaataccgcctcctgggactttccagtcccgatctgtcgggccgaagatgcatgcggcggaaccatgcgggggtccagtgggattatatcttccccttccttccctaacgaataccacaacaatgcagattgcacatggacaatcgtggcggaacccggggatacaatctcattgatcttcacagactttcaaatggaagaaaaatatgactatctcgagattgaaggtagcgagcctcccaccatctggttatcaggtatgaacatacccccaccaatcatcagtaataaaaattggctgaggctacacttcgtgaccgatagtaatcaccggtaccgcggattcagtgcgccataccagggtagctccaccctaactcatacaacaagtaccggggaactggaggaacataatcgtaccaccaccggtgccatcgccgtcgcctccactcccgcagacgtgaccgtttcgtcagtgaccgctgtcaccattcacagactttcagaagaacagcgtgtccaggtgacatcgctgcggaattcaggactggatccaaatacatccaaggacgggttgagcccccatcctgcggacacgcaatccacgcgccggcgtccgagacacgctgaacagattgagcgcacaaaagaactggcagtcgtaactcacagagtgaagaaagctatagatttcaaatcccggggcttcaagctgttccctggcaaagacaattctaacaagttttctattctcaatgagggaggaataaagactgcatctaacttatgccccgaccctggagaacctgagaacggtaaacgcatcggaagtgatttctctctcggaagcaccgtccagttttcatgtgatgaagattatgtactgcaaggcgcaaagagtattacttgccaaagaattgccgaggtgttcgcagcctggtcagaccacagacctgtttgcaaggtgaaaacatgtgggtccaatcttcaggggccttccgggacatttactagccccaacttcccgtttcagtatgacagtaacgctcagtgtgtgtgggtgatcactgcagtgaataccaacaaagtgatccagattaatttcgaagaatttgacctggagattgggtacgacacgctgactatcggagatggaggtgaagtgggcgacccacgcaccgttctgcaagtgttgaccggaagcttcgtccccgatctcattgtgtcgatgagttctcagatgtggttgcacttgcaaacagacgagagtgtcggaagtgtgggcttcaaggtcaattacaaggagattgagaaagaaagttgtggtgaccccgggacccccctctatggcattcgcgaaggtgatggattcagtaacagggatgtacttagatttgagtgtcaatttggcttcgagcttataggggaaaagtccattgtgtgccaggagaataatcagtggagcgccaatatccctatttgcatattcccttgtctgtcaaacttcacggctccaatggggacagttttgagcccggactaccccgaaggatacgggaacaacttgaactgtatctggaccattatcagtgatccaggttcgcgcattcatctgtcattcaacgactttgacttggagagtcagtttgacttcctggcagtgaaggatggggatagccctgaatcccccattctcggaacgtttactggcgccgaagtacctagccatctgacctccaacagccacatcctaagactcgaatttcaggccgatcattctatgagcgggcggggtttcaatattacatacaacacttttgggcataacgaatgtcccgatcctggaatccctattaacgccagaaggttcggcgacaacttccagctcgggtcttctattagtgtgatctgcgaggaaggctttattaagactcagggcactgagaccattacctgtatcctcatggacggcaaggtgatgtggtctggacttattccgaaatgtggggcaccctgtgggggtcatttttctgcgccttcaggcgtgatcctctcgccaggctggccaggttattacaaagatagtttaaactgcgaatgggttattgaagccgaaccaggacattctataaagataacctttgaaaggttccagacggagctgaattatgatgtcctggaagtccatgatggcccgaacctactgagccctttgctcggtagctataacggcacacaggtcccacagtttctattctcctcgagcaatttcatctatctgctcttcactacggataattcaagaagtaacaacggtttcaaaatccactacgaatctgtgaccgtgaatacgtattcttgtctagacccagggattccagtccacggcagacgttacggtcatgacttcagcattggttctacagtgtcttttagctgcgatagcgggtaccgcctctctcacgaagaaccactgctgtgcgaaaagaaccactggtggtcacacccactgcctacttgtgacgcactatgcgggggggatgtccggggcccgagcggtacaatcctctcgcctggttaccctgagttttatcctaattcgctgaactgcacgtggactgtggacgtcactcacggaaagggcgtgcagttcaacttccacaccttccacctggaagatcatcatgactatctgcttatcactgaaaatggcagctttacccaacccttggctcgactgaccggaagcgatctcccgcccactatcaacgctggcctctacggcaacttccgggcacagttgcgtttcatctccgactttagcatcagttacgaaggattcaatatcaccttcagtgaatataacttggagccttgtgaggaccctgggatcccccaatacggctcccgaattggcttcaactttggcattggcgacacactcacattctcttgctccagcggatatcggctagaaggtacgtccgaaatcatctgcctcggtggcggtagacgggtttggtccgccccacttcctcgttgtgtggcagaatgcggtgcaagcgcaactaataacgaaggcatactgctgagtccgaactaccctctgaattatgagaacaaccacgagtgcatctatagtatccaggtgcaggccggcaaagggatcaatatttcagcacggacattccatttggcccagggggatgtgttaaagatctacgacggcaaagacaagaccacacatctgctgggggcctttaccggtgctagcatgaggggactaacactgagcagcacaagcaatcaactctggctcgagtttaactcagacacagaaggcacagacgaaggtttccagctcgtatatacctctttcgagctcagccattgtgaggatccaggcatccctcagttcggttacaagatcagtgaccagggtcactttgcgggcagcactatcatttatggctgcaatcctggttacactctccatggttcatctctcctcaagtgcatgaccggagagcggagggcttgggattaccccctcccttcctgcattgccgagtgcggcggtcgtttcaaaggcgaaagctctggacgcatcctgtcaccaggatacccttttccatatgacaacaacctgagatgcatgtggatgattgaagtcgatccgggcaacatcgtgagcctgcagtttctcgctttcgacacagaggcgtcacatgacattttgagagtctgggacgggccacccgaaaatgatatgctgctcaaagagatttctgggagcctcatccctgagggaatccacagtacccttaatatcgtgactattcagtttgacaccgacttttatatcagcaaatcaggtttcgctatccagttctcctccagcgtggcaactgcctgtagggatcctggtgtcccaatgaatggtactcgcaacggggatggccgcgagcccggagatacagtcgtctttcagtgtgatccggggtatgaactgcagggcgaggagcggatcacatgtatccaggtggagaaccggtacttctggcagccttccccacccgtttgcatagccccttgtggaggaaatctgactggtagttcaggttttatattgtcgcccaatttcccccatccttacccccactctcgtgattgtgactggacgataacagtgaatgccgactacgtaatatcgctggcattcatctctttctcaatcgagccaaactacgatttcctgtacatctatgatgggcctgattcaaattcaccccttatcgggagctttcaagatagcaagctgcctgaaaggatcgagtcaagctctaatacgatgcatttagccttccgcagcgacggctccgtgtcatacactggttttcacttggagtataaggccaagttgcgggagagttgttttgatccgggaaacataatgaatggcaccaggctcggcatggactataaactagggtccactgtgacctactattgtgacgccggctacgtcctgcagggctattctacactcacgtgcattatgggtgacgatgggaggcccggatggaatcgcgctctgcctagctgccatgctccgtgtggctcaagaagcaccgggtcagaggggactgtgttgagtccaaactatccgaagaattactctgtaggacataattgcgtgtattcaattgccgttcccaaggagtttgttgtctttggtcaatttgtattttttcagacaagcttacacgacgtggtggaagtctacgacggacctacccaacagagcagcctcctctcatctctttccggatcccactctggcgaatcccttcctctttctagtggaaatcagattaccatccggtttacctcagtgggccctatcacggcgaaagggtttcacttcgtctatcaggcagtgcctcggactagtagcacacaatgtagctcagtgccagaaccacggttcggacggcgtattggcaacgaatttgcagtcggctctagcgtgctgtttgattgcaatcccggatatatcttacatggctccatcgcaattcgttgcgaaacagtccccaacagtctcgcccaatggaatgattcactgccaacatgcattgtcccttgcggcggtattctcactaaaaggaaaggaacaatcttatctccaggataccctgagccatacgataataatttgaactgtgtatggaaaatcactgtgccagaaggtgctgggatccaggtgcaggtcgtatccttcgcaactgagcataattgggactctctggatttctacgacggcggcgataataatgcacctcgcctgggaagttatagcgggaccacaattccacatctcctgaatagtacgagcaacaatctctaccttaactttcagagtgatatctccgtgagtgctgctggattccatctagagtatacggccattgggcttgattcttgcccggaacctcagactccatcgagcgggatcaagattggcgatcgctatatggtaggtgatgttgtgtcgtttcaatgcgaccaaggttattccctccagggacacagccacatcacttgcatgcctggccctgtccgtcggtggaactacccgattccaatctgtctcgctcagtgcgggggagcaatgagtgatttctccggggtgattctgtcgcctggattccccggcaactatccatcaagcttagattgcacatggactataaacttacctatcggtttcggggtgcatctgcaatttgtgaattttagcacagaaacaattcacgattatttagaggttcggtctggctcgtctgaaacatcaaccgtgatcggccggctgtctggtccccagatcccttccagtctcttttctactacacatgagacttcattgtactttcattcagattatagccaaaataagcagggcttccacatcgtgtatcaggcttaccaactgcagtcctgtcccgatccaaggccattccgaaacgggttcgttatagggaacgacttcaccgtggggcaaactatctctttcgaatgtttccccgggtacacactgatcgggaacagcgcccttacatgcctgcatggagtgtctcgaaactggaaccatcccttgccccgctgcgaagccttgtgcgggggcaacatcactgccatgaacggcacgatttattcaccagggtacccagatgagtatcccaactttcaggactgtttctggctggtgcgggtgcctcccggcaacgggatctacattaactttactgtccttcagaccgagcctatctacgactttataacggtctgggatggaccagatcaaaatagtccccaaatcggacagttctccggaaacacagcacttgaaagtgtttacagtacatcaaatcagattcttatcaaatttcatagcgattttaccacgtccggcttctttgtcctcagctaccacgcctaccagttacgcgtctgccagcccccaccaccagtgcctaatgcagagatcctgaccgaagacgatgaattcgagataggcgacataatccgctatcagtgtcttcccggctttaccttagtgggcaatgccatcctgacctgcagactgggagagagactgcagatggatggagccccccccgtctgccaagtgctttgccctgctaacgagctccgcttagattccacaggagttattctttctcctggataccccgattcctatcccaacctccagatgtgtgcctggagcatcagcgtggaaaagggctacaacataaccatgtttgtggaatttttccagaccgaaaaagagtttgacgtccttcaggtctacgatggacctaacatccagagcccggtactcatttctctgtccggtgattattccagcgcatttaacatcaccagtaatggacacgaggtgttccttcagtggtcagcagaccatggcaacaataagaaaggctttcgaattcggtacatagcattctattgttctacccccgagagccccccccacggatatatcataagtcagaccgggggacagttgaacagcgtggtaagatgggcttgcgacagaggcttccgcctggttgggaaatcaagtgcggtctgcagaaaatctagttatggctatcatgcctgggacgctcccgtgcctgcctgtcaagccatttcctgtgggattccgaaagcccccactaatgggggtatcctcaccaccgactacctggtggggacaagagtaacctacttctgcaacgatggatacagattaagtagcaaggagctaaccaccgctgtgtgtcaaagcgacggaacctggtcaaatcacaataagactccaagatgtgtggtggtgacgtgcccgtcaatcaactccttcatactggagcatgggcgctggcggatcgtgaacgggagtcactatgagtacaaaactaaggtggtgttttcgtgtgacccaggatatcacggccttggaccggcttcgattgagtgtctgccaaacgggacttggtcatggcgcaacgagcgcccatactgccagatcatttcttgcggcgaacttccaaccccacctaatgggaacaaaataggcacacagacaagctacggctccactgcaattttcacttgcgatctaggattcatgctggtgggaagcgccgtcagggagtgtctttcctccgggctgtggtcagagtctgagacacggtgcctcgccgggcactgcgggattcccgaactcattgtgaatggccaggtcatcggcgagaattacggatatagagacacagtcgtatatcagtgtaatcctggattcaggcttataggttccagtgttagaatctgccagcaggaccataactggagtggacaactgcccagctgcgttccggtatcttgtggccatcccggttccccaatctatggacgaacatccggaaatggatttaactttaacgacgtcgtaaccttttcttgcaacatcggatacctgatgcaaggtcctactaaagcacaatgccaggctaacagacagtggtcccatccgcctccaatgtgcaaggtcgtgaattgctccgaccccggcatccccgcaaatagcaaacgtgaaagcaagattgagcatggcaacttcacctatggtactgtggtattctacgattgtaaccccgggtattttctttttggaagcagtgtgttgatttgccaaccgaacggacaatgggacaagcccttacctgaatgcattatgatagactgtggtcaccccggcgttccgccaaatgccgtcctttccggagagaagtacacttttgggtcaactgtacactactcatgtacagggaagagaagtctcttagggcagtccagccgcacctgtcagctgaatgggcactggtccggtagtcagccacattgttccggcgatgccactggtacatgcggagatccaggtacccctggacatgggtcccggcaggagtctaacttcagaactaagtcaaccgtccgctacgcatgtgacacgggatatatccttcacggtagtgaagagcggacctgcctagcaaatgggtcctggaccggccggcagccggagtgcaaagctgtacagtgtggtaaccccggaaccactgcgaacggaaaggtgttccgcattgatggtacaactttctcatcaagcgttatctattcgtgcatggaggggtatatactgagcggaccaagtgtcagacagtgcaccgctaacggtacctggagtggaaccctgcccaattgcaccatcatttcgtgtggtgatccaggcataccagcaaatggactcagatacggcgatgattacgtagtcggtcagaatgtgtcgtacatgtgccaacctgggtataccatggaactgaacggtagcagaattcgcacatgtactatcaacggcacctggagtggagttatgcctacgtgccgtgccgtaacatgtcctacccccccacaaattagtaacggccgcctggaaggcacaaacttcgattggggattctctatatcttacatttgtagccctggttacgaactcagctttcctgccgtcttaacatgcgtggggaatgggacttggtccggcgaggtacctcagtgtctccccaaattctgcggagaccccggaattccggctcagggaaaacgcgaaggaaagagctttatctatcagtctgaggtctcgtttagttgcaacttcccctttattctggttgggagctctactcgcatttgtcaggctgatggtacatggtctgggtctagccctcactgcatagaaccaacgcagacatcttgtgagaacccaggcgttcccagacatggttcccagaataacaccttcgggtttcaggtaggttcggtggtgcagtttcactgcaaaaaaggtcacctgcttcagggatcaacaacaagaacttgcctgcccgacctgacatggagcggaatacagccggaatgtattccacacagctgcaagcagcccgagacacccgcccacgctaatgtcgtcggcatggatctgccaagccatgggtacaccctaatttacacatgccagcctggattcttcctggcgggcgggaccgaacacagagtctgccgcagcgacaacacctggacagggaaagtaccaatatgcgaggccggatccaagatcttggtgaaggacccaagaccagctttgggtactccttcaccaaagttatccgttcccgatgacgtttttgcccagaactacatctggaaagggagttacaattttaagggcagaaaacagcccatgactttgacggtgactagttttaacgcttctacaggtagagtaaacgccaccctgtcaaattccaatatggagctgcttctttcgggcgtgtataagagtcaagaggcccggctcatgctgcgaatctacctgattaaggtacctgcccatgcgtctgtgaagaagatgaaggaagagaactgggcaatggatggatttgttagcgccgaaccggatggtgctacctacgtattccaggggttcatccagggtaaagactacgggcagttcggtttgcagcgcctagggctcaacatgtccgaagggtccaattccagtaaccagccacatggcacaaacagcagttcggtggctatcgctattctcgtccccttcttcgcactgattttcgctgggttcggattttacctgtacaaacagcgcacagctcctaagacacaatacactggttgcagcgtgcatgaaaacaataacggtcaagccgccttcgaaaacccgatgtatgacacaaacgccaagagtgtggaaggaaaggccgtgcggttcgatcccaacctaaatactgtgtgcacaatggtgtag

SEQ ID NO: 259040 - DNA, 11124 bp, Artificial Sequence
  derived and/or modified sequence
atgaaaggcattcgtaaaggagagagcagggccaaggaaagcaagccctgggaacccggaaaacgcagatgtgccaaatgcggaaggctggatttcatcttgatgaaaaagatgggtattaagtcaggcttcaccttctggaatcttgtgttcttattgactgtctcttgtgtgaagggatttatctatacgtgcggaggaaccttaaaagggctgaatggcaccatcgagtctccaggctttccttacggttaccctaatggcgcaaactgcacctgggtcatcattgcagaggaaaggaatagaatccagatcgtcttccagtccttcgctctcgaagaggaatacgactatctctccctgtatgacggccaccctcatcctacgaatttcaggacccgacttacgggcttccacttgcctcccccagtgacaagcaccaagtctgtattctccctgcgtcttacctctgattttgctgttagtgcgcatggcttcaaggtgtactatgaggagcttcagtcctcctcctgcgggaatcctggcgtgcctccaaagggtgttctctatggaacgcggttcgacgtgggagacaaaatcagatacagctgcgttacaggatacattttggacgggcatccccagctcacatgcatagcgaactccgtaaataccgcaagttgggacttcccagtcccgatttgtagagccgaggatgcttgcgggggtactatgcgcggtagctccggaattattagctctcctagttttcccaacgaataccataacaatgccgactgcacttggaccattgtggcagaaccgggtgataccatctctctcatctttactgatttccaaatggaagagaaatacgactatttggaaatcgaaggctctgaacctcccacaatttggctctccggaatgaatattcctccgcctataatatccaataaaaattggcttaggctacactttgtcacagattctaaccataggtaccggggattctcagctccttatcagggaagctccactctgacacataccacttcaaccggggaacttgaggagcataataggacaacgacaggggctatagccgtggcctccactcccgctgacgtcacagtgtcgtctgtgaccgctgtcaccattcatagactcagcgaggagcagcgcgtccaggttacctctcttcgaaactctgggctggatcccaatactagtaaggatggcctgagtccccatccagccgatacccaaagcacacgccgaagaccaaggcacgctgagcaaattgaacgtaccaaggaacttgcagtggtgacccaccgcgtgaagaaagcaatagactttaagtccaggggcttcaaattattccccggtaaagataactctaataagttctctattctgaatgagggcggtatcaagacagcatccaacttgtgccccgacccaggggagcccgagaacggaaaacgtattggctccgatttctctctgggcagcaccgtgcagtttagttgcgacgaggactatgtgctgcagggcgcaaagtcaatcacttgccagagaattgccgaagtgttcgcggcttggtctgatcaccggcctgtatgtaaggtgaagacttgtgggagcaacttgcaggggcctagcggaacgttcacaagccccaattttccattccagtacgacagcaatgcccaatgcgtgtgggtgattaccgcggtcaacacaaataaagtgatccagatcaacttcgaggaattcgacctggagattgggtatgatactctcactatcggcgatggtggggaggtgggggatcccaggactgttctgcaggttctgaccgggagctttgtgccggatctgattgtgtctatgtctagtcagatgtggctccacctgcagaccgatgaatcagtaggatccgttgggttcaaggtgaattataaagaaatcgaaaaagagtcatgcggcgacccaggtacaccgctgtacggaattcgcgaaggtgacggattctccaaccgtgatgtgctccgcttcgaatgtcagtttggtttcgaacttatcggggaaaaatccatagtgtgccaagaaaacaatcagtggtccgctaacattccaatctgtatattcccttgcctgagtaatttcacagcgcctatgggtacggtgttgtcaccagattatccagagggctacggtaacaacttgaactgcatctggactatcatttccgatccgggaagcaggatccatctgtcgttcaatgattttgaccttgaatcgcagtttgactttctggccgtaaaagatggcgattctcctgaaagcccaatcctcggcacttttaccggagccgaagtgccatcccatttgaccagcaactcacatattctacggttggagttccaggcagatcatagtatgtccggacgcggatttaatataacatacaatacattcggacataacgaatgccctgaccctggcattcccataaacgctcgccgatttggcgacaatttccagctcggctccagcatttctgtcatttgcgaggagggttttatcaaaactcagggtactgaaacgattacttgcattctgatggatgggaaggtgatgtggtccgggcttatcccaaagtgcggagctccctgcggtggccatttttcggccccatccggggtgatcctgagtcccggatggccagggtactacaaagattcgctcaattgtgagtgggtcattgaagccgagcccggacattctatcaaaataacattcgaaaggttccagaccgaattgaattacgatgtgctggaggtgcatgatgggcctaatttactatctccattgttggggtcctacaacggaacccaggttccacagtttctgttcagcagctccaactttatctatttgctcttcaccactgacaacagccgaagtaataatgggtttaagattcactatgagagtgtgactgtgaatacatatagctgtcttgaccccggaattccagtccacggtagacgttacggacacgactttagtatcggctcaacggtgagtttcagctgcgactcaggatacagactgtctcatgaagagcctctgctgtgcgaaaagaatcactggtggagccatccactccctacctgcgatgctctctgcgggggtgatgtgagaggaccaagcgggactatcctgtctcctggctaccctgaattttatcccaacagtttgaattgtacatggactgttgacgtaactcatgggaagggggtccagtttaacttccacaccttccacctcgaggatcatcacgactatctgttaatcaccgagaatggcagctttacccaacctctagccagactcaccggatccgatctacctcctacaatcaatgccggactctatggcaacttccgggcacagttgcggttcatcagcgatttcagcataagttatgagggattcaatatcactttctccgaatacaacctcgagccgtgcgaggatccaggtattccccaatacggctcgagaataggcttcaattttgggatcggcgacactctgaccttcagctgctcctctggctaccggctcgagggcacatcagagatcatctgcctgggcggaggacggagggtgtggagcgctccactcccacgttgtgtggccgaatgcggggcatccgccacgaataacgaaggcatcctgttgagccccaactatccactgaattacgaaaataatcatgaatgcatctacagtattcaggtgcaggctggcaaaggcatcaatatcagtgcccgaacgtttcaccttgcccagggcgatgtgctgaaaatttacgacggtaaagataagactacccacctgctgggtgcgtttacaggcgcaagcatgaggggattaacactgtcatcaacttctaatcaactgtggctagaattcaacagcgacaccgaaggaacggatgaagggttccagcttgtatataccagtttcgaactatcgcactgcgaggatcccggaattccccaatttggttacaagatttccgaccagggccatttcgccggatctaccatcatctacggatgcaaccccggatatacccttcacggctctagtctcttgaagtgcatgacaggggaacgcagggcctgggattacccactgccttcctgtatcgccgagtgcggcggacgttttaagggagagtcatcaggacgcattctgagcccgggatatccttttccttatgacaataatctgaggtgcatgtggatgatagaagtcgatcctgggaacattgtttccctccagtttcttgccttcgatacggaagcctctcatgatattctccgcgtctgggatggaccccctgagaacgacatgctgctcaaggaaatctctggatccttgatcccagaggggatccactctaccctgaatatcgtcacaatccagttcgatacagacttctacatcagcaaaagcggtttcgcaatccagttttcctcatccgtggcaacggcttgtagagatcccggtgtgcctatgaacggtacaaggaacggggatgggagggaacctggagacactgttgtgttccagtgtgatcctggttatgaactccaaggggaggaacgaattacctgcatccaagtcgaaaatcggtatttctggcagccttcccctcccgtttgcattgcgccatgtggcggtaacctaaccggctccagcggatttattctgagtccaaatttcccccatccttatccacactcgcgcgattgtgattggacaattaccgtcaacgcagactatgtcataagtctggcattcattagttttagcatagagccaaattacgacttcttgtatatttacgacggcccagatagcaatagccctttaattggttccttccaagactccaagctcccagaacgaattgaatcgtcttcgaacaccatgcacttggcatttcgctctgatggcagtgtatcttataccggattccatctggagtataaggccaaacttcgggaaagctgtttcgaccctggcaatattatgaatggcacacggttagggatggattacaaactcggtagcactgtcacctattattgcgacgcagggtatgtcttacagggctacagtaccttgacctgcataatgggggacgacggacggcctggctggaatagagccctgccctcctgccatgccccttgcggatcgaggtctactggatctgaaggcaccgtgctgtcacctaactatcctaagaattatagtgtgggtcataactgcgtatatagcatcgcagtgccaaaggaattcgtcgtatttggccagttcgttttcttccagacaagtttacacgacgtggtagaagtgtatgacgggcctacccagcaatctagcctcctaagttccctctcaggatcccattctggcgagagcctgccactgtcaagcgggaatcagattaccatcagatttacctctgttgggccaatcacagctaagggattccactttgtgtatcaggcagttccgagaacgagctcgactcagtgctcttccgtccctgagccaaggttcggtcggcgaatcggaaacgaatttgccgtggggagctctgtgttgttcgattgtaaccctggatatatcctgcacggcagtatcgctatcaggtgtgaaacagtgcctaattccctggcccaatggaacgattcgctgcccacctgcatcgttccctgtggcggaatccttacaaagcggaagggcactatcctgtctccaggttaccctgagccatacgataataatcttaactgcgtgtggaaaatcacagtgccggagggtgccggaatccaggtacaggtagtgtctttcgccacggagcataactgggactccctagatttctatgatggtggggataataatgccccaaggctgggatcctacagcggcaccaccataccccacctactaaactctacctccaataacctgtacctgaatttccagtcagatatctcagtgtcggcagctgggttccatcttgaatacacagcaatagggctggactcatgccccgagcctcagacgccaagctcaggaattaagataggtgatcgatacatggtgggagacgttgttagcttccagtgtgatcagggctacagtttgcagggacacagccatatcacatgcatgccgggaccagttcggaggtggaattacccaatcccaatatgtctggcacagtgtggcggtgccatgtcagacttctctggtgttatactctcgcctggctttccaggcaattacccatcgtctcttgattgtacgtggacaattaacttaccgataggattcggcgtacatctgcagtttgtaaacttctcaaccgaaaccattcatgattatctggaggtgcgaagtggatctagcgaaacctctacagtgattggccgtctgagtggcccacagattcccagttctttgttctcaaccactcatgaaaccagtttatacttccactccgattactctcagaataaacaggggtttcatatagtgtaccaggcatatcagctccagtcctgcccagaccctaggccattccggaacgggtttgtaattggtaacgactttactgtgggccaaaccatttccttcgagtgcttccccggttacaccctcataggaaatagtgctctgacatgcctacatggtgtctcccgaaattggaaccatccattacccagatgtgaggccctgtgtggtgggaatatcaccgcgatgaatggcactatctattctcctggctaccccgacgagtatccaaactttcaggactgcttttggctggtgcgcgtgccaccgggtaacgggatttatatcaacttcaccgtgctccagaccgagcctatctacgattttattacagtgtgggacgggccagatcaaaacagcccccaaatcgggcaattctcggggaacacagctttagagtctgtgtattccacaagcaaccaaatcctcatcaagttccacagcgacttcaccacgagcggatttttcgtcctttcttaccatgcctatcagctccgcgtatgccagccacctcctcccgtacccaatgctgaaatcctcactgaggacgacgagtttgaaattggtgatatcatccgataccaatgcctgccaggattcacccttgtaggtaacgctatcttgacatgtcggttgggggagcggctacagatggacggcgctccgcctgtgtgtcaggtgttgtgtcccgctaatgagttgaggctggacagcaccggagtcatccttagtcctggctatccagacagctaccccaacctgcaaatgtgcgcttggtctatatccgtggagaaggggtacaatattaccatgtttgtcgaattcttccagacagaaaaggaatttgacgttctgcaggtgtacgatggcccaaatattcagtcaccggtacttatcagcctgtctggggattactcctcagccttcaatatcacctccaatggacatgaggttttcctgcagtggtctgcagaccatggtaacaacaaaaagggttttcggatcaggtacattgccttctattgctctacaccagagtcgccgcctcatggctacataatatcacagaccgggggtcaacttaacagtgtagttcgatgggcatgcgatcgcggattcagattagtgggaaagtccagcgcagtatgtcgcaagagctcctacggctaccatgcctgggatgcgcctgtccctgcttgtcaggctattagctgcgggatccccaaagccccaaccaacgggggaatactgaccaccgattacctcgtgggcactagggtgacgtacttctgtaacgacggataccgtttgagctctaaggaactgactactgctgtctgccagagcgacggcacctggagtaaccacaataaaacacctaggtgcgttgtcgtaacatgccctagtatcaactctttcatcctagagcacggcagatggagaatcgtgaatgggtcccactatgagtacaaaactaaggtggtatttagctgtgatcccggataccatgggttgggcccagcttccatcgagtgcctgcctaacggaacttggtcgtggcggaacgaaagaccatattgtcagattatctcctgtggtgaactgccaactcctcccaacgggaacaagatcggcactcagacctcctacggtagtaccgcaattttcacctgcgacctgggattcatgctggtaggatctgcagtgcgagaatgtctgtcatccggcctgtggtcagagagcgaaactcgctgtctggccggacattgcggcatccctgaactcatcgttaatggacaggtcattggggaaaattatgggtatcgggatacagtagtctatcaatgcaaccctggctttcgtctgatcggaagctccgttaggatctgccagcaagaccacaactggagcggacaattacccagttgcgtgcccgtttcctgtggccacccagggtcgccaatttatggtcggactagtggcaacgggttcaacttcaatgacgtcgtgacattctcttgcaacatcggctacttgatgcagggtcccacaaaggcccagtgccaggccaatcggcagtggagccatccccctcccatgtgcaaggttgtgaactgttctgatccagggataccagccaatagcaaacgagaaagcaaaattgaacacgggaactttacctacggcacagtggtattctacgattgcaaccctgggtacttcctatttggttcttcagtgttaatctgccagcctaatgggcagtgggacaaacccctacctgaatgcatcatgattgactgcggccacccaggtgtgccgcctaatgccgttttatctggtgaaaagtacacattcggtagtacagtccattactcttgtacaggtaaacgatcgcttctgggccagagtagtcggacctgccagctgaacggccattggtcaggctcccagccgcactgctctggtgatgcaacagggacatgtggtgatcctggtacacctgggcacggatccaggcaggaaagcaacttcaggaccaaatccactgtgagatacgcatgcgacaccggctatatcctccacggaagtgaggagagaacctgtttggcgaatggatcctggacaggtaggcagcccgagtgtaaggccgtccaatgtggtaaccccggaaccactgcgaacgggaaggttttccggatagatgggacaacattctcaagcagtgtgatctacagttgtatggagggctacattctgagcggtcctagcgtgcggcagtgtacagccaatgggacatggtcaggcacacttcccaattgcaccataatttcctgtggagatcccggtatcccagccaacggcttgcggtacggagacgactacgtggtgggacaaaatgtgtcctacatgtgccagcccggatacaccatggagttgaacggctctcgcatccggacgtgtaccatcaacgggacctggtccggtgtgatgcctacttgtagagcggtcacctgtcccacaccgccacagatcagtaatggccgtctggaggggacaaactttgactggggtttctccatctcatacatttgctcaccgggatatgagctgtcatttcctgccgtcttgacatgcgtgggcaacgggacgtggtccggggaagtaccccagtgcttacccaagttctgtggtgaccccggaatcccagcacagggaaaacgcgagggcaagagcttcatttatcagtcggaggtttccttcagctgtaatttcccatttatactggtgggcagtagtactagaatttgtcaggcagacggcacatggtccgggtcttcccctcattgtatagaacccactcagacaagctgtgagaacccaggcgttcctcgccacgggtcccagaacaatacatttggctttcaggtgggcagcgttgtacaattccattgtaaaaaaggccatttactgcaaggttcaacgacacggacctgcctgcccgacctcacttggagtggaattcagcccgagtgtattcctcattcctgtaagcagcccgagactcctgcccacgccaacgtagtgggaatggacttgcccagccacgggtacaccttgatttacacatgccaacccggattcttcctcgcgggtgggactgagcacagagtctgccggtctgacaacacctggaccggcaaagtgcctatctgtgaagctggttcaaaaatcctagtaaaggatcccagacctgcgctcggcaccccgagtcctaaactcagcgtacccgacgacgtctttgcgcagaattacatctggaagggctcttataacttcaagggacgtaaacaaccaatgacactgaccgtgacctctttcaatgcatctacagggagggtgaacgccactctgtccaattctaatatggaattactcttgtctggcgtctacaagtcccaggaagctagattgatgctcagaatctacctgatcaaggtccctgctcacgcatccgtcaagaagatgaaagaggaaaactgggcaatggatggatttgtgagcgccgaaccagatggagcaacatacgtttttcagggcttcattcagggaaaggattatggacaattcggcctacagcggctgggcttgaatatgtccgagggctccaatagctctaaccaaccccacgggacaaatagctcaagcgtggccattgccatcctcgtacctttcttcgcactgatctttgcgggatttggattctacctgtacaaacagcggactgccccaaagacgcagtatactggatgtagtgtgcacgagaataacaatggacaagcagcattcgagaaccccatgtatgatacaaatgccaagtccgtggaggggaaggccgttagatttgaccccaatctgaataccgtgtgcaccatggtatac

SEQ ID NO: 259041 - DNA, 13212 bp, Artificial Sequence
  derived and/or modified sequence
tggtggttgctataacgagccagaattggggtagattttggtggaggggaaaaaacgcacaagaaaagacagaatccagagtagcggagactttgtgcccccgttggagagatggttgagtcctcgtcaaggttgctgtggtatcccagaaacaccattcactccgagctgtgaccgcgcaccaacaacagcaacaactccactgcgccgggctgaggagcaggaattaggagctcgcgaataatatgaaagggatccgcaaaggggaaagccgagcaaaggaatccaaaccctgggagcctggcaagcgaagatgcgctaaatgtggccgcctagacttcatcctgatgaagaaaatggggattaaaagtggatttacgttttggaacctcgtctttttattgacggtgtcttgtgtgaaaggatttatttatacatgtggtggaactttaaaaggacttaatggcactatagaaagccctggttttccatatggatatccaaatggtgcaaactgcacatgggtaataatagcagaagaacgaaatagaatacaaattgtttttcagtcatttgctctagaagaagaatacgactacttatcattatatgatggacatcctcatcctacaaactttaggacaaggttaacaggattccatctgccacctccagtgacaagtaccaaatctgtgttctcactacgtttgaccagtgattttgcagttagtgctcatggatttaaggtatattacgaagaattgcagagtagctcttgtggaaatcctggtgttccacccaaaggtgtattatatggcacaagattcgacgtcggggacaagatccgctacagctgtgtaactggatacatccttgatggccaccctcagctcacctgcatagccaattcagttaatacagcttcgtgggattttcctgttcctatctgtagagctgaagatgcttgtggaggaacaatgagaggatccagtggcatcatatccagccctagttttcctaatgagtaccataacaatgctgattgcacttggaccattgtagcagagcctggggacacaatttcactcatatttactgattttcaaatggaagagaaatatgattacttagaaatagaaggttctgagccacctaccatatggttatctggaatgaatataccaccaccaattatcagcaacaaaaactggctcagactgcattttgttacagacagcaatcatcgataccgtggatttagtgctccctatcaaggttcttctacattgacccacactacctccactggtgagttagaggagcataacaggactaccactggtgctattgctgttgctagcacacctgcagatgttactgtatccagtgttacagctgtcaccatccatagactttccgaggaacagcgagtgcaagttacgagtctcagaaattcaggtctggaccccaacacgtccaaggacgggctctctcctcatccagcagatacacaaagtaccaggagaagaccaagacatgctgaacagatagaaagaactaaagagcttgcagttgttactcatagagtgaaaaaggccatagattttaaatctagaggatttaaattgtttccagggaaagacaacagcaacaagttttctatcttaaatgagggaggtattaaaacagcttccaatttatgcccagatccaggagaaccagaaaatgggaagagaatcggatcagattttagccttggatcaactgtgcagttctcttgtgatgaagattatgtcctacagggcgcaaagagcatcacctgtcaacggatagctgaagtttttgctgcttggagtgatcacaggcctgtgtgtaaagtgaaaacgtgtggctctaatcttcaaggaccaagtggtacctttacatctcccaactttccgttccagtatgacagcaatgcacaatgtgtctgggtcatcacagcagtgaatacaaataaggttatccagataaattttgaagaatttgatctggagattggctatgataccttgacaattggcgatgggggcgaagttggagatcctaggacagtgctccaagtgctgactggaagctttgtaccagacttgatagtgagcatgagtagccaaatgtggctgcaccttcaaacggacgaaagtgttggatctgttggtttcaaggttaactacaaagaaattgagaaagaaagttgtggtgatcctggtacacccttatatggaattagagaaggcgatggattttctaatcgtgatgttttaaggtttgaatgccagtttgggtttgaattaattggagagaaatccattgtttgtcaagagaataaccaatggtctgcaaacatacccatctgtatctttccctgcctgtctaactttactgcaccaatgggaacagttctttctcctgattacccagaagggtatggaaataatttaaattgcatctggacgataatctctgatccagggagccggatacatctttctttcaatgactttgacctggaatcccagtttgatttccttgctgttaaagatggtgactctccagaatccccaattcttggaacctttactggggctgaggtgccttcccatcttactagtaatagtcacatactgcgattggaatttcaggctgaccactcaatgtcaggacgtggctttaacatcacttacaacacatttggacataatgaatgccctgatcctggaataccaatcaatgcacggcggtttggggacaactttcaattaggaagttcaatttcagttatttgtgaagaaggatttattaaaacccagggaacagaaacaattacatgtattcttatggatggaaaagtaatgtggagtggactgattccaaaatgtggagccccatgtggtggccatttttcagctcccagtggagtgattctctcaccaggatggccaggatactacaaagactctttgaattgtgagtgggtgattgaagctgaacctggacactctatcaaaattacatttgaaagatttcagactgaactgaattatgatgttctggaagttcatgatgggccaaatcttctgtcacccttgcttggatcttacaatggcacccaagtgccccagtttctatttagtagcagtaattttatataccttctatttacaacagacaacagtcgttccaataatggtttcaagattcattatgaaagtgttacagtgaacacgtattcttgtttggaccctggcatacctgtacatggccgtcgctatggtcatgatttctccattggctctactgtttcatttagttgtgattcaggatacaggttgagtcatgaagagccccttctatgcgaaaaaaaccactggtggagtcatccacttccaacctgtgatgcattatgtggaggagatgttagagggcctagtggaacaatcttatcacctggttacccggaattttatccaaattctctgaattgtacatggactgttgatgtaacccatggaaaaggtgtgcagttcaacttccacacttttcatttggaagaccatcatgactacttactgatcacagagaatggcagttttacccaaccactggcacgcctgactggttcagatcttcctccaacaatcaatgctggtctctatggaaatttcagggctcaattgcgtttcatttcagatttttcaatatcatatgaaggatttaacataacattctctgaatataaccttgaaccttgtgaagatcctggcattcctcaatatggtagtcgaatcgggttcaactttgggattggtgacactctgaccttctcatgctcttcgggttatcgactggaaggaacatcagagatcatctgtcttggtggtggccgacgagtgtggagtgcacctctgccaaggtgtgtggctgaatgtggtgcatctgcaacgaataatgaaggaattttgctgtctccaaattatccactcaactatgaaaacaaccatgaatgcatttatagtattcaggttcaagcaggaaagggaatcaatatttcagccagaacatttcatttagcacaaggagatgttcttaagatttatgatggaaaagataaaacgactcatctactaggtgcttttactggtgcatctatgcgcggactgacacttagtagtacttcaaatcaactctggctagaatttaattccgatactgaagggacagatgaaggctttcaacttgtgtataccagttttgaactctcacactgtgaagatcctggcattccacaatttggatacaagatcagtgaccaaggccactttgctggtagcaccatcatttatggatgcaatccaggctacactctccacggaagtagccttctcaagtgcatgacaggggagagaagggcatgggactatcctctgccttcctgtattgctgaatgtggaggtcgttttaaaggagaatcatcaggaagaatcttatctcctggctatccttttccatatgacaataacctgcgttgcatgtggatgattgaggtagatcctggaaatattgtcagcttgcagtttcttgcttttgatacggaagcatcacatgatatactccgagtctgggacggtccaccagaaaatgatatgcttttaaaggaaattagtggatctcttattcctgaaggaattcatagcaccctcaatatagtaaccatccagtttgacacggatttttatattagcaaatctggatttgcaattcagttttcaagttctgttgccactgcgtgtcgtgacccaggggtccccatgaatgggactcgaaatggggatggaagagaacctggggacactgttgtttttcaatgtgacccaggatatgaacttcaaggagaggaaagaataacctgcattcaggtagaaaatcggtacttctggcagcccagcccaccagtctgtatagcaccctgtggaggcaatttaacaggatcttcaggctttattctttcaccaaacttccctcatccatatccgcatagcagagactgtgactggactatcaccgtcaatgcagactatgttatctccttggcgttcatcagttttagcatagaaccaaactatgacttcctctatatctatgatggaccagacagtaatagcccactgattggaagttttcaagacagcaagttaccagagagaatagaaagcagctcaaatacaatgcatttggcttttcggagtgatggatctgttagttacactggatttcatctagaatacaaagcaaaactgcgagagtcctgctttgatccaggcaatataatgaatggcaccagacttggaatggattataaattagggtcaacagtcacctattactgtgatgctggttatgttcttcaaggttattcaacactcacctgtatcatgggagatgatggaagacctggatggaatagagccttgccaagttgtcatgcgccctgtggaagtcgttcaacaggttcagaaggcactgttctatcaccaaactatccaaaaaattacagtgtgggacataattgtgtttattctatagcagttccaaaggagtttgtggtgtttggccagtttgtatttttccagacatcactccacgatgttgttgaggtgtatgatgggccaactcagcaatcttctctgttatcttccctctcaggatcccattcaggagaatcacttccactgagttcaggtaatcagatcacaattcgatttacttcagttggaccaataacagctaagggatttcactttgtttaccaagctgttcctagaacaagttctacacaatgcagttctgtgcctgaaccaagattcggaagaagaattggcaatgaatttgcagtcggttcatcggttctttttgattgtaatccaggatatattctccatggatccatagcaattaggtgtgaaacagtgcccaattctttggcccagtggaatgattccttacctacttgtattgtgccctgtggtggaattttaactaagcgcaaagggactattttgtcacctggataccctgagccttatgacaacaatctgaattgtgtgtggaagatcacagtgccagagggagctggcattcaagtgcaagttgttagctttgctacagaacataattgggattctctggacttttatgatgggggagacaacaatgctccaagacttggaagctattcaggaacaacaataccccatcttttgaatagtacgtctaataatctgtatctaaattttcaatcagacatcagtgtttctgctgcaggatttcatcttgaatacacagcaattggtttggattcctgtcctgaaccacaaactcctagcagtggaattaaaattggagacagatatatggttggagatgtagtatcctttcagtgtgatcaaggatattctcttcagggtcactctcacattacatgtatgccaggacctgtaagaagatggaattatccaatcccaatttgtttagctcagtgtggtggtgctatgtcagacttcagtggtgtgatcctcagtcctgggtttcctggaaactatcccagcagtttagattgcacatggacaataaatctacccataggttttggtgtacatctccagtttgtaaatttttctacagaaaccatacatgattatttggaagtacgaagtggatcctcagaaactagtactgttattggccggcttagtggtcctcaaataccatcttccttattcagcaccacccatgaaaccagcttatattttcacagtgactattcacaaaacaaacaagggtttcatattgtataccaagcctatcagttgcaaagctgtcctgatccacgcccgtttcgaaatggttttgtaattggtaatgattttactgtgggtcaaaccatttcatttgaatgtttcccaggatacacattaattggaaattcagctctcacatgccttcacggagtcagtcgtaattggaatcatccacttccaaggtgtgaagctctttgtggtgggaatataactgcaatgaatggcaccatttattctcctgggtatcctgatgaatatccaaactttcaagattgtttttggcttgtaagagtaccccctgggaatggcatctacatcaattttactgtccttcaaacagaaccaatatatgatttcattactgtatgggatggaccagaccaaaattcacctcagatcggtcagttcagtggcaataccgctttggaatcagtctacagtacttcaaatcagattctaatcaaattccacagtgatttcacaacaagtggcttttttgtgctcagttatcacgcctatcaactaagggtgtgccaacctccaccacctgtgcccaatgctgaaattttgacggaagatgatgaatttgaaataggtgatattattaggtatcagtgtcttccaggatttactttagttggtaatgcaattctgacgtgcagattaggagaacgactgcagatggatggagcacctccagtttgtcaagtgctctgtcctgccaatgaattacggctagattctactggagtcatattgagccctggatatcctgacagttacccaaatcttcaaatgtgtgcatggagcatttcagtggaaaagggttataatatcaccatgtttgtagaattcttccagacagaaaaggaatttgatgttcttcaggtgtatgatggaccaaatattcaaagtccagtgcttatttccctcagtggggattattcatctgcttttaatataacaagcaatggtcatgaagtatttcttcagtggtcagcagatcatggcaataacaaaaaaggcttccggataagatatatagctttctactgtagtacaccagaatccccacctcatggatatattatcagtcagacaggtgggcagcttaacagtgtggtccgttgggcctgtgatcgaggattccgacttgttggaaaaagcagtgctgtgtgcagaaagtcttcctatgggtatcatgcatgggatgcgccagtccctgcctgtcaagcaatttcctgtgggattcctaaagctccaacaaatggaggaatactaacaacagactatttggtaggaacgcgagttacctatttttgtaatgatggatatcgattgtcatccaaagaactcactacagctgtatgccaatcagatggaacatggagcaatcataacaagacccctcgctgtgttgttgttacatgtccaagcatcaattcctttatcttggaacatggaagatggcgaattgtgaatggctcccattatgaatacaaaaccaaagtagttttcagctgtgaccctggttatcatggactaggtcctgcctccatcgaatgtcttcctaatggtacttggagttggagaaatgaaagaccatattgccaaattatttcctgtggagaactacctacacctccaaatggaaataagattggaactcaaacttcatatggctcaacagctatctttacctgcgacttgggattcatgcttgtgggctctgctgtaagggaatgcctttcctcaggtctttggagtgaatctgaaaccagatgcctagcgggtcattgtggaattccagaactgattgtgaatggtcaagtcattggagaaaattatggatatagagacacagttgtatatcaatgtaatcctggttttcgattgattggttcttcagtgaggatatgtcaacaggatcacaattggtctggtcagctcccatcctgtgtgcctgttagctgtggtcaccctggtagtccaatttatggaagaacaagtggaaatgggttcaactttaatgatgtggtaacattctcatgcaatattgggtatcttatgcaagggccaacaaaggcacagtgccaggccaacagacagtggagccatcctccacctatgtgcaaagtggtcaactgttctgatcctggaattccagccaattctaaaagagaaagtaaaatagaacatggaaattttacttacggcactgtggtattctatgactgcaatcctggatattttttatttggatcttcagttttgatatgtcaaccaaatggacaatgggacaaacctttaccagaatgtatcatgattgactgtggacaccctggcgttcctcctaatgcagtcctgtctggcgagaagtatacttttgggtctactgttcactattcctgcacaggaaagcgttcccttttaggccagtcatcaagaacctgccaattgaatggccattggagtggatcacaacctcattgttcaggtgatgctactgggacatgtggcgatccaggtactcccggccatggctctagacaggaaagcaatttcagaactaaaagtactgtacgttatgcttgtgatactggttacatccttcatggctcagaagaaagaacatgtttagctaatggcagttggaccggaaggcagccagagtgcaaagctgtgcagtgtggtaacccaggaaccacagccaatgggaaagtcttccgaattgatggcacaacattttctagttcagtcatttattcctgcatggagggatacatcctttctggaccttcagttagacagtgcacagccaatggaacatggtctggaactttacctaactgtacaataatcagttgtggagacccaggtataccagccaatggactgagatatggagatgattatgtggttggacaaaatgtttcttacatgtgccagccaggctacacgatggaattgaatggctccagaatcaggacttgtacaattaatggcacatggagtggagtaatgccaacttgtagagctgttacctgcccaactcctccccagatctctaatggaaggctggaaggaacaaatttcgactggggctttagtattagctacatctgttctccaggctatgagctatccttccctgctgttttgacctgtgtagggaatggtacctggagtggtgaagtaccgcagtgcttaccaaagttttgtggtgaccctggtatacctgcccaaggaaaaagagaaggcaaaagctttatataccagtcagaggtttcattcagctgcaattttcctttcatattagtgggatcaagcaccagaatatgtcaagcagatggcacttggagtggttcatcacctcactgcatagagcctacccaaacctcttgtgaaaacccaggtgtgcctcggcatggatctcagaacaatacattcggatttcaagtaggaagtgttgtacagttccattgcaaaaaaggacaccttctccaagggtctacaacacgcacctgcctccctgatcttacgtggagtgggattcagcctgaatgcataccccacagctgtaaacagccagaaactcctgctcatgcaaatgtcgtagggatggaccttccatctcatgggtatacactgatttatacctgtcagcctggcttcttcttagcaggtggaacagaacatagagtgtgtagatccgataacacctggactggaaaagttcccatttgtgaagctggttctaaaatattggtgaaagatcctagacctgcactgggaacacccagcccaaagctaagtgttcctgatgatgtatttgcccaaaattatatatggaaaggctcttacaatttcaaaggaaggaaacaacccatgaccttaacagttactagtttcaatgcttccactgggagagttaacgcaacactgagcaatagcaacatggagctgctactttcaggggtatataaaagccaggaagctcgcctaatgttacgcatatatcttattaaagtacctgctcatgcttctgtgaagaaaatgaaggaagaaaattgggcaatggatggctttgtttctgctgagcctgatggagctacttatgtatttcaaggatttattcaaggcaaagattatggacaatttggcctacaaagactgggactgaatatgtcagaaggttcaaattcttcaaatcaacctcatggtacaaatagtagttctgtagccattgctattcttgtgcctttttttgcacttatatttgcaggatttggattttatctttataaacaaaggactgcacctaaaacacagtatacaggatgttcagttcatgaaaataacaatggccaagcagcttttgaaaatcccatgtatgacaccaacgcaaagtcagtggaagggaaggcggtacgatttgatcccaacttgaacacggtttgcacaatggtataacgaggcaacctttgccttcttcagaagcttggaaatcgacacacaaaacagtgcacatttagttcactgctaaacaaattaaagcacacttttcaggacttgctgggtcaccttttcctgaggaatgatacagaagagtgttttttcataaactggaccataattcttcatgtttaccatggagagttttacagaaatttggctgcactctgagagtgcttactcacagtttatttgctttttttaaaaaggagattattctaaaatataaacttatttgcatatattggaggagcatccactatcagtatttctgtgctttataaactatattagagggactgggtttaaaaaaaaagatatagggtagaaataagagctatacttacaagagtcaatagatcactgacttctctttaactgtcctgagctacatcacgcccacaaatctgtctttcataccactctatctgccattcattcttgttaaatgaggcattgttttctttatttaagattgagttatgactttaaatgtttatgagctagtttatgcctcggaagacataaggtttcccattccaatttgaatctttctatttctttagcatcatattgctcttcttcttttagactggttgtcatagtttctgcaaagggcaagttcattgtgctaccctcccaattcccccattatggagtaaccagtattattcagtgagctatggggtagtgtttcactccttgcttcaatatggttttttcctatttatttttattattttttaatcccaaatgtgatagtagcttcagtatgtttcctcacccaaaaaccatttggctggcagaaattatctagaaaaattattattttgcagttatctgagacaccaaacttaccatcctttattttacaatatttttgatcgaccaaataaaatgtcctaataatctactctatttatatctacatttccttccagctgagtcttcaaatttagcattattttgacacttttaattttcatttaacaatggattagaaaaatattttggtctagccactaaacataatgactgaaaaaaattattattataaatcaccaatataaatttattgcctacaattgtggacttatcatatttttatatatttttaaatttctgtacctttattgttaaacaccaagtttcacatacaagaggtttctttcattgtcaaattaagatatgtatttgtaagttattggtggctcatttaaactgtatcatacagtaatgccagcatttttatttaataggtcatcgtcttccttttatagctgttttacttcattgaatacgatcatgtacccagtgttaactctttgttgttgtccctttcaaatatggataactctgtgaacagtcttgactttttgtatcatgagacagagtgcctaagagaaacccttgcacctgggagcgctgcttggctctatctctacaacatttaatgaatttcttgtaaaccactttgagatacattgttttggaaattcatacaattttctcaacatggtactctactggcaggatgcagttttaaattttatgccatcagttatttattcttgtttattcaaatgactgcaataacaatgattcattcattaatgttaaggctaatacatttaagatcttgtttaaacaatgtttcttctgcaactggctactcctcttatattaatgcatacacttttgtaaagaagtatatttttatgaaaagaaactttgtaaaagtatgatgtaaattttcagtgcaatgtaaacaaaataaaaatggataattgcttttgtaaaa

SEQ ID NO: 259042 - DNA, 11124 bp, Artificial Sequence
  derived and/or modified sequence
atgaagggcatcagaaagggcgagagcagagccaaggagagcaagccctgggagcccggcaagagaagatgcgccaagtgcggcagactggacttcatcctgatgaagaagatgggcatcaagagcggcttcaccttctggaacctggtgttcctgctgaccgtgagctgcgtgaagggcttcatctacacctgcggcggcaccctgaagggcctgaacggcaccatcgagagccccggcttcccctacggctaccccaacggcgccaactgcacctgggtgatcatcgccgaggagagaaacagaatccagatcgtgttccagagcttcgccctggaggaggagtacgactacctgagcctgtacgacggccacccccaccccaccaacttcagaaccagactgaccggcttccacctgcccccccccgtgaccagcaccaagagcgtgttcagcctgagactgaccagcgacttcgccgtgagcgcccacggcttcaaggtgtactacgaggagctgcagagcagcagctgcggcaaccccggcgtgccccccaagggcgtgctgtacggcaccagattcgacgtgggcgacaagatcagatacagctgcgtgaccggctacatcctggacggccacccccagctgacctgcatcgccaacagcgtgaacaccgccagctgggacttccccgtgcccatctgcagagccgaggacgcctgcggcggcaccatgagaggcagcagcggcatcatcagcagccccagcttccccaacgagtaccacaacaacgccgactgcacctggaccatcgtggccgagcccggcgacaccatcagcctgatcttcaccgacttccagatggaggagaagtacgactacctggagatcgagggcagcgagccccccaccatctggctgagcggcatgaacatccccccccccatcatcagcaacaagaactggctgagactgcacttcgtgaccgacagcaaccacagatacagaggcttcagcgccccctaccagggcagcagcaccctgacccacaccaccagcaccggcgagctggaggagcacaacagaaccaccaccggcgccatcgccgtggccagcacccccgccgacgtgaccgtgagcagcgtgaccgccgtgaccatccacagactgagcgaggagcagagagtgcaggtgaccagcctgagaaacagcggcctggaccccaacaccagcaaggacggcctgagcccccaccccgccgacacccagagcaccagaagaagacccagacacgccgagcagatcgagagaaccaaggagctggccgtggtgacccacagagtgaagaaggccatcgacttcaagagcagaggcttcaagctgttccccggcaaggacaacagcaacaagttcagcatcctgaacgagggcggcatcaagaccgccagcaacctgtgccccgaccccggcgagcccgagaacggcaagagaatcggcagcgacttcagcctgggcagcaccgtgcagttcagctgcgacgaggactacgtgctgcagggcgccaagagcatcacctgccagagaatcgccgaggtgttcgccgcctggagcgaccacagacccgtgtgcaaggtgaagacctgcggcagcaacctgcagggccccagcggcaccttcaccagccccaacttccccttccagtacgacagcaacgcccagtgcgtgtgggtgatcaccgccgtgaacaccaacaaggtgatccagatcaacttcgaggagttcgacctggagatcggctacgacaccctgaccatcggcgacggcggcgaggtgggcgaccccagaaccgtgctgcaggtgctgaccggcagcttcgtgcccgacctgatcgtgagcatgagcagccagatgtggctgcacctgcagaccgacgagagcgtgggcagcgtgggcttcaaggtgaactacaaggagatcgagaaggagagctgcggcgaccccggcacccccctgtacggcatcagagagggcgacggcttcagcaacagagacgtgctgagattcgagtgccagttcggcttcgagctgatcggcgagaagagcatcgtgtgccaggagaacaaccagtggagcgccaacatccccatctgcatcttcccctgcctgagcaacttcaccgcccccatgggcaccgtgctgagccccgactaccccgagggctacggcaacaacctgaactgcatctggaccatcatcagcgaccccggcagcagaatccacctgagcttcaacgacttcgacctggagagccagttcgacttcctggccgtgaaggacggcgacagccccgagagccccatcctgggcaccttcaccggcgccgaggtgcccagccacctgaccagcaacagccacatcctgagactggagttccaggccgaccacagcatgagcggcagaggcttcaacatcacctacaacaccttcggccacaacgagtgccccgaccccggcatccccatcaacgccagaagattcggcgacaacttccagctgggcagcagcatcagcgtgatctgcgaggagggcttcatcaagacccagggcaccgagaccatcacctgcatcctgatggacggcaaggtgatgtggagcggcctgatccccaagtgcggcgccccctgcggcggccacttcagcgcccccagcggcgtgatcctgagccccggctggcccggctactacaaggacagcctgaactgcgagtgggtgatcgaggccgagcccggccacagcatcaagatcaccttcgagagattccagaccgagctgaactacgacgtgctggaggtgcacgacggccccaacctgctgagccccctgctgggcagctacaacggcacccaggtgccccagttcctgttcagcagcagcaacttcatctacctgctgttcaccaccgacaacagcagaagcaacaacggcttcaagatccactacgagagcgtgaccgtgaacacctacagctgcctggaccccggcatccccgtgcacggcagaagatacggccacgacttcagcatcggcagcaccgtgagcttcagctgcgacagcggctacagactgagccacgaggagcccctgctgtgcgagaagaaccactggtggagccaccccctgcccacctgcgacgccctgtgcggcggcgacgtgagaggccccagcggcaccatcctgagccccggctaccccgagttctaccccaacagcctgaactgcacctggaccgtggacgtgacccacggcaagggcgtgcagttcaacttccacaccttccacctggaggaccaccacgactacctgctgatcaccgagaacggcagcttcacccagcccctggccagactgaccggcagcgacctgccccccaccatcaacgccggcctgtacggcaacttcagagcccagctgagattcatcagcgacttcagcatcagctacgagggcttcaacatcaccttcagcgagtacaacctggagccctgcgaggaccccggcatcccccagtacggcagcagaatcggcttcaacttcggcatcggcgacaccctgaccttcagctgcagcagcggctacagactggagggcaccagcgagatcatctgcctgggcggcggcagaagagtgtggagcgcccccctgcccagatgcgtggccgagtgcggcgccagcgccaccaacaacgagggcatcctgctgagccccaactaccccctgaactacgagaacaaccacgagtgcatctacagcatccaggtgcaggccggcaagggcatcaacatcagcgccagaaccttccacctggcccagggcgacgtgctgaagatctacgacggcaaggacaagaccacccacctgctgggcgccttcaccggcgccagcatgagaggcctgaccctgagcagcaccagcaaccagctgtggctggagttcaacagcgacaccgagggcaccgacgagggcttccagctggtgtacaccagcttcgagctgagccactgcgaggaccccggcatcccccagttcggctacaagatcagcgaccagggccacttcgccggcagcaccatcatctacggctgcaaccccggctacaccctgcacggcagcagcctgctgaagtgcatgaccggcgagagaagagcctgggactaccccctgcccagctgcatcgccgagtgcggcggcagattcaagggcgagagcagcggcagaatcctgagccccggctaccccttcccctacgacaacaacctgagatgcatgtggatgatcgaggtggaccccggcaacatcgtgagcctgcagttcctggccttcgacaccgaggccagccacgacatcctgagagtgtgggacggcccccccgagaacgacatgctgctgaaggagatcagcggcagcctgatccccgagggcatccacagcaccctgaacatcgtgaccatccagttcgacaccgacttctacatcagcaagagcggcttcgccatccagttcagcagcagcgtggccaccgcctgcagagaccccggcgtgcccatgaacggcaccagaaacggcgacggcagagagcccggcgacaccgtggtgttccagtgcgaccccggctacgagctgcagggcgaggagagaatcacctgcatccaggtggagaacagatacttctggcagcccagcccccccgtgtgcatcgccccctgcggcggcaacctgaccggcagcagcggcttcatcctgagccccaacttcccccacccctacccccacagcagagactgcgactggaccatcaccgtgaacgccgactacgtgatcagcctggccttcatcagcttcagcatcgagcccaactacgacttcctgtacatctacgacggccccgacagcaacagccccctgatcggcagcttccaggacagcaagctgcccgagagaatcgagagcagcagcaacaccatgcacctggccttcagaagcgacggcagcgtgagctacaccggcttccacctggagtacaaggccaagctgagagagagctgcttcgaccccggcaacatcatgaacggcaccagactgggcatggactacaagctgggcagcaccgtgacctactactgcgacgccggctacgtgctgcagggctacagcaccctgacctgcatcatgggcgacgacggcagacccggctggaacagagccctgcccagctgccacgccccctgcggcagcagaagcaccggcagcgagggcaccgtgctgagccccaactaccccaagaactacagcgtgggccacaactgcgtgtacagcatcgccgtgcccaaggagttcgtggtgttcggccagttcgtgttcttccagaccagcctgcacgacgtggtggaggtgtacgacggccccacccagcagagcagcctgctgagcagcctgagcggcagccacagcggcgagagcctgcccctgagcagcggcaaccagatcaccatcagattcaccagcgtgggccccatcaccgccaagggcttccacttcgtgtaccaggccgtgcccagaaccagcagcacccagtgcagcagcgtgcccgagcccagattcggcagaagaatcggcaacgagttcgccgtgggcagcagcgtgctgttcgactgcaaccccggctacatcctgcacggcagcatcgccatcagatgcgagaccgtgcccaacagcctggcccagtggaacgacagcctgcccacctgcatcgtgccctgcggcggcatcctgaccaagagaaagggcaccatcctgagccccggctaccccgagccctacgacaacaacctgaactgcgtgtggaagatcaccgtgcccgagggcgccggcatccaggtgcaggtggtgagcttcgccaccgagcacaactgggacagcctggacttctacgacggcggcgacaacaacgcccccagactgggcagctacagcggcaccaccatcccccacctgctgaacagcaccagcaacaacctgtacctgaacttccagagcgacatcagcgtgagcgccgccggcttccacctggagtacaccgccatcggcctggacagctgccccgagccccagacccccagcagcggcatcaagatcggcgacagatacatggtgggcgacgtggtgagcttccagtgcgaccagggctacagcctgcagggccacagccacatcacctgcatgcccggccccgtgagaagatggaactaccccatccccatctgcctggcccagtgcggcggcgccatgagcgacttcagcggcgtgatcctgagccccggcttccccggcaactaccccagcagcctggactgcacctggaccatcaacctgcccatcggcttcggcgtgcacctgcagttcgtgaacttcagcaccgagaccatccacgactacctggaggtgagaagcggcagcagcgagaccagcaccgtgatcggcagactgagcggcccccagatccccagcagcctgttcagcaccacccacgagaccagcctgtacttccacagcgactacagccagaacaagcagggcttccacatcgtgtaccaggcctaccagctgcagagctgccccgaccccagacccttcagaaacggcttcgtgatcggcaacgacttcaccgtgggccagaccatcagcttcgagtgcttccccggctacaccctgatcggcaacagcgccctgacctgcctgcacggcgtgagcagaaactggaaccaccccctgcccagatgcgaggccctgtgcggcggcaacatcaccgccatgaacggcaccatctacagccccggctaccccgacgagtaccccaacttccaggactgcttctggctggtgagagtgccccccggcaacggcatctacatcaacttcaccgtgctgcagaccgagcccatctacgacttcatcaccgtgtgggacggccccgaccagaacagcccccagatcggccagttcagcggcaacaccgccctggagagcgtgtacagcaccagcaaccagatcctgatcaagttccacagcgacttcaccaccagcggcttcttcgtgctgagctaccacgcctaccagctgagagtgtgccagccccccccccccgtgcccaacgccgagatcctgaccgaggacgacgagttcgagatcggcgacatcatcagataccagtgcctgcccggcttcaccctggtgggcaacgccatcctgacctgcagactgggcgagagactgcagatggacggcgccccccccgtgtgccaggtgctgtgccccgccaacgagctgagactggacagcaccggcgtgatcctgagccccggctaccccgacagctaccccaacctgcagatgtgcgcctggagcatcagcgtggagaagggctacaacatcaccatgttcgtggagttcttccagaccgagaaggagttcgacgtgctgcaggtgtacgacggccccaacatccagagccccgtgctgatcagcctgagcggcgactacagcagcgccttcaacatcaccagcaacggccacgaggtgttcctgcagtggagcgccgaccacggcaacaacaagaagggcttcagaatcagatacatcgccttctactgcagcacccccgagagccccccccacggctacatcatcagccagaccggcggccagctgaacagcgtggtgagatgggcctgcgacagaggcttcagactggtgggcaagagcagcgccgtgtgcagaaagagcagctacggctaccacgcctgggacgcccccgtgcccgcctgccaggccatcagctgcggcatccccaaggcccccaccaacggcggcatcctgaccaccgactacctggtgggcaccagagtgacctacttctgcaacgacggctacagactgagcagcaaggagctgaccaccgccgtgtgccagagcgacggcacctggagcaaccacaacaagacccccagatgcgtggtggtgacctgccccagcatcaacagcttcatcctggagcacggcagatggagaatcgtgaacggcagccactacgagtacaagaccaaggtggtgttcagctgcgaccccggctaccacggcctgggccccgccagcatcgagtgcctgcccaacggcacctggagctggagaaacgagagaccctactgccagatcatcagctgcggcgagctgcccaccccccccaacggcaacaagatcggcacccagaccagctacggcagcaccgccatcttcacctgcgacctgggcttcatgctggtgggcagcgccgtgagagagtgcctgagcagcggcctgtggagcgagagcgagaccagatgcctggccggccactgcggcatccccgagctgatcgtgaacggccaggtgatcggcgagaactacggctacagagacaccgtggtgtaccagtgcaaccccggcttcagactgatcggcagcagcgtgagaatctgccagcaggaccacaactggagcggccagctgcccagctgcgtgcccgtgagctgcggccaccccggcagccccatctacggcagaaccagcggcaacggcttcaacttcaacgacgtggtgaccttcagctgcaacatcggctacctgatgcagggccccaccaaggcccagtgccaggccaacagacagtggagccaccccccccccatgtgcaaggtggtgaactgcagcgaccccggcatccccgccaacagcaagagagagagcaagatcgagcacggcaacttcacctacggcaccgtggtgttctacgactgcaaccccggctacttcctgttcggcagcagcgtgctgatctgccagcccaacggccagtgggacaagcccctgcccgagtgcatcatgatcgactgcggccaccccggcgtgccccccaacgccgtgctgagcggcgagaagtacaccttcggcagcaccgtgcactacagctgcaccggcaagagaagcctgctgggccagagcagcagaacctgccagctgaacggccactggagcggcagccagccccactgcagcggcgacgccaccggcacctgcggcgaccccggcacccccggccacggcagcagacaggagagcaacttcagaaccaagagcaccgtgagatacgcctgcgacaccggctacatcctgcacggcagcgaggagagaacctgcctggccaacggcagctggaccggcagacagcccgagtgcaaggccgtgcagtgcggcaaccccggcaccaccgccaacggcaaggtgttcagaatcgacggcaccaccttcagcagcagcgtgatctacagctgcatggagggctacatcctgagcggccccagcgtgagacagtgcaccgccaacggcacctggagcggcaccctgcccaactgcaccatcatcagctgcggcgaccccggcatccccgccaacggcctgagatacggcgacgactacgtggtgggccagaacgtgagctacatgtgccagcccggctacaccatggagctgaacggcagcagaatcagaacctgcaccatcaacggcacctggagcggcgtgatgcccacctgcagagccgtgacctgccccacccccccccagatcagcaacggcagactggagggcaccaacttcgactggggcttcagcatcagctacatctgcagccccggctacgagctgagcttccccgccgtgctgacctgcgtgggcaacggcacctggagcggcgaggtgccccagtgcctgcccaagttctgcggcgaccccggcatccccgcccagggcaagagagagggcaagagcttcatctaccagagcgaggtgagcttcagctgcaacttccccttcatcctggtgggcagcagcaccagaatctgccaggccgacggcacctggagcggcagcagcccccactgcatcgagcccacccagaccagctgcgagaaccccggcgtgcccagacacggcagccagaacaacaccttcggcttccaggtgggcagcgtggtgcagttccactgcaagaagggccacctgctgcagggcagcaccaccagaacctgcctgcccgacctgacctggagcggcatccagcccgagtgcatcccccacagctgcaagcagcccgagacccccgcccacgccaacgtggtgggcatggacctgcccagccacggctacaccctgatctacacctgccagcccggcttcttcctggccggcggcaccgagcacagagtgtgcagaagcgacaacacctggaccggcaaggtgcccatctgcgaggccggcagcaagatcctggtgaaggaccccagacccgccctgggcacccccagccccaagctgagcgtgcccgacgacgtgttcgcccagaactacatctggaagggcagctacaacttcaagggcagaaagcagcccatgaccctgaccgtgaccagcttcaacgccagcaccggcagagtgaacgccaccctgagcaacagcaacatggagctgctgctgagcggcgtgtacaagagccaggaggccagactgatgctgagaatctacctgatcaaggtgcccgcccacgccagcgtgaagaagatgaaggaggagaactgggccatggacggcttcgtgagcgccgagcccgacggcgccacctacgtgttccagggcttcatccagggcaaggactacggccagttcggcctgcagagactgggcctgaacatgagcgagggcagcaacagcagcaaccagccccacggcaccaacagcagcagcgtggccatcgccatcctggtgcccttcttcgccctgatcttcgccggcttcggcttctacctgtacaagcagagaaccgcccccaagacccagtacaccggctgcagcgtgcacgagaacaacaacggccaggccgccttcgagaaccccatgtacgacaccaacgccaagagcgtggagggcaaggccgtgagattcgaccccaacctgaacaccgtgtgcaccatggtgtag

SEQ ID NO: 259043 - protein, 3667 aa, Artificial Sequence
  derived and/or modified sequence
MWSWFLCWKPVQLDRQTASGFIYTCGGTLKGLNGTIESPGFPYGYPNGANCTWVIIAEERNRIQIVFQSFALEEEYDYLSLYDGHPHPTNFRTRLTGFHLPPPVTSTKSVFSLRLTSDFAVSAHGFKVYYEELQSSSCGNPGVPPKGVLYGTRFDVGDKIRYSCVTGYILDGHPQLTCIANSVNTASWDFPVPICRAEDACGGTMRGSSGIISSPSFPNEYHNNADCTWTIVAEPGDTISLIFTDFQMEEKYDYLEIEGSEPPTIWLSGMNIPPPIISNKNWLRLHFVTDSNHRYRGFSAPYQGSSTLTHTTSTGELEEHNRTTTGAIAVASTPADVTVSSVTAVTIHRLSEEQRVQVTSLRNSGLDPNTSKDGLSPHPADTQSTRRRPRHAEQIERTKELAVVTHRVKKAIDFKSRGFKLFPGKDNSNKFSILNEGGIKTASNLCPDPGEPENGKRIGSDFSLGSTVQFSCDEDYVLQGAKSITCQRIAEVFAAWSDHRPVCKVKTCGSNLQGPSGTFTSPNFPFQYDSNAQCVWVITAVNTNKVIQINFEEFDLEIGYDTLTIGDGGEVGDPRTVLQVLTGSFVPDLIVSMSSQMWLHLQTDESVGSVGFKVNYKEIEKESCGDPGTPLYGIREGDGFSNRDVLRFECQFGFELIGEKSIVCQENNQWSANIPICIFPCLSNFTAPMGTVLSPDYPEGYGNNLNCIWTIISDPGSRIHLSFNDFDLESQFDFLAVKDGDSPESPILGTFTGAEVPSHLTSNSHILRLEFQADHSMSGRGFNITYNTFGHNECPDPGIPINARRFGDNFQLGSSISVICEEGFIKTQGTETITCILMDGKVMWSGLIPKCGAPCGGHFSAPSGVILSPGWPGYYKDSLNCEWVIEAEPGHSIKITFERFQTELNYDVLEVHDGPNLLSPLLGSYNGTQVPQFLFSSSNFIYLLFTTDNSRSNNGFKIHYESVTVNTYSCLDPGIPVHGRRYGHDFSIGSTVSFSCDSGYRLSHEEPLLCEKNHWWSHPLPTCDALCGGDVRGPSGTILSPGYPEFYPNSLNCTWTVDVTHGKGVQFNFHTFHLEDHHDYLLITENGSFTQPLARLTGSDLPPTINAGLYGNFRAQLRFISDFSISYEGFNITFSEYNLEPCEDPGIPQYGSRIGFNFGIGDTLTFSCSSGYRLEGTSEIICLGGGRRVWSAPLPRCVAECGASATNNEGILLSPNYPLNYENNHECIYSIQVQAGKGINISARTFHLAQGDVLKIYDGKDKTTHLLGAFTGASMRGLTLSSTSNQLWLEFNSDTEGTDEGFQLVYTSFELSHCEDPGIPQFGYKISDQGHFAGSTIIYGCNPGYTLHGSSLLKCMTGERRAWDYPLPSCIAECGGRFKGESSGRILSPGYPFPYDNNLRCMWMIEVDPGNIVSLQFLAFDTEASHDILRVWDGPPENDMLLKEISGSLIPEGIHSTLNIVTIQFDTDFYISKSGFAIQFSSSVATACRDPGVPMNGTRNGDGREPGDTVVFQCDPGYELQGEERITCIQVENRYFWQPSPPVCIAPCGGNLTGSSGFILSPNFPHPYPHSRDCDWTITVNADYVISLAFISFSIEPNYDFLYIYDGPDSNSPLIGSFQDSKLPERIESSSNTMHLAFRSDGSVSYTGFHLEYKAKLRESCFDPGNIMNGTRLGMDYKLGSTVTYYCDAGYVLQGYSTLTCIMGDDGRPGWNRALPSCHAPCGSRSTGSEGTVLSPNYPKNYSVGHNCVYSIAVPKEFVVFGQFVFFQTSLHDVVEVYDGPTQQSSLLSSLSGSHSGESLPLSSGNQITIRFTSVGPITAKGFHFVYQAVPRTSSTQCSSVPEPRFGRRIGNEFAVGSSVLFDCNPGYILHGSIAIRCETVPNSLAQWNDSLPTCIVPCGGILTKRKGTILSPGYPEPYDNNLNCVWKITVPEGAGIQVQVVSFATEHNWDSLDFYDGGDNNAPRLGSYSGTTIPHLLNSTSNNLYLNFQSDISVSAAGFHLEYTAIGLDSCPEPQTPSSGIKIGDRYMVGDVVSFQCDQGYSLQGHSHITCMPGPVRRWNYPIPICLAQCGGAMSDFSGVILSPGFPGNYPSSLDCTWTINLPIGFGVHLQFVNFSTETIHDYLEVRSGSSETSTVIGRLSGPQIPSSLFSTTHETSLYFHSDYSQNKQGFHIVYQAYQLQSCPDPRPFRNGFVIGNDFTVGQTISFECFPGYTLIGNSALTCLHGVSRNWNHPLPRCEALCGGNITAMNGTIYSPGYPDEYPNFQDCFWLVRVPPGNGIYINFTVLQTEPIYDFITVWDGPDQNSPQIGQFSGNTALESVYSTSNQILIKFHSDFTTSGFFVLSYHAYQLRVCQPPPPVPNAEILTEDDEFEIGDIIRYQCLPGFTLVGNAILTCRLGERLQMDGAPPVCQVLCPANELRLDSTGVILSPGYPDSYPNLQMCAWSISVEKGYNITMFVEFFQTEKEFDVLQVYDGPNIQSPVLISLSGDYSSAFNITSNGHEVFLQWSADHGNNKKGFRIRYIAFYCSTPESPPHGYIISQTGGQLNSVVRWACDRGFRLVGKSSAVCRKSSYGYHAWDAPVPACQAISCGIPKAPTNGGILTTDYLVGTRVTYFCNDGYRLSSKELTTAVCQSDGTWSNHNKTPRCVVVTCPSINSFILEHGRWRIVNGSHYEYKTKVVFSCDPGYHGLGPASIECLPNGTWSWRNERPYCQIISCGELPTPPNGNKIGTQTSYGSTAIFTCDLGFMLVGSAVRECLSSGLWSESETRCLAGHCGIPELIVNGQVIGENYGYRDTVVYQCNPGFRLIGSSVRICQQDHNWSGQLPSCVPVSCGHPGSPIYGRTSGNGFNFNDVVTFSCNIGYLMQGPTKAQCQANRQWSHPPPMCKVVNCSDPGIPANSKRESKIEHGNFTYGTVVFYDCNPGYFLFGSSVLICQPNGQWDKPLPECIMIDCGHPGVPPNAVLSGEKYTFGSTVHYSCTGKRSLLGQSSRTCQLNGHWSGSQPHCSGDATGTCGDPGTPGHGSRQESNFRTKSTVRYACDTGYILHGSEERTCLANGSWTGRQPECKAVQCGNPGTTANGKVFRIDGTTFSSSVIYSCMEGYILSGPSVRQCTANGTWSGTLPNCTIISCGDPGIPANGLRYGDDYVVGQNVSYMCQPGYTMELNGSRIRTCTINGTWSGVMPTCRAVTCPTPPQISNGRLEGTNFDWGFSISYICSPGYELSFPAVLTCVGNGTWSGEVPQCLPKFCGDPGIPAQGKREGKSFIYQSEVSFSCNFPFILVGSSTRICQADGTWSGSSPHCIEPTQTSCENPGVPRHGSQNNTFGFQVGSVVQFHCKKGHLLQGSTTRTCLPDLTWSGIQPECIPHSCKQPETPAHANVVGMDLPSHGYTLIYTCQPGFFLAGGTEHRVCRSDNTWTGKVPICEAGSKILVKDPRPALGTPSPKLSVPDDVFAQNYIWKGSYNFKGRKQPMTLTVTSFNASTGRVNATLSNSNMELLLSGVYKSQEARLMLRIYLIKVPAHASVKKMKEENWAMDGFVSAEPDGATYVFQGFIQGKDYGQFGLQRLGLNMSEGSNSSNQPHGTNSSSVAIAILVPFFALIFAGFGFYLYKQRTAPKTQYTGCSVHENNNGQAAFENPMYDTNAKSVEGKAVRFDPNLNTVCTMV

SEQ ID NO: 259044 - DNA, 11004 bp, Artificial Sequence
  derived and/or modified sequence
atgtggtcttggtttctttgttggaagccagttcagctggatcgccagaccgctagtgggtttatctatacctgcgggggcacactgaaaggcctcaatggaacaattgaaagtcctggattcccttacggttacccgaacggggcaaattgcacgtgggtaattatcgcagaagagaggaacagaatacagattgtgtttcagagcttcgccctggaggaagaatatgattacctgagtctctatgacggtcacccccacccaacaaattttaggacccgcctgactggcttccacttgccaccgccggtaacgtctacaaagtctgtattctctctgaggctaacatctgactttgctgtgagcgcacatggttttaaggtgtactatgaggagcttcagtcatcaagttgcgggaacccgggagtgcctcctaagggagtactttacggcacaagattcgatgtgggagataaaatacgctatagctgcgtgacggggtacatcctagatgggcatccacagctaacctgtattgcaaactcggtaaacacagcaagctgggacttcccggttcccatttgcagagccgaggatgcatgcggaggcaccatgcgcggctctagtggaatcatatcatccccatcttttcccaacgaataccacaacaacgctgactgcacctggacaatcgtggcggaacctggggacactatctccttaattttcacggactttcaaatggaagaaaaatacgattatctggagatcgagggatccgagccgcccactatttggctgtcaggaatgaacattcccccccctataattagcaataagaactggctacgacttcacttcgtaaccgacagcaaccatcgctacaggggcttttcagctccataccaaggtagcagcaccctgactcacacaaccagcactggagaactggaagagcataaccgtaccactactggcgctatagcagtcgccagcacacccgcagacgtgactgtttctagcgtgaccgcagtgaccatccacagactttccgaagagcagagagtgcaagttacctctctccggaattcagggctcgaccctaatacgagtaaggacggccttagtcctcatccggcagatacacagtccactagacggagacctaggcatgccgaacagatcgaacgaaccaaggagctggctgttgtaacccatagagtcaaaaaggccatcgactttaagagcagaggcttcaagctgtttccagggaaagacaacagcaataagttctcaatcctgaacgagggaggcatcaaaactgcaagtaatctatgcccagacccgggagaacccgagaatgggaagcgtatcggcagcgatttcagcctgggcagcactgtgcaattctcatgcgatgaggactacgtactgcagggcgctaaatccatcacttgccagcgcattgctgaggtcttcgccgcctggtcggaccacaggccagtctgcaaagtgaaaacctgtgggtcaaatttgcagggaccaagtggtactttcacaagtcccaatttcccttttcaatacgactccaatgcccaatgtgtgtgggtaataacagctgttaatacaaacaaagtgattcaaattaattttgaagagttcgatcttgagatcggatatgacaccctgaccatcggagatggcggagaggtgggcgaccctcgaaccgtgctccaggtcctcacgggatctttcgttcccgacctgatcgtttcgatgtcatcacagatgtggcttcacctgcaaaccgatgagagtgttggtagtgtcgggtttaaagttaactacaaagagatcgagaaggagtcgtgtggggatccaggaacacccttatatggtatcagggagggggatggcttctccaatcgcgatgttctccggtttgagtgtcagtttgggttcgaactgattggtgagaagagtattgtttgtcaggaaaacaaccaatggagcgccaatatcccaatctgcatctttccctgcttatccaactttactgcccctatggggactgttctgtcacctgactacccggaagggtacggcaataatcttaattgcatctggactattatatccgatcctggatcccggatccatctcagcttcaatgatttcgacctggaaagccagttcgatttcctggctgtcaaagatggcgattcacctgaaagtccaatcctagggacatttacgggggccgaagtgccctctcacctaactagcaatagccatatcctgcgcttggaatttcaggctgatcactcaatgtctgggcggggattcaacattacatataatacattcggtcacaatgagtgtccagatccgggtattcccatcaacgctcgcagattcggcgacaacttccagctcggatcctctataagcgtgatttgtgaagaagggttcatcaagacacagggaacagagacgattacatgtattctaatggacgggaaggtcatgtggtccggcttgattccaaagtgcggtgccccttgcggagggcatttttccgccccaagcggagtgattctttcaccaggatggcctggctattacaaggactccttaaactgcgagtgggtgatcgaggctgagcctgggcatagcataaagatcacctttgaaagatttcagactgaactcaactatgacgttctggaggtgcatgacgggccgaatctcctttctcctctgttaggctcctacaacggcactcaggtgccccagttcctcttttcctccagcaattttatttacctgttattcactacagataatagtcgaagtaataatggcttcaagatccactatgaatcagtcacagtgaacacctatagctgcctcgatcctggaattcctgtgcacggtagaaggtacggccacgatttcagcattggcagcaccgtaagtttcagttgtgactcagggtaccgtctgagccacgaggaaccccttctctgtgagaaaaatcattggtggagccaccccctcccaacatgcgacgccttgtgcggcggggatgtgcgggggcctagcggcaccatactgtctccaggttatcccgagttctacccgaactccctgaactgtacttggactgtcgacgtgacccacgggaaaggagtgcaattcaactttcacacattccacctggaagatcatcatgactatctgcttatcaccgaaaacggctcattcacccagcccctggcgcgcctgaccggaagtgatttacccccaactataaatgcagggctctacggtaattttcgtgcccaactgaggtttatctccgatttcagcatttcatatgaggggtttaacattaccttctccgagtacaatctggagccctgcgaagacccgggcattccacagtacggatcccgaatcggtttcaactttggcattggagatacccttactttctcgtgttctagtggctacaggttggaaggcacgagtgagatcatttgcctgggcgggggtcgaagggtatggtccgctcccctgccacggtgtgtggcagaatgcggtgccagtgcgaccaataatgaaggtatcctgctgagtcccaactacccacttaattatgagaacaatcatgagtgcatttacagcatccaggtccaggccggcaaaggcattaacatcagtgctaggacctttcatctggctcagggagatgttctcaagatttatgacggtaaggacaaaactactcacttacttggggcgtttacgggagcctctatgaggggtcttactttgtctagcacctcaaatcagctgtggctggaattcaactccgatacagaaggcactgacgagggctttcagctcgtatacactagctttgagctctcgcactgtgaggatccaggaattcctcaatttggctataagatcagcgatcaagggcattttgctggttcaaccattatctacggctgcaatcctggatatactcttcacgggtcttcactgctgaagtgtatgacaggagagcgtagagcatgggattacccactgccgagctgtatagccgagtgtggtgggaggtttaaaggtgaaagctcaggcagaatcctaagccccggctaccctttcccatacgacaacaacctgcggtgcatgtggatgattgaggtagaccccggtaatattgtttcgctccagttcctcgctttcgacacagaagcaagtcacgacatcttgagagtgtgggacggtccccctgaaaacgatatgcttttaaaggaaatttccggcagtctgattcctgaagggatccacagtactcttaacatcgttactatccaattcgacacagatttctacatttctaaaagcgggttcgccattcaattttcctcgtccgtagcaaccgcatgccgggatcccggagtgcctatgaatggcacgagaaacggcgacggaagggagccaggcgacaccgtggtcttccaatgtgatccggggtacgagctacaaggtgaagaacgtatcacctgcattcaagtggagaaccgctacttttggcagcctagccccccggtgtgcatcgctccctgtggtggcaaccttaccggatccagtggattcattctcagcccaaacttcccacacccttacccacattcaagggactgcgattggactattaccgtgaatgctgattatgtcatttcacttgccttcatctcattctcgatcgagcccaattacgactttctttatatttacgatgggcctgactccaattcccccctgatcggcagtttccaggattcaaaactgcctgaaagaattgagtcttcttccaatacaatgcatttggccttccgatccgacgggagcgtgagctacaccggcttccatttggaatacaaggccaagctgcgggagagctgcttcgaccctggcaatatcatgaatggaacaagactgggaatggactataaactcggctccactgttacttattactgcgacgctggatacgttctgcaggggtactctactcttacgtgtataatgggcgacgacggacggcctggatggaatcgcgcacttcctagttgtcatgccccgtgtggcagtagatcaactggctctgaagggaccgtgctgtcccctaattaccccaagaattacagcgttggccacaactgtgtatactctatagcagtgcctaaggagttcgtcgtctttggacagtttgtgttcttccagactagcctccatgatgtcgttgaggtatacgacggaccaacacagcagtcatctctcctctcaagtctttcaggttcacattcgggcgaatccttacccctgtcgtccggtaatcagataactatcagatttacatcggtgggtcccattacggccaaaggctttcactttgtttaccaggccgtgccacgcacgtcctcaactcagtgttcgagcgtgcccgagccgcgctttgggagacggatcggcaacgaattcgccgtcggttcttccgtgttgttcgattgtaatcccggatacatactccatgggagcatagccataagatgcgagaccgttccaaatagcctggcccagtggaatgattcactcccaacttgtattgtcccttgtggaggcatcctgactaagagaaaaggaactatactaagccccggttaccctgagccctacgataataacttaaattgtgtctggaaaattaccgtgcccgagggtgctggtatacaggtccaggtcgtgagctttgctacagagcacaactgggactcgcttgacttttacgacggcggagataacaatgctccccggctgggaagctattctggtactaccattccacatctgctcaacagtactagcaacaatctctacttgaatttccagtccgatatttctgtgtccgcagcagggttccacctcgagtacaccgcaatcggacttgacagctgtcctgaaccacagacgccatcttctggcatcaagatcggggaccggtatatggtcggcgatgtagtttcctttcagtgtgatcagggttactccctacagggacattcccacataacctgcatgccaggaccagtgcgcaggtggaactatcctatccccatttgccttgctcaatgtggcggcgccatgtccgacttctcaggcgttatactgagtcccggatttcctggtaattatccctcatcattggactgcacctggacgatcaatctgcccataggcttcggcgtacatctccagtttgtgaatttttcaacagagacgattcatgattacctggaggtgcgctctggaagctccgaaacttctacagtgatcggtaggcttagtggtcctcagattccatcctccctgtttagtactactcatgagacaagtctatacttccactccgattactcccaaaacaaacagggcttccatatagtctatcaggcctaccagctgcagtcctgccctgaccccagacccttccgaaatggcttcgtgataggcaacgatttcaccgtgggccagacgatctcctttgaatgtttccctgggtacaccctcatagggaactctgcccttacctgtcttcacggagtcagccgcaattggaatcacccccttccaaggtgtgaggctctttgcggggggaatatcaccgccatgaacggaacaatctatagcccgggttatcccgatgagtatcccaatttccaggattgcttctggcttgtgagggttccacctgggaatgggatctacataaacttcaccgttctgcagaccgaacctatctatgactttatcacagtatgggatggcccggaccagaactccccccagattggacaattctccggaaacacagccctagagagcgtgtactcaacgagcaaccagatcctgatcaagttccactccgacttcacaacgtccgggttctttgtgctatcttatcatgcttaccagctccgggtttgtcaaccaccaccacctgtccccaatgccgaaatcctcacagaagacgatgagtttgagattggagatattataagataccagtgcctgccaggttttacactcgtcggaaatgcaatcctgacttgcaggctgggcgagagacttcagatggatggtgcaccccctgtatgccaagtcctgtgccctgcaaatgagttgcgcctggactctactggtgttatcctctcccctggttacccagattcctacccaaacctgcagatgtgtgcatggtccataagtgtagagaagggctacaatatcaccatgtttgtcgagtttttccagaccgaaaaggaattcgacgttctccaggtctatgatggacctaatattcagagcccagtcctaatttccctcagtggtgactatagctcagcctttaacattacttcgaatgggcacgaagtattcctgcagtggtctgcagatcatggcaacaataagaaagggttcagaattaggtacattgccttttattgttctacccccgagagcccccctcacgggtatatcatcagccaaaccggcggtcaactcaatagtgtagtgcgctgggcctgtgaccgaggttttaggctcgtgggcaaaagcagcgccgtatgtagaaaatcctcttatggctatcatgcctgggatgcccccgttccggcttgtcaggccatcagctgcggtatccccaaagctccaacaaacggaggtattctgactaccgactatttggttggcacacgggtgacatacttttgtaacgacggatatcggctttccagcaaagagctgacgactgctgtgtgccagtctgatggaacgtggtcaaaccacaataaaaccccacgatgcgtagttgtgacgtgcccatctattaacagttttatcctggagcacgggcgctggaggatcgtgaatggcagtcactacgagtacaagacaaaagtagtattctcgtgtgacccagggtaccatggtttaggccccgcctctatagagtgtttacccaacgggacctggagctggcggaatgaacgcccctactgccagattattagttgcggggagcttccgactcctcccaatggaaataaaatcggcactcagacgtcctacgggtctacagcgatcttcacgtgtgacctgggttttatgctggtaggttctgcagtgagggagtgtctaagtagcggactctggtcggaaagtgaaacacgctgtctggcgggccactgtggtataccagagctgatagtaaacggccaagtgatcggcgagaactacggctaccgagacacagtcgtatatcaatgtaatcctggtttcaggttgatcggctcctcggtccgcatctgccagcaggaccataactggtcgggccagctgccctcatgcgtgccagtttcttgcgggcaccctggaagccccatttacggccgcacatcagggaatggcttcaactttaacgatgtagtaaccttctcttgcaacatcgggtatctcatgcagggaccgactaaggcgcagtgccaggcaaacagacaatggagccaccctcccccaatgtgcaaggtggtcaattgctccgaccctggaattcctgcgaactccaagagagaatcaaaaatcgagcacggcaactttacttacgggacagtcgtcttctatgattgcaacccgggttattttttatttggcagtagtgttttgatctgtcagcccaatggccagtgggataaacccctgccggagtgtataatgatcgactgcgggcaccctggcgtcccccctaatgcggtgctgagcggagaaaagtacaccttcggctccacggtgcactattcttgcacgggcaagagatcccttcttggacagtctagtcgaacttgccaacttaacggacactggtccggatcacaaccccactgttctggagacgctactggcacctgcggagacccaggcacacccgggcacggctcacgtcaggagtctaatttccgcacaaaaagcacagtgcgatacgcatgcgatacaggctacatcctgcatggaagcgaggagcgcacttgcctcgccaacggatcttggactggtcggcagcctgaatgcaaggctgtgcagtgtgggaatcctggcacgacagccaacgggaaggtgtttcgcatcgacggcactaccttctcctcttccgttatctattcttgtatggaaggctacatcctctccggcccaagtgtgagacaatgcactgctaatggcacatggtctggaacactccccaactgtactataatttcatgcggagaccccggcattccagcgaatgggctgcgttatggagatgactatgtcgtgggccagaatgtgtcctatatgtgccaacccggatataccatggaactgaacgggagtcgcattcgtacgtgtacgataaatggcacgtggtcgggtgtaatgcctacttgtcgagctgtgacgtgccctacccccccccagatctccaatggccgtctggaggggaccaactttgactggggattttcaatcagttatatttgtagcccagggtacgagttgtccttccctgccgttctgacttgcgtcgggaatggcacctggagcggggaagtcccacagtgtctgcctaaattttgcggggatcccgggatccctgctcagggaaagcgcgaagggaaaagctttatctaccagtcagaggtgtcattttcttgtaactttcccttcatcctggtgggctcgtccactaggatctgtcaggctgatggaacttggtcaggatccagcccacactgcatcgaaccaacacagacaagttgcgaaaatccaggcgtgccacggcacgggagccagaacaatacttttggcttccaagtaggtagtgtggtacagtttcattgcaagaaaggacatctgctccaaggttccaccactcgcacgtgtttacccgacttgacctggtccgggattcaaccagagtgtattccccactcatgcaagcagcctgagaccccagcacatgctaatgtggtgggtatggacctgccctctcatggttatacgttaatctacacatgtcagcccggttttttcctggctggcggcactgaacatagggtctgccggtcagacaacacttggacaggaaaggtgcccatctgcgaagcgggtagcaagattctggtcaaagacccgaggcccgcactgggcactccttccccaaaactctcagtgccagatgatgtgtttgctcagaactatatttggaagggaagctacaatttcaagggtcgcaagcaaccgatgactctgaccgttacgagctttaatgcctctaccggacgcgtcaatgccacgctttctaatagcaatatggagttgctcctgagcggagtgtacaaatctcaagaagcgcggctgatgctgcgcatctacttaataaaggtgccggcccacgcgtctgtcaaaaaaatgaaggaggaaaattgggctatggacggcttcgttagtgcggaaccggacggcgcaacttacgttttccagggcttcattcagggcaaagactacggtcagttcgggctgcaaagactggggctgaatatgtctgaagggagcaacagctctaatcagcctcacgggacaaattccagcagcgttgccatcgctatcttggtccctttcttcgccctaattttcgctggatttggcttctatctatacaaacagcgcaccgcacccaaaacccaatacactgggtgttcagtgcatgaaaacaataacggacaggcagccttcgaaaatcccatgtacgatactaacgctaagtctgtggagggtaaagcggtgcgcttcgaccccaatctcaataccgtgtgtacgatggtgtag

SEQ ID NO: 259045 - DNA, 11004 bp, Artificial Sequence
  derived and/or modified sequence
atgtggagctggttcctgtgctggaagcctgtgcagctggaccggcagacagccagcggcttcatctacacctgtggcggcaccctgaagggcctgaatggcaccatcgagagccctggcttcccctacggctacccaaatggagccaactgcacctgggtgatcatcgccgaggagaggaaccgcatccagatcgtgttccagagctttgccctggaggaggagtatgactacctgagcctgtatgatggccacccccaccccaccaacttccgcacccggctgaccggcttccacctgcccccacctgtgaccagcaccaagtctgtgttcagcctgcggctgaccagtgactttgctgtgtctgcccacggcttcaaggtgtactatgaggagctgcagagcagcagctgtggcaaccctggggtgccccccaagggcgtgctgtatggcaccaggtttgatgtgggggacaagatccgctacagctgtgtgacaggctacatcctggatggccacccccagctgacctgcatcgccaacagcgtgaacacagcctcctgggacttccctgtgcccatctgcagagcagaagatgcctgtggcggcaccatgaggggcagcagcggcatcatcagcagccccagcttccccaatgagtaccacaacaatgctgactgcacctggaccatcgtggccgagcccggggacaccatcagcctcatcttcacagacttccagatggaggagaagtatgactacctggagattgagggcagcgagccccccaccatctggctgagcggcatgaacatccccccacccatcatcagcaacaagaactggctgcggctgcactttgtgacagacagcaaccaccgctaccggggcttcagcgccccctaccagggcagcagcaccctgacccacaccaccagcactggagagctggaggagcacaacagaaccaccactggagccatcgctgtggccagcaccccagcagatgtgacagtgtcctctgtgacagctgtgaccatccaccggctgtctgaggagcagagggtgcaggtgaccagcctgaggaacagcggcctggaccccaacaccagcaaggatggcctgagcccccaccctgctgacacccagagcaccaggagaagacccaggcatgctgagcagattgaaagaaccaaggagctggccgtggtgacccaccgggtgaagaaggccatcgacttcaagagccggggcttcaagctgtttcctgggaaggacaacagcaacaagttcagcatcctgaatgaaggaggcatcaagacagccagcaacctgtgcccagaccctggagagccagaaaatggcaagagaattggaagtgacttcagcctgggcagcacagtgcagttcagctgtgatgaggactatgtgctgcagggcgccaagagcatcacctgccagagaattgctgaggtgtttgctgcctggagcgaccacaggcctgtgtgcaaggtgaagacctgtggcagcaacctgcagggccccagcggcaccttcaccagccccaacttccccttccagtatgacagcaatgcccagtgtgtgtgggtgatcacagctgtgaacaccaacaaggtgatccagatcaactttgaggagtttgacctggagatcggctatgacaccctgaccatcggagatggaggagaggtgggggaccccaggacagtgctgcaggtgctgaccggcagctttgtgcctgacctgattgtgtccatgagcagccagatgtggctgcacctgcagacagatgagagcgtgggctctgtgggcttcaaggtgaactacaaggagattgagaaggagagctgtggggaccccggcacccccctgtatggcatccgggagggagatggcttcagcaacagagatgtgctgcgctttgagtgccagtttggatttgagctgattggagagaagagcatcgtgtgccaggagaacaaccagtggagcgccaacatccccatctgcatcttcccctgcctgagcaacttcaccgcccccatgggcaccgtgctgagcccagactacccagagggctacggcaacaacctgaactgcatctggaccatcatcagtgaccccggcagccgcatccacctgtccttcaatgactttgacctggagagccagtttgacttcctggccgtgaaggatggagacagccctgagagccccatcctgggcaccttcaccggggctgaggtgcccagccacctgaccagcaacagccacatcctgcggctggagttccaggccgaccacagcatgagcggccggggcttcaacatcacctacaacaccttcggccacaatgaatgtcctgaccccggcatccccatcaatgccaggagatttggagacaacttccagctgggcagcagcatcagcgtcatctgtgaggagggcttcatcaagacccagggcacagagaccatcacctgcatcctgatggatggcaaggtgatgtggagcggcctcatccccaagtgtggggccccctgtggcggccacttcagcgcccccagcggggtcatcctgagccctggctggccaggctactacaaggacagcctgaactgtgagtgggtgattgaagctgagcccggccacagcatcaagatcacctttgagcgcttccagacagagctgaactatgatgtgctggaggtgcatgatggccccaacctgctgagccccctgctgggcagctacaacggcacccaggtgccccagttcctgttcagcagcagcaacttcatctacctgctcttcaccacagacaacagccgcagcaacaacggcttcaagatccactatgagagcgtgacagtgaacacctacagctgcctggaccccggcatccctgtgcacggccgccgctatggccatgacttcagcatcggcagcacagtgtccttcagctgtgacagcggctaccgcctgagccatgaggagcccctgctgtgtgagaagaaccactggtggagccaccccctgcccacctgtgatgccctgtgtggaggagatgtgcggggccccagcggcaccatcctgagccctggctacccagagttctaccccaacagcctgaactgcacctggacagtggatgtgacccatggaaaaggagtgcagttcaacttccacaccttccacctggaggaccaccacgactacctgctgatcacagaaaatggcagcttcacccagcccctggcccggctgactggaagtgacctgccccccaccatcaatgccggcctgtatggcaacttccgggcccagctgcgcttcatcagtgacttcagcatctcctatgagggcttcaacatcaccttcagcgagtacaacctggagccctgtgaagatcctggcatcccccagtatggcagccgcatcggcttcaactttggcatcggggacaccctgaccttcagctgcagcagcggctaccgcctggagggcaccagcgagatcatctgcctgggcggcggcagaagagtgtggagcgcccccctgccccgctgtgtggccgagtgtggggccagcgccaccaacaatgaaggcatcctgctgagccccaactaccccctgaactatgagaacaaccacgagtgcatctacagcatccaggtgcaggccggcaagggcatcaacatcagcgcccggaccttccacctggcccagggagatgtgctgaagatctatgatggcaaggacaagaccacccacctgctgggcgccttcaccggggcctccatgaggggcctgaccctgagcagcaccagcaaccagctgtggctggagttcaacagcgacacagagggcacagatgagggcttccagctggtgtacaccagctttgagctgagccactgtgaagatcctggcatcccccagtttggctacaagatcagtgaccagggccactttgctggcagcaccatcatctacggctgcaaccctggctacaccctgcacggcagcagcctgctgaagtgcatgactggagagcggcgggcctgggactaccccctgcccagctgcatcgcagaatgtggcggccgcttcaagggggagagcagcggccgcatcctgagccctggctaccccttcccctatgacaacaacctgcgctgcatgtggatgattgaggtggaccccggcaacatcgtgtccctgcagttcctggcctttgacacagaggccagccatgacatcctgcgggtgtgggatggccccccagaaaatgacatgctgctgaaggagatcagcggcagcctcatccctgagggcatccacagcaccctgaacatcgtgaccatccagtttgacacagacttctacatcagcaagagcggctttgccatccagttcagcagctctgtggccacagcctgccgggaccccggggtgcccatgaatggcaccagaaatggagatggccgggagcccggggacacagtggtgttccagtgtgaccccggctatgagctgcagggcgaggagcgcatcacctgcatccaggtggagaaccgctacttctggcagcccagcccccctgtgtgcatcgccccctgtggcggcaacctgaccggcagcagcggcttcatcctgagccccaacttcccccacccctacccccacagccgggactgtgactggaccatcaccgtgaatgctgactatgtgatcagcctggccttcatctccttcagcattgagcccaactatgacttcctgtacatctatgatggccctgacagcaacagccccctgattggcagcttccaggacagcaagctgcctgagagaattgagagcagcagcaacaccatgcacctggccttcagaagtgatggctctgtgtcctacacaggcttccacctggagtacaaggccaagctgcgggagagctgctttgaccccggcaacatcatgaatggcacccggctgggcatggactacaagctgggcagcacagtgacctactactgtgatgctggctacgtgctgcagggctacagcaccctgacctgcatcatgggagatgatggccggcccggctggaacagagccctgcccagctgccacgccccctgtggcagccgcagcactggaagtgagggcaccgtgctgagccccaactaccccaagaactacagcgtgggccacaactgtgtgtacagcattgctgtgcccaaggagtttgtggtgtttggccagtttgtgttcttccagaccagcctgcatgatgtggtggaggtgtatgatggccccacccagcagagcagcctgctgagcagcctgagcggcagccacagcggggagagcctgcccctgagcagcggcaaccagatcaccatccgcttcacctctgtgggccccatcacagccaagggcttccactttgtgtaccaggccgtgcccaggaccagcagcacccagtgcagctctgtgcctgagccccgcttcggcagaagaattggaaatgaatttgctgtgggcagctctgtgctgtttgactgcaaccctggctacatcctgcacggcagcatcgccatccgctgtgagaccgtgcccaacagcctggcccagtggaatgacagcctgcccacctgcatcgtgccctgtggcggcatcctgaccaagaggaagggcaccatcctgagccctggctacccagagccctatgacaacaacctgaactgtgtgtggaagatcaccgtgcctgagggcgccggcatccaggtgcaggtggtgtcctttgccacagagcacaactgggacagcctggacttctatgatggaggagacaacaatgccccccggctgggcagctacagcggcaccaccatcccccacctgctgaacagcaccagcaacaacctgtacctgaacttccagagcgacatctctgtgtctgctgctggcttccacctggagtacacagccatcggcctggacagctgcccagagccccagacccccagcagcggcatcaagatcggggaccgctacatggtgggagatgtggtgtccttccagtgtgaccagggctacagcctgcagggccacagccacatcacctgcatgcctggccctgtgcggcgctggaactaccccatccccatctgcctggcccagtgtggcggggccatgtctgacttctctggagtcatcctgagccctggcttccctggcaactaccccagcagcctggactgcacctggaccatcaacctgcccatcggctttggagtgcacctgcagtttgtgaacttcagcacagagaccatccatgactacctggaggtgcgcagcggcagcagcgagaccagcaccgtcatcggccgcctgagcggcccccagatccccagcagcctcttcagcaccacccatgagaccagcctgtacttccacagcgactacagccagaacaagcagggcttccacatcgtgtaccaggcctaccagctgcagagctgcccagacccccggcccttcagaaatggatttgtgattggaaatgacttcaccgtgggccagaccatcagctttgagtgcttccctggctacaccctgattggcaacagcgccctgacctgcctgcacggcgtgtccaggaactggaaccaccccctgccccgctgtgaggccctgtgtggcggcaacatcacagccatgaatggcaccatctacagccctggctacccagatgagtaccccaacttccaggactgcttctggctggtgcgggtgcccccaggaaatggcatctacatcaacttcaccgtgctgcagacagagcccatctatgacttcatcaccgtgtgggatggccctgaccagaacagcccccagatcggccagttcagcggcaacacagccctggagagcgtgtacagcaccagcaaccagatcctgatcaagttccacagcgacttcaccaccagcggcttctttgtgctgagctaccacgcctaccagctgcgggtgtgccagcccccacctcctgtgcccaatgctgagatcctgacagaagatgatgaatttgaaattggagacatcatccgctaccagtgcctgcccggcttcaccctggtgggcaatgccatcctgacctgccgcctgggggagcggctgcagatggatggagcccctcctgtgtgccaggtgctgtgcccagccaatgagctgcggctggacagcactggagtcatcctgagccctggctacccagacagctaccccaacctgcagatgtgtgcctggagcatctctgtggagaagggctacaacatcaccatgtttgtggagttcttccagacagagaaggagtttgatgtgctgcaggtgtatgatggccccaacatccagagccctgtgctgatcagcctgagcggggactacagcagcgccttcaacatcaccagcaatggacatgaggtgttcctgcagtggagcgctgaccacggcaacaacaagaagggcttccgcatccgctacatcgccttctactgcagcaccccagagagcccccctcatggctacatcatcagccagacaggaggccagctgaacagcgtggtgcgctgggcctgtgaccggggcttccggctggtgggcaagagcagcgctgtgtgcaggaagagcagctatggctaccacgcctgggatgcccctgtgcctgcctgccaggccatcagctgtggcatccccaaggcccccaccaacggcggcatcctgaccacagactacctggtgggcaccagggtgacctacttctgcaatgatggctaccgcctgagcagcaaggagctgaccacagctgtgtgccagagtgatggcacctggagcaaccacaacaagaccccccgctgtgtggtggtgacctgccccagcatcaacagcttcatcctggagcacggccgctggagaattgtgaatggcagccactatgagtacaagaccaaggtggtgttcagctgtgaccccggctaccacggcctgggccctgccagcattgagtgcctgcccaacggcacctggagctggagaaatgaaagaccctactgccagatcatcagctgtggggagctgcccaccccaccaaatggaaacaagattggcacccagaccagctatggcagcacagccatcttcacctgtgacctgggcttcatgctggtgggcagcgctgtgcgggagtgcctgagcagcggcctgtggagcgagagcgagacccgctgcctggccggccactgcggcatccctgagctgattgtgaatggccaggtgattggagaaaattatggctacagagacacagtggtgtaccagtgcaaccctggcttccgcctcatcggcagctctgtgcgcatctgccagcaggaccacaactggagcggccagctgcccagctgtgtgcctgtgtcctgtggccaccctggcagccccatctacggccgcaccagcggaaatggcttcaacttcaatgatgtggtgaccttcagctgcaacatcggctacctgatgcagggccccaccaaggcccagtgccaggccaaccggcagtggagccaccccccacccatgtgcaaggtggtgaactgcagcgaccccggcatcccagccaacagcaagcgggagagcaagattgagcacggcaacttcacctatggaacagtggtgttctatgactgcaaccctggctacttcctgtttggcagctctgtgctgatctgccagcccaacggccagtgggacaagcccctgcctgagtgcatcatgattgactgtggccaccctggggtgcccccaaatgctgtgctgtctggagagaagtacaccttcggcagcacagtgcactacagctgcaccgggaagaggagcctgctgggccagagcagcaggacctgccagctgaatggccactggagcggcagccagccccactgcagcggagatgccaccggcacctgtggggaccccggcaccccaggccacggcagccggcaggagagcaacttccgcaccaagagcacagtgcgctatgcctgtgacaccggctacatcctgcacggcagcgaggagaggacctgcctggccaacggctcctggacaggccggcagcctgagtgcaaggctgtgcagtgtggcaaccctggcaccacagccaacgggaaggtgttcagaattgatggcaccaccttcagcagcagcgtcatctacagctgcatggagggctacatcctgagcggccccagcgtgcggcagtgcacagccaacggcacctggagcggcaccctgcccaactgcaccatcatcagctgtggggaccccggcatcccagccaacggcctgcgctatggagatgattatgtggtgggccagaatgtgtcctacatgtgccagcccggctacaccatggagctgaatggcagccgcatccgcacctgcaccatcaatggcacctggagcggcgtgatgcccacctgcagagctgtgacctgccccaccccaccccagatcagcaatggccgcctggagggcaccaactttgactggggcttcagcatctcctacatctgcagccctggctatgagctgtccttccctgctgtgctgacctgtgtgggcaatggcacctggagcggggaggtgccccagtgcctgcccaagttctgtggggaccccggcatcccagcccagggcaagcgggagggcaagagcttcatctaccagagcgaggtgtccttcagctgcaacttccccttcatcctggtgggcagcagcacccgcatctgccaggctgatggcacctggagcggcagcagcccccactgcatcgagcccacccagaccagctgtgaaaatcctggggtgcccaggcatggcagccagaacaacaccttcggcttccaggtgggctctgtggtgcagttccactgcaagaagggccacctgctgcagggcagcaccaccaggacctgcctgcctgacctgacctggagcggcatccagcctgagtgcatcccccacagctgcaagcagcctgagaccccagcccacgccaacgtggtgggcatggacctgcccagccacggctacaccctcatctacacctgccagcccggcttcttcctggccggcggcacagagcaccgggtgtgccgcagtgacaacacctggacaggcaaggtgcccatctgtgaggccggcagcaagatcctggtgaaggaccccaggcctgccctgggcacccccagccccaagctgtctgtgcctgatgatgtgtttgcccagaactacatctggaagggcagctacaacttcaagggcaggaagcagcccatgaccctgactgtgaccagcttcaatgccagcacaggccgggtgaatgccaccctgagcaacagcaacatggagctgctgctgagcggcgtgtacaagagccaggaggcccggctgatgctgcgcatctacctgatcaaggtgcctgcccacgcctctgtgaagaagatgaaggaggagaactgggccatggatggctttgtgtctgctgagccagatggagccacctacgtgttccagggcttcatccagggcaaggactatggccagtttggcctgcagaggctgggcctgaacatgtctgagggcagcaacagcagcaaccagccccacggcaccaacagcagctctgtggccatcgccatcctggtgcccttctttgccctgatctttgctggcttcggcttctacctgtacaagcagaggacagcccccaagacccagtacacaggctgcagcgtgcatgagaacaacaacggccaggccgcctttgagaaccccatgtatgacaccaatgccaagtctgtggagggcaaggctgtgcgctttgaccccaacctgaacacagtgtgcaccatggtgtag

SEQ ID NO: 259046 - DNA, 11004 bp, Artificial Sequence
  derived and/or modified sequence
atgtggagctggttcctgtgctggaagcccgtgcagctggaccggcagaccgcctccggcttcatctacacctgcggaggtaccctgaaaggacttaatggtaccattgagagccccggctttccctacggttatcctaacggggcaaactgtacctgggtgatcatcgccgaggaacgcaacagaattcagatcgtttttcagagctttgcattagaagaggagtatgactatctttcactctacgatggacatccgcatccaaccaacttccggacccggctgaccggcttccacttgccgccaccagtgacgtcaaccaagtctgtgttttccttgcgcctcacctccgacttcgcggtctcagcccacggttttaaggtttactacgaagagctccagagcagttcatgtgggaatccaggagtcccccctaaaggtgtgctctacggtacccgctttgatgtgggcgacaagattaggtacagctgcgtgactggctacatccttgatggccatccccagctgacttgcattgcaaacagcgtgaatactgcatcatgggatttccccgtcccaatatgccgtgctgaggatgcatgtgggggaactatgagaggtagttcggggattataagctccccgagcttccctaacgagtatcataacaacgctgactgtacctggaccattgtggcagagccaggggacaccatctccctaatctttaccgactttcagatggaggagaaatatgattatctggagatcgaaggctcagagcctccgactatttggttaagtggaatgaacattcccccccccattatttctaataaaaattggctacgactgcactttgtcacggattccaatcaccggtatagaggttttagtgcaccttaccaggggtcctcaaccctgacgcacacaacaagcacaggtgagctggaggaacacaaccggactacaacaggcgcgattgcagttgcttcaacacccgcagatgtgacagtcagtagcgtcacagccgtgactatccatcgactgtcggaagaacagcgtgtgcaggtcacatcactgaggaattcggggctggatcctaacactagtaaggatggcttatcccctcaccctgccgatacccagtcaacacgaagacgacctcggcacgctgagcagatcgaacggacaaaagagctcgccgtggtaactcacagggtgaaaaaggctattgactttaagtctagagggtttaaactatttcccggtaaggataattccaataagtttagcatcctcaatgaagggggtataaagactgcctccaacttatgtcctgacccaggtgaaccagagaatggcaaaaggattgggagtgatttttccctgggctctactgttcagttctcttgtgatgaagattatgtcttacagggagctaaaagcattacgtgtcagcgcattgccgaagtctttgccgcgtggtctgaccatcgacccgtctgcaaggtaaaaacatgtggcagcaacctccaggggccatccgggacattcacctcacccaacttccccttccagtacgactccaatgcccagtgtgtttgggtcattacggccgtcaacaccaacaaagttattcaaattaatttcgaggaattcgacctggagatcggttatgatactctgaccattggagatggaggcgaggtgggagatccgcgtactgttcttcaggtcttgactggatctttcgtgcctgacctgatcgttagcatgtcttcacagatgtggctacaccttcagactgacgagtctgtgggctctgttgggtttaaagtgaactacaaggagattgaaaaggagagctgcggagaccctggcacccccctctatggcattcgcgagggcgacgggttctctaaccgtgatgtgctgaggttcgagtgtcagtttggcttcgagctaatcggtgagaagtccatcgtgtgtcaagagaataaccagtggtcagcgaacattccaatatgtattttcccttgcctttccaacttcactgcgccaatgggtactgtgctcagtcccgactacccggaaggctacggaaacaatctgaattgcatttggacaataataagtgatcctggctcccgtattcatctctcttttaatgatttcgacctggagagtcaattcgattttctcgctgtgaaggacggagattctcccgaatccccaattctgggaacctttacaggcgccgaggtgccgtcccatctcacaagtaattcacatatactccgtttggaatttcaggccgaccactccatgtcgggccgaggctttaacatcacctacaatacatttggccataacgagtgtcctgatcctggcatccccattaatgctagacgcttcggggacaactttcagctgggaagtagcatcagtgtgatatgcgaggagggcttcatcaaaacacagggtacagagactatcacatgcattctgatggacggtaaggtgatgtggtcaggactgatcccgaaatgcggggccccttgcggcgggcacttttctgcccccagtggggttattctttctcctggctggcccggatactataaagatagcttgaactgtgaatgggtcatcgaggccgagccgggacactccatcaagatcacttttgaacggttccagacagagttaaattatgacgtgctagaagtgcacgatggaccaaacctactgtcgcccctcttgggcagttacaacggcactcaggttccacaattcctctttagttcctctaacttcatttacttactgttcacgaccgacaattcccgcagtaataatggatttaaaatacactacgagagtgtcacggtaaatacttactcctgcctggatccaggcatccccgttcatgggagaagatacggacacgactttagcattgggtccaccgtctcatttagctgcgatagcggctacaggctcagtcatgaggaaccgcttctttgtgagaagaatcactggtggagccacccgcttcctacctgcgatgctctctgtggcggtgatgtgcgcgggcctagcgggacaatcctgtcacctggatatccagagttctatccaaattcactcaactgcacttggacagtcgatgttacccacggtaaaggcgtgcagttcaacttccatacatttcacttggaagatcatcatgattatttgttgatcacagagaacgggagcttcacccagccgttggccagattaaccggctcagaccttccccctaccatcaacgccggactttacggcaattttagggcacagctgaggtttatctccgacttctctatctcctatgaaggattcaatatcaccttttcagaatataatctggaaccatgcgaagacccaggcataccacagtatggatccaggatcgggttcaacttcggcatcggagacacattgacattttcctgctcctcaggatatagattggagggcacatcagaaatcatttgcctgggcgggggacggagggtctggtctgcccctctgcctcggtgtgtggccgagtgtggagctagtgctaccaacaatgagggcatcctgttaagccctaactatccgctgaattacgagaacaaccatgagtgcatttattcaatacaggtgcaagccggaaaaggcatcaatatctcagccagaacctttcacctggcacagggtgatgtcctgaagatttacgatgggaaggataaaactacgcacctgctgggcgcctttaccggtgccagcatgcgcggcctcaccctgtcttccaccagtaatcagctgtggttggagttcaatagcgacacagagggcacagacgaaggctttcagttagtgtatacatcattcgagctttctcactgcgaagaccccgggataccccaattcggatacaaaatttcagatcaggggcactttgcaggcagtaccattatttatgggtgtaacccgggttacaccctccacgggagcagtctacttaagtgcatgactggggaacgcagggcatgggactatcctctcccctcttgcattgccgagtgcggaggaaggttcaagggagagagcagcgggcgaatactcagcccagggtatccgttcccttatgacaataatttacggtgtatgtggatgatcgaggtggacccgggtaacattgttagcttgcaatttctggcttttgataccgaagccagccacgatatcctgcgggtctgggatgggcctccagaaaacgacatgctcctgaaagagatatccggaagcctgatccccgagggcatccatagcactttaaatatagtcaccattcaatttgatactgacttttatatctcaaagtcaggcttcgctatccaattcagttcttctgttgcaaccgcctgtcgggaccccggtgtgccgatgaatgggactagaaatggtgatggacgtgaaccaggcgacactgttgtgttccagtgtgacccaggatacgagctgcagggagaggagcggatcacctgcattcaggtcgaaaatcggtatttctggcaaccctccccccctgtctgcattgctccatgtggcggaaacttaacgggtagctctggcttcattctcagtcctaatttccctcatccttacccacatagccgagattgtgactggaccataacagttaacgccgattatgtcatcagcttggcctttatctctttctccatcgaaccgaattatgatttcctgtatatctatgacgggccggacagtaatagccccctgattggtagttttcaggactccaagctcccggaacgtatagaatcaagttctaatacgatgcatcttgcattccggtccgacggtagtgttagctatacaggatttcatttagaatacaaggccaaattgagagagtcctgtttcgatccgggaaacatcatgaatggcacccgcttaggcatggactacaagctcggctcaacggtgacctactactgcgacgctggctacgtcctccaggggtattcgacactcacatgtatcatgggagatgacgggagacccgggtggaatcgtgccctgcctagttgccatgccccatgcggctcgaggagcacgggatccgaaggcacagttctgagccctaattaccctaagaactatagcgtgggacacaattgtgtgtacagcatcgccgttccaaaggaattcgtggtttttggacaattcgtgttttttcagacgtccttgcacgatgtggtggaggtatatgatgggcccacacagcagtctagcttgttgtcttccctcagcggatcccactcgggcgagagcctgccactgtcgtcaggtaatcagataaccatacgcttcacgagtgttggccctataaccgcaaaaggatttcacttcgtgtaccaggctgtgcctcgcactagcagcacacagtgcagctcagtaccagaaccacggtttgggaggagaattggaaacgagttcgctgtgggatcctctgtgctgttcgattgcaaccccggttacatcctgcacggcagcatcgctattcgttgcgaaacagtcccaaactccctggcccagtggaatgatagcttaccaacctgcattgttccatgtgggggcattctgaccaagagaaaaggtaccattctcagtccaggctaccctgagccctatgacaataacctgaattgcgtgtggaagatcaccgtgccggaaggcgctggcattcaggtgcaggtggtctccttcgccaccgagcacaactgggattcgttggacttctacgatgggggtgacaacaacgcccccaggcttggcagttacagtggaactacaatacctcacctcctcaattcaacatcgaataatctctacctaaattttcagagtgatatatcagttagcgctgccggcttccatttagaatataccgcaattgggttagactcatgcccggagccccagacacccagctcgggcattaaaatcggggaccgctacatggtcggcgacgtcgtgtcatttcagtgtgatcagggatactctctacagggccactcccacatcacttgtatgcctgggccagtgaggagatggaattatcctatacccatctgcctcgctcagtgtggcggggcaatgagtgatttctcaggagtgattctgtctccaggattccccggcaattacccctccagcctcgactgcacctggaccatcaatcttcccattggatttggggttcacctgcagttcgtgaatttttctaccgagacaatccacgactatttagaagtacgttccgggtccagcgaaactagtaccgtcattggccgtttatcaggtcctcaaatcccatcctcactattctccactactcacgagacttccctctactttcactccgactacagtcagaacaaacagggattccacattgtgtaccaggcataccagctccagagttgcccagatcccagacctttccgcaatggcttcgttatcggaaatgatttcacagtgggccagacgatttcttttgagtgttttcccgggtataccctgataggtaattccgcactgacttgtctacatggtgtgtctagaaattggaaccaccccctgcccaggtgtgaggcactgtgcggtggtaacatcactgcaatgaacgggaccatctactctcccgggtatccggacgaataccctaacttccaggactgtttctggctggtgcgtgtacctccagggaatggtatttacattaattttaccgtactccagaccgaaccaatctatgattttattactgtctgggatggccccgaccagaacagccctcaaattggccaattcagtggcaatacagccttggagtccgtgtactcgaccagtaatcagatcctgatcaagtttcattcggatttcacaacgtccggcttctttgtcctgtcttaccacgcataccaacttcgtgtttgtcaaccaccccctccagtgccaaatgctgaaattttgactgaggatgacgagtttgaaataggtgatattattcgttatcagtgcctcccagggttcaccctggtgggcaatgcaatcctgacatgcagactgggggaaaggcttcaaatggacggagctccacccgtttgccaggttctgtgtccagccaacgaactgcggcttgacagcactggcgtgatactgtcacctggctatccagattcatacccgaacctccaaatgtgcgcgtggtcaatttccgttgagaagggctataacatcactatgttcgttgagttttttcagacggagaaagagtttgatgtgctgcaagtctacgacggacccaacatccagtctcctgtcctgatttcgttgtcaggcgattactccagcgcctttaatatcaccagcaatggacacgaagtgtttctacagtggagcgcggaccacgggaataacaaaaaggggttccgcatccggtatatcgccttctactgttcgacgccggagtctccaccgcatggctacatcatcagtcagaccggcggacagctcaactcagtggtgaggtgggcctgtgacagaggattcaggctcgtgggtaagtcgtctgcggtatgccggaagtcatcttacggttatcatgcatgggatgcacccgtccccgcctgccaggcaatcagctgcggtatacctaaagcgcctactaacggcggaattttaactaccgattacctcgtagggacacgggttacttacttctgtaatgatggatacagactgtcatccaaagaattaaccacagccgtgtgtcagtcagatggtacgtggagtaatcacaacaaaactccacggtgtgtcgtggtgacatgcccatcaattaactctttcatcctggagcacggaaggtggcgtatagtcaatggcagccactacgagtataagacaaaggtggtttttagttgtgatcccgggtaccatggcctggggccggcctcgatcgagtgcctcccaaatggtacctggtcctggcgcaacgaaagaccctattgccagatcatcagctgcggcgagttacccactcctcctaacggaaacaaaattggaacgcagacttcttacggcagtactgctatcttcacctgcgaccttggattcatgctcgttgggagcgccgtgcgcgagtgtttaagcagcggcctttggtcagagtccgagacccgctgcttggcaggtcactgcggcatccccgagcttatcgttaatgggcaggtgattggcgaaaactacggttatagagatactgttgtataccaatgtaacccgggcttcagactcatcgggtcgagtgtaagaatatgtcagcaagaccacaactggtcagggcagctgccaagttgtgtcccagtatcttgcgggcacccgggaagccccatttacggccggacgtccgggaacggcttcaacttcaatgatgtggtgacattctcatgcaacattggatacctgatgcaggggcccacaaaagctcagtgccaggctaatagacaatggagccacccgccacccatgtgtaaggtagtcaactgcagcgaccccggcattccagcaaactccaagcgggaaagcaaaatcgaacatggcaattttacctacggcactgttgtgttctatgattgtaatcccggctattttctgttcggatcctctgttctgatctgtcagcccaacggccagtgggataagcctctcccagagtgcatcatgatagattgcggccaccctggtgtgccaccgaatgccgtgctgtctggagagaaatatacgttcggtagcacagtacattattcttgtaccggtaaaagatccctcctaggtcagagctccaggacttgccagctgaacggccattggagtgggtcccagccgcattgtagcggagacgctaccggtacatgcggcgacccaggaacaccgggacacggatcccgccaagaatccaacttccgtaccaaatccactgtgagatacgcctgcgacactggctatatccttcatggaagtgaggagaggacatgtctggccaatgggtcctggactggccggcagcctgagtgcaaagctgttcagtgcggcaaccccggtaccacggccaacggcaaggtgtttcgaattgatgggacaactttctcctcctccgttatctacagctgcatggaggggtacatattatctggtcctagcgtcagacaatgcacggctaacggcacttggtccggtaccctgcctaattgcaccatcatcagttgtggtgatccaggtatccctgcaaacggactgcggtacggagatgactatgtcgtaggccagaacgtgagttacatgtgtcaacccgggtacacaatggagcttaacgggagcagaattcgcacatgtacgattaacggcacctggtccggagtgatgcctacatgcagggccgtgacatgcccgacaccaccccagatcagtaacgggagacttgaagggaccaacttcgactggggcttttccatctcttacatttgctcccccggctatgaactgtccttcccggcagttttgacttgtgtcgggaatgggacatggagcggagaggtccctcagtgtttacccaaattctgcggagatcccgggatccccgcccaggggaagagagagggcaaaagctttatttaccaaagcgaagtctccttcagctgtaacttcccttttatcctggtaggctcttcaacaagaatctgtcaggcagacggcacttggtccgggagtagtccgcactgcattgagcccacgcagacatcctgtgagaatccgggagtgccccggcatggttcccagaacaatactttcgggtttcaggtggggtccgtagtgcagttccactgtaagaaagggcatctgcttcagggaagtacaactagaacctgcctcccagacctgacttggtcgggcatccagcccgagtgcatccctcatagctgcaaacaacccgaaacccccgctcacgctaacgtggtgggaatggaccttccaagccacggatacacccttatctatacatgtcagcctggttttttcctggccggggggaccgaacatagggtgtgtagaagtgacaatacatggacaggcaaggtgccgatttgcgaggccgggagtaagatactcgtgaaagatccaagacctgcactgggaacccccagccccaaactgtccgtacccgatgatgtcttcgcccaaaactacatttggaagggtagctataattttaaagggcggaaacagccaatgacattgactgttacctcatttaacgccagcactggccgcgtgaacgctaccttgagcaacagtaacatggaactattgctaagcggggtctataaaagccaggaggcgcgactcatgttgagaatctatttgataaaggtcccagcacatgctagcgttaaaaaaatgaaggaggagaattgggccatggacggtttcgtgtccgccgaacccgatggggccacatacgtgtttcaggggttcatccagggcaaggattatggccaatttggccttcagcggttggggcttaatatgtccgagggctctaattcctctaaccagccgcacggaactaattccagcagcgtcgcaatcgctatactggttccatttttcgccttaatctttgctgggttcggattctatctgtacaagcagcggacggctcctaaaacacagtatactggctgttcggtccacgagaacaacaacggtcaggcagcatttgagaaccctatgtatgacacaaatgccaaatccgttgaagggaaggcagttcgcttcgaccccaacctgaatacagtttgcactatggtgtag

SEQ ID NO: 259047 - DNA, 11004 bp, Artificial Sequence
  derived and/or modified sequence
atgtggtcttggttcttgtgctggaagcctgtgcagctggataggcagacagcctccggattcatctacacctgtggcggtacactcaaaggtctgaatggaaccatcgagagtcctgggttcccttatggctatccgaacggagccaactgtacatgggtgatcatcgccgaagaacggaatcgtatccagatcgtattccagtcttttgcactcgaggaggagtacgactacttgagcctgtacgatggccacccacaccccaccaactttcgcactcgtttgacagggtttcatctgccaccccctgtgacctcgacaaaaagcgtgttttcactgcgcctgactagcgacttcgcagtgagtgctcatggttttaaagtctattacgaggagctccagagctcgtcttgcggaaatccaggggttccccctaagggggtactgtatggtaccaggtttgatgttggagataagatcagatattcttgtgtgactgggtatattcttgatggccacccacagctgacttgtattgccaactctgtcaacacagcctcttgggactttcccgtgcccatctgtagagcagaagatgcctgtggcggtacgatgcgtgggagtagtggtatcattagcagtccaagtttcccgaatgagtaccataacaacgccgactgcacgtggacgatagtggcggagccaggtgacaccatctctctgatcttcacagatttccagatggaagagaaatatgactatcttgaaatcgaaggatcagaaccgccaaccatatggctgtctgggatgaacattccccctccaattatatccaataaaaactggctgagattgcacttcgtaaccgacagcaaccatagatatagaggcttttcagccccttaccagggatcttcgaccctgacccataccacttccactggagagctcgaagaacacaataggactacgactggagccatcgcagttgctagcacaccagcggacgttactgtgtcatcagtgactgccgtcacaattcacagattaagcgaagaacaacgggtgcaggtgacatccctgaggaatagcggcctagatcccaacacttcgaaagatggattgtcaccccatccagctgatacccaaagcacacgccgtcggccacggcacgctgaacagatagagcggaccaaagaactggcagtcgttacacatagagtgaagaaggctattgacttcaagtcccgcggatttaaattgttcccaggcaaagacaactctaacaaattctcaattctgaatgaggggggaatcaaaacagcttccaacctgtgtccagaccctggcgaacccgagaacggtaaaagaattggctctgatttctctctggggagtaccgtgcagttcagctgtgatgaggattatgtgttacagggagctaagagcattacatgccagaggattgccgaagtgttcgcagcctggtcagaccacaggcccgtgtgtaaggttaaaacatgtggctctaacctacagggccctagtggcacatttaccagtcctaattttccattccagtacgacagcaacgcccagtgcgtgtgggttataactgccgtgaatactaacaaagtcatccagatcaatttcgaggagttcgaccttgagattggctatgataccctcaccattggcgatggcggagaagtaggcgacccgaggaccgttttgcaggtcctgaccgggagttttgtgccggacctgattgtatcgatgagttctcagatgtggctgcatctgcaaactgacgagagtgtaggatccgtgggctttaaggtcaactacaaagaaattgaaaaggaaagctgcggcgacccgggaacgccactatatgggatcagagaaggggacggcttttccaatagggacgtgctgaggttcgagtgccaatttggattcgaactcattggagaaaagtcaattgtctgtcaggagaacaaccaatggtcagccaatattcctatttgcatcttcccatgcctgagtaacttcactgcgcctatgggaacagtgctcagccctgactacccggaagggtacggtaacaacttgaattgcatctggaccatcatttccgatccaggttcccgcatccatctatccttcaatgatttcgacctggaatcccagtttgatttcctggcagtcaaagacggagatagtcctgagtcccctatccttggcacttttaccggagctgaggttcccagtcacctgacaagcaatagccacatccttaggctggagttccaggctgaccatagcatgagtggacggggttttaacatcacttataatacctttggacataatgaatgtcctgacccgggaatccctataaacgccagaagattcggcgataactttcagctggggtctagcatctccgtgatttgtgaggagggcttcattaagacacaaggaactgaaacaattacatgcatactcatggatggtaaggttatgtggtctgggctgattcctaagtgcggggctccatgcggcggacacttctcggcaccttccggagtaatcttgtcgcctggctggccaggatactacaaagacagcctgaactgtgaatgggtgattgaggcagaaccaggacactccattaagatcacattcgagcggttccaaacggaactaaactatgatgtgctcgaagtgcacgatggtcctaacttgctgtcccctctcttgggatcatacaatggtacccaggttccacagtttctctttagctccagcaattttatttacctgctgttcacgactgacaatagtagatccaacaatggcttcaagatccactatgagagcgtcactgtgaatacgtattcgtgcctggaccccggaattcctgtgcatggcaggcggtacggacacgatttctctataggtagcacggtctctttctcatgcgattccggctataggctgtcacacgaggaaccactgctgtgcgagaaaaaccactggtggtcccacccccttcctacatgtgacgccttgtgtggcggagacgtgcggggtccttccggcaccatcctctcaccgggataccctgagttctacccaaactcattgaattgcacctggacagtggatgtgactcatggcaaaggggtccaattcaactttcacaccttccatttggaagatcaccacgactatctcctgattacagagaacggaagcttcacccagcctctggccagactgacaggatccgatctgcctcccactattaacgcaggtttgtacggaaactttcgggctcagctgaggttcatatccgacttctcgatttcctacgaaggctttaacattacgtttagcgagtacaacctcgaaccttgtgaagaccccggaatcccgcagtacgggtcgaggatcggttttaattttggcatcggagacaccctcacatttagctgcagttccgggtacagattggaggggaccagcgagattatctgcttgggcggaggtaggcgggtgtggagtgccccactccccagatgtgtcgcagagtgcggagcctcagcaaccaataacgaagggatcctcctctctcctaactaccccctgaactacgagaacaaccatgagtgtatatactccatccaggtgcaggcagggaagggaataaatatcagcgctcggacgtttcatctcgctcaaggcgacgttcttaaaatctacgacggtaaagacaagactacccacctattaggggcatttaccggtgccagtatgaggggactaaccctgtcgtctaccagcaatcagctgtggctggagtttaactcggacactgaggggaccgacgaaggcttccaattggtgtataccagttttgagctgtctcactgcgaagatcccggaatccctcagtttggttataagataagcgaccagggtcacttcgccggaagtacaataatttacggctgcaaccctggatacacccttcacggatcgtcgcttctgaagtgcatgactggcgagagaagagcttgggattatcccctgccatcatgcatagctgaatgcggaggaaggttcaagggggagagctcggggaggatcttgagtccaggttatccctttccttatgacaacaacctgcgttgcatgtggatgattgaggtagacccaggtaacatagtgtctctgcagtttctcgcgtttgacacagaggcctcccatgatatacttcgtgtgtgggatgggccacctgaaaacgatatgctactgaaggagatctcaggaagcctaatccccgaaggcatacacagcacgctaaacatagtgacaatccagttcgataccgatttttacatttcgaagtccggctttgccattcaattcagttctagcgtggcgacagcttgtcgggacccaggagtgcctatgaacggaacacggaacggcgatgggagagagcccggagacactgtggtcttccagtgcgatccgggatacgaactacagggggaagagcgcatcacatgcattcaggttgagaaccggtatttttggcagccttcaccaccagtctgtatagccccatgtgggggtaatctaaccgggagctcgggctttatactctctccgaatttccctcacccatacccgcattcacgggactgtgactggacgatcaccgtgaacgcagactatgtgatctctctagcctttatttctttctcaatagagccaaattacgactttctgtacatttacgacggtccagattccaattccccattgattgggagctttcaggattctaagctgccggagcgaatagagagcagctcaaacacaatgcacctggcgttccgcagcgatggaagcgttagctacaccggcttccatctggagtacaaagctaagcttagggaatcatgttttgaccccggaaatattatgaacgggacgaggctgggcatggattacaagctgggatctacagttacttactattgcgatgctgggtacgtcttacaaggctacagtacgctgacctgcatcatgggggacgatggtcgaccaggttggaatagggccttgccttcatgccatgccccatgtggttcacgctccaccggatccgaaggcacggtcttgtcacccaattaccccaagaattatagcgttggccacaattgtgtttacagtatagcggtccccaaggaattcgtggtcttcggccagtttgtttttttccaaacgagtctgcacgatgtcgtggaagtttatgatggtcctactcagcaatcaagcctcctgagctctctgtcagggtctcatagtggggaaagtcttccgctgtcaagcggaaaccagatcaccattaggtttaccagcgtcgggcctatcaccgcgaagggttttcactttgtctaccaagcagtccctcgcaccagcagcactcagtgctccagtgtgccagagccccgattcggcaggaggatcggtaatgaatttgcagtgggctcctcagtgctgtttgactgcaatcccggatatatactgcatggaagtattgctatccgctgtgaaacagtgcccaattcgctggcccaatggaatgactccttgccaacatgtattgttccctgcggtggcattctcacaaagagaaagggaaccatcctttccccgggttacccagagccttatgacaataatttgaattgcgtgtggaaaattaccgtaccagaaggggcaggaattcaggtccaagttgtgtccttcgcaactgaacacaactgggatagcctagatttttatgatggtggcgataacaatgctcctcgcctgggttcttacagcggtactactattccacaccttctgaactcgacctccaacaatctgtatttaaattttcagtctgacatcagcgtgtcagcagcaggattccatctagaatatactgccattggtctcgattcgtgcccggagccgcaaactcccagttcagggatcaagatcggcgatagatacatggtaggggacgtcgtctcctttcagtgcgatcagggttactccctacaggggcatagtcatatcacctgcatgcctggccctgtgcggaggtggaactaccctatccctatttgtcttgcccaatgcgggggagctatgtcagacttttcaggggtgatcttatctcccggttttccaggcaactatccttcctctctggactgtacatggactattaacttgcctatcggctttggcgtccacctgcaattcgtgaacttcagcacagaaaccatccatgactacctagaagtgagatctggttccagtgaaacgagtacagtgattggcagattaagcggtccgcaaatcccgtcatctctgttttccacgacccacgagaccagcctatacttccactccgattattcgcagaataagcagggcttccacattgtgtaccaagcttaccaactgcagtcctgtcctgatccgcgaccgttccgaaatggcttcgtaataggcaatgactttaccgtgggacaaacgatctctttcgagtgtttccctggctatacccttatcggaaactccgcccttacttgcctccacggcgtcagtcgaaattggaatcacccactgcctagatgtgaggctttgtgcggtggtaatattaccgcaatgaatggcaccatttactctcctggttatccagacgaataccctaattttcaagattgtttctggcttgtccgggtgcctcccggtaacggcatttacatcaatttcactgtgcttcaaacagagccaatctatgatttcataacagtgtgggatgggcctgaccagaattccccacagattgggcagttctctgggaacacagccctggagtcggtctattctacgagcaaccaaattctgataaaatttcatagcgacttcactaccagcggctttttcgtgctgtcctaccacgcttaccaactcagagtgtgccagcctccccctccggtgcccaacgctgagattctgacagaggatgacgagttcgaaatcggagacataataaggtaccagtgcttgcccggtttcaccttggtgggcaacgcaatcctgacctgtcgtctgggcgaacgtcttcaaatggatggggcacctcccgtttgccaggttttatgtccagccaacgagcttagactcgattccactggggtcatcctgagtccgggatatccggactcctaccctaaccttcaaatgtgcgcatggagtataagcgttgagaagggatataacattaccatgttcgtggagtttttccaaactgagaaagagtttgatgttctccaggtatatgacgggccaaacattcagagtcctgtcctcatcagtttatctggcgactatagctccgcttttaatataactagtaatggccacgaagtgtttctgcagtggtccgctgatcacgggaataacaaaaaaggcttcagaatccgctacatcgccttttactgctccacaccggagagcccccctcacggctacatcatctcccagactggtggtcagctgaacagtgttgtcaggtgggcttgtgaccggggttttcgcctcgtaggtaagtcatcagcagtctgccgaaaaagctcctatgggtatcacgcatgggacgcaccagtacctgcgtgtcaagctatttcatgcgggattcctaaggcgccaactaacggaggaatcctgacgaccgattacctggttggaacaagggtgacatacttttgcaacgatggctacaggttgagctcaaaggaactgaccacagccgtgtgtcagtcagatggcacctggtctaaccataacaaaactcctcgctgcgtggtcgtgacatgtcccagtattaactccttcatcctggaacacggcaggtggagaatagtcaatggaagtcactatgagtataagacgaaggtagtcttcagttgtgaccccggatatcacgggctgggacctgcgagcattgaatgtctgcctaacgggacatggagctggcggaacgagcggccttactgccagatcatttcctgtggcgaattacccaccccgcctaacggcaacaaaatagggacacagacgtcttacggctccaccgcaatctttacatgcgatctgggctttatgttggtgggtagcgctgtcagagagtgcctcagttccggcctctggtccgaaagcgaaaccaggtgtctcgcaggccactgcggcatccctgagctaatcgtgaatggtcaggttatcggggaaaattacgggtatcgcgacactgttgtctaccagtgtaaccctggattccggctaatcgggagttcggtccggatctgtcaacaggaccacaattggagcggacagttgccaagctgtgtgcctgtctcatgtgggcacccaggttcacctatctatggaaggactagcgggaacggatttaattttaatgacgttgtgacattctcatgcaatattggctatttaatgcaaggtccgacgaaagcgcagtgtcaggcaaaccgacagtggtcacacccacctccaatgtgcaaagtcgtaaactgctctgacccaggcattcccgctaattccaagcgggaatcgaaaattgaacatggcaacttcacctatggaacggtggtcttttacgactgcaatccaggctattttctgttcggctcctcagtgttaatctgccaacccaatgggcagtgggacaagccactgccagagtgcatcatgatcgattgcggacatccaggcgtgccacctaacgcggtgctgtctggagagaagtacacattcgggtctaccgtgcactactcctgtaccggcaagaggagcctattggggcagtccagccgaacctgtcagttgaatggacattggtcagggtcacagccacactgctcaggcgacgcaaccggaacctgcggcgacccaggcacccctggccatggttcgaggcaggaatctaactttcgaactaaatcaactgtgaggtacgcgtgtgacaccgggtacatcttgcacggcagcgaagaaaggacgtgtcttgccaacggaagttggactggcagacaacctgagtgtaaagcggtccaatgcggcaacccaggaaccacggcgaacggtaaggtgtttcgcatcgatggtacaacatttagcagctccgttatctattcctgcatggagggatatattctttcgggccctagcgtgaggcagtgtacagccaacggtacctggtccgggactcttcccaactgcactatcatttcttgcggcgaccctgggatccccgcaaatggtctcaggtacggagatgactatgtcgtggggcagaatgtgtcttatatgtgccaacccggatacaccatggagctgaacggtagcaggatcagaacctgtacaatcaatgggacttggagcggggtgatgccaacgtgtcgggcagtgacatgtccaacgccccctcagatttctaacggcagattggagggtaccaactttgactggggcttttccatttcatatatttgcagtcccggttacgagctgtcttttccagccgtgctgacctgtgtaggcaacggaacatggagtggtgaggtaccacagtgcctgccaaagttctgtggcgatcctggcattcccgcacaaggcaagcgggagggcaaatctttcatctaccaaagtgaggtgtccttcagctgtaacttccctttcatattggtagggtcgagcacacgaatatgtcaggcagacggcacttggagtgggtctagcccccactgcattgagcctacacagaccagctgtgaaaatcctggggtcccccgtcacggcagccaaaataatactttcgggtttcaggttggctccgtggtgcagtttcattgcaaaaagggccacctactgcaggggagtactactcgcacgtgtctgcctgacttaacttggtccggaatccagccagagtgcataccccactcttgcaaacagcccgaaacacctgcacatgccaacgttgtcggaatggacctgccatcacatggatacacgctcatttatacatgccaaccgggtttttttttggcaggcggaaccgagcatcgcgtttgtcggagcgataacacctggaccggcaaagttcccatctgcgaggcgggtagtaagatactagtgaaggatcccaggccagctttaggaactcccagcccgaaattgagtgtaccggatgacgtatttgcccagaattacatttggaagggcagttataactttaagggccgtaaacagcctatgactcttaccgtgaccagctttaatgcttcgaccggccgagtcaacgcaactttgtctaatagcaacatggaactcctcctgtcaggcgtctataagagtcaagaagccaggctcatgctcagaatatatctcatcaaagtcccggctcacgcatccgttaaaaaaatgaaagaagagaattgggccatggacggattcgtatcagctgagccggacggggcaacttacgtttttcaggggtttattcaggggaaagactatggacagtttggtctccaaaggctaggcctcaacatgtccgaaggctctaatagcagtaaccaacctcacggtacgaactcctcttccgtagctatagcaatcttggtgcctttttttgccctcatctttgccggtttcggattctacctgtacaagcagcgaacagctccaaaaactcaatacaccggctgcagtgtgcacgaaaacaacaacgggcaggccgcatttgagaacccaatgtatgataccaacgccaagtccgtcgaaggtaaggctgttcggtttgatcccaacctaaatacggtgtgcacaatggtctaa

SEQ ID NO: 259048 - DNA, 13018 bp, Artificial Sequence
  derived and/or modified sequence
tacacccctcggccctttggaggaccggagagccggacgacgccgcagcccttgggggagtccagcgccagctggcgaaaagaagcttcatcttccagatcatccgggaaaggggcagaggtggccggttgttgcgactcataaacaacctcttcagcacaacccggttgaatgtggagttggttcctttgctggaaacctgtacagcttgaccgacagacagcctcaggatttatttatacatgtggtggaactttaaaaggacttaatggcactatagaaagccctggttttccatatggatatccaaatggtgcaaactgcacatgggtaataatagcagaagaacgaaatagaatacaaattgtttttcagtcatttgctctagaagaagaatacgactacttatcattatatgatggacatcctcatcctacaaactttaggacaaggttaacaggattccatctgccacctccagtgacaagtaccaaatctgtgttctcactacgtttgaccagtgattttgcagttagtgctcatggatttaaggtatattacgaagaattgcagagtagctcttgtggaaatcctggtgttccacccaaaggtgtattatatggcacaagattcgacgtcggggacaagatccgctacagctgtgtaactggatacatccttgatggccaccctcagctcacctgcatagccaattcagttaatacagcttcgtgggattttcctgttcctatctgtagagctgaagatgcttgtggaggaacaatgagaggatccagtggcatcatatccagccctagttttcctaatgagtaccataacaatgctgattgcacttggaccattgtagcagagcctggggacacaatttcactcatatttactgattttcaaatggaagagaaatatgattacttagaaatagaaggttctgagccacctaccatatggttatctggaatgaatataccaccaccaattatcagcaacaaaaactggctcagactgcattttgttacagacagcaatcatcgataccgtggatttagtgctccctatcaaggttcttctacattgacccacactacctccactggtgagttagaggagcataacaggactaccactggtgctattgctgttgctagcacacctgcagatgttactgtatccagtgttacagctgtcaccatccatagactttccgaggaacagcgagtgcaagttacgagtctcagaaattcaggtctggaccccaacacgtccaaggacgggctctctcctcatccagcagatacacaaagtaccaggagaagaccaagacatgctgaacagatagaaagaactaaagagcttgcagttgttactcatagagtgaaaaaggccatagattttaaatctagaggatttaaattgtttccagggaaagacaacagcaacaagttttctatcttaaatgagggaggtattaaaacagcttccaatttatgcccagatccaggagaaccagaaaatgggaagagaatcggatcagattttagccttggatcaactgtgcagttctcttgtgatgaagattatgtcctacagggcgcaaagagcatcacctgtcaacggatagctgaagtttttgctgcttggagtgatcacaggcctgtgtgtaaagtgaaaacgtgtggctctaatcttcaaggaccaagtggtacctttacatctcccaactttccgttccagtatgacagcaatgcacaatgtgtctgggtcatcacagcagtgaatacaaataaggttatccagataaattttgaagaatttgatctggagattggctatgataccttgacaattggcgatgggggcgaagttggagatcctaggacagtgctccaagtgctgactggaagctttgtaccagacttgatagtgagcatgagtagccaaatgtggctgcaccttcaaacggacgaaagtgttggatctgttggtttcaaggttaactacaaagaaattgagaaagaaagttgtggtgatcctggtacacccttatatggaattagagaaggcgatggattttctaatcgtgatgttttaaggtttgaatgccagtttgggtttgaattaattggagagaaatccattgtttgtcaagagaataaccaatggtctgcaaacatacccatctgtatctttccctgcctgtctaactttactgcaccaatgggaacagttctttctcctgattacccagaagggtatggaaataatttaaattgcatctggacgataatctctgatccagggagccggatacatctttctttcaatgactttgacctggaatcccagtttgatttccttgctgttaaagatggtgactctccagaatccccaattcttggaacctttactggggctgaggtgccttcccatcttactagtaatagtcacatactgcgattggaatttcaggctgaccactcaatgtcaggacgtggctttaacatcacttacaacacatttggacataatgaatgccctgatcctggaataccaatcaatgcacggcggtttggggacaactttcaattaggaagttcaatttcagttatttgtgaagaaggatttattaaaacccagggaacagaaacaattacatgtattcttatggatggaaaagtaatgtggagtggactgattccaaaatgtggagccccatgtggtggccatttttcagctcccagtggagtgattctctcaccaggatggccaggatactacaaagactctttgaattgtgagtgggtgattgaagctgaacctggacactctatcaaaattacatttgaaagatttcagactgaactgaattatgatgttctggaagttcatgatgggccaaatcttctgtcacccttgcttggatcttacaatggcacccaagtgccccagtttctatttagtagcagtaattttatataccttctatttacaacagacaacagtcgttccaataatggtttcaagattcattatgaaagtgttacagtgaacacgtattcttgtttggaccctggcatacctgtacatggccgtcgctatggtcatgatttctccattggctctactgtttcatttagttgtgattcaggatacaggttgagtcatgaagagccccttctatgcgaaaaaaaccactggtggagtcatccacttccaacctgtgatgcattatgtggaggagatgttagagggcctagtggaacaatcttatcacctggttacccggaattttatccaaattctctgaattgtacatggactgttgatgtaacccatggaaaaggtgtgcagttcaacttccacacttttcatttggaagaccatcatgactacttactgatcacagagaatggcagttttacccaaccactggcacgcctgactggttcagatcttcctccaacaatcaatgctggtctctatggaaatttcagggctcaattgcgtttcatttcagatttttcaatatcatatgaaggatttaacataacattctctgaatataaccttgaaccttgtgaagatcctggcattcctcaatatggtagtcgaatcgggttcaactttgggattggtgacactctgaccttctcatgctcttcgggttatcgactggaaggaacatcagagatcatctgtcttggtggtggccgacgagtgtggagtgcacctctgccaaggtgtgtggctgaatgtggtgcatctgcaacgaataatgaaggaattttgctgtctccaaattatccactcaactatgaaaacaaccatgaatgcatttatagtattcaggttcaagcaggaaagggaatcaatatttcagccagaacatttcatttagcacaaggagatgttcttaagatttatgatggaaaagataaaacgactcatctactaggtgcttttactggtgcatctatgcgcggactgacacttagtagtacttcaaatcaactctggctagaatttaattccgatactgaagggacagatgaaggctttcaacttgtgtataccagttttgaactctcacactgtgaagatcctggcattccacaatttggatacaagatcagtgaccaaggccactttgctggtagcaccatcatttatggatgcaatccaggctacactctccacggaagtagccttctcaagtgcatgacaggggagagaagggcatgggactatcctctgccttcctgtattgctgaatgtggaggtcgttttaaaggagaatcatcaggaagaatcttatctcctggctatccttttccatatgacaataacctgcgttgcatgtggatgattgaggtagatcctggaaatattgtcagcttgcagtttcttgcttttgatacggaagcatcacatgatatactccgagtctgggacggtccaccagaaaatgatatgcttttaaaggaaattagtggatctcttattcctgaaggaattcatagcaccctcaatatagtaaccatccagtttgacacggatttttatattagcaaatctggatttgcaattcagttttcaagttctgttgccactgcgtgtcgtgacccaggggtccccatgaatgggactcgaaatggggatggaagagaacctggggacactgttgtttttcaatgtgacccaggatatgaacttcaaggagaggaaagaataacctgcattcaggtagaaaatcggtacttctggcagcccagcccaccagtctgtatagcaccctgtggaggcaatttaacaggatcttcaggctttattctttcaccaaacttccctcatccatatccgcatagcagagactgtgactggactatcaccgtcaatgcagactatgttatctccttggcgttcatcagttttagcatagaaccaaactatgacttcctctatatctatgatggaccagacagtaatagcccactgattggaagttttcaagacagcaagttaccagagagaatagaaagcagctcaaatacaatgcatttggcttttcggagtgatggatctgttagttacactggatttcatctagaatacaaagcaaaactgcgagagtcctgctttgatccaggcaatataatgaatggcaccagacttggaatggattataaattagggtcaacagtcacctattactgtgatgctggttatgttcttcaaggttattcaacactcacctgtatcatgggagatgatggaagacctggatggaatagagccttgccaagttgtcatgcgccctgtggaagtcgttcaacaggttcagaaggcactgttctatcaccaaactatccaaaaaattacagtgtgggacataattgtgtttattctatagcagttccaaaggagtttgtggtgtttggccagtttgtatttttccagacatcactccacgatgttgttgaggtgtatgatgggccaactcagcaatcttctctgttatcttccctctcaggatcccattcaggagaatcacttccactgagttcaggtaatcagatcacaattcgatttacttcagttggaccaataacagctaagggatttcactttgtttaccaagctgttcctagaacaagttctacacaatgcagttctgtgcctgaaccaagattcggaagaagaattggcaatgaatttgcagtcggttcatcggttctttttgattgtaatccaggatatattctccatggatccatagcaattaggtgtgaaacagtgcccaattctttggcccagtggaatgattccttacctacttgtattgtgccctgtggtggaattttaactaagcgcaaagggactattttgtcacctggataccctgagccttatgacaacaatctgaattgtgtgtggaagatcacagtgccagagggagctggcattcaagtgcaagttgttagctttgctacagaacataattgggattctctggacttttatgatgggggagacaacaatgctccaagacttggaagctattcaggaacaacaataccccatcttttgaatagtacgtctaataatctgtatctaaattttcaatcagacatcagtgtttctgctgcaggatttcatcttgaatacacagcaattggtttggattcctgtcctgaaccacaaactcctagcagtggaattaaaattggagacagatatatggttggagatgtagtatcctttcagtgtgatcaaggatattctcttcagggtcactctcacattacatgtatgccaggacctgtaagaagatggaattatccaatcccaatttgtttagctcagtgtggtggtgctatgtcagacttcagtggtgtgatcctcagtcctgggtttcctggaaactatcccagcagtttagattgcacatggacaataaatctacccataggttttggtgtacatctccagtttgtaaatttttctacagaaaccatacatgattatttggaagtacgaagtggatcctcagaaactagtactgttattggccggcttagtggtcctcaaataccatcttccttattcagcaccacccatgaaaccagcttatattttcacagtgactattcacaaaacaaacaagggtttcatattgtataccaagcctatcagttgcaaagctgtcctgatccacgcccgtttcgaaatggttttgtaattggtaatgattttactgtgggtcaaaccatttcatttgaatgtttcccaggatacacattaattggaaattcagctctcacatgccttcacggagtcagtcgtaattggaatcatccacttccaaggtgtgaagctctttgtggtgggaatataactgcaatgaatggcaccatttattctcctgggtatcctgatgaatatccaaactttcaagattgtttttggcttgtaagagtaccccctgggaatggcatctacatcaattttactgtccttcaaacagaaccaatatatgatttcattactgtatgggatggaccagaccaaaattcacctcagatcggtcagttcagtggcaataccgctttggaatcagtctacagtacttcaaatcagattctaatcaaattccacagtgatttcacaacaagtggcttttttgtgctcagttatcacgcctatcaactaagggtgtgccaacctccaccacctgtgcccaatgctgaaattttgacggaagatgatgaatttgaaataggtgatattattaggtatcagtgtcttccaggatttactttagttggtaatgcaattctgacgtgcagattaggagaacgactgcagatggatggagcacctccagtttgtcaagtgctctgtcctgccaatgaattacggctagattctactggagtcatattgagccctggatatcctgacagttacccaaatcttcaaatgtgtgcatggagcatttcagtggaaaagggttataatatcaccatgtttgtagaattcttccagacagaaaaggaatttgatgttcttcaggtgtatgatggaccaaatattcaaagtccagtgcttatttccctcagtggggattattcatctgcttttaatataacaagcaatggtcatgaagtatttcttcagtggtcagcagatcatggcaataacaaaaaaggcttccggataagatatatagctttctactgtagtacaccagaatccccacctcatggatatattatcagtcagacaggtgggcagcttaacagtgtggtccgttgggcctgtgatcgaggattccgacttgttggaaaaagcagtgctgtgtgcagaaagtcttcctatgggtatcatgcatgggatgcgccagtccctgcctgtcaagcaatttcctgtgggattcctaaagctccaacaaatggaggaatactaacaacagactatttggtaggaacgcgagttacctatttttgtaatgatggatatcgattgtcatccaaagaactcactacagctgtatgccaatcagatggaacatggagcaatcataacaagacccctcgctgtgttgttgttacatgtccaagcatcaattcctttatcttggaacatggaagatggcgaattgtgaatggctcccattatgaatacaaaaccaaagtagttttcagctgtgaccctggttatcatggactaggtcctgcctccatcgaatgtcttcctaatggtacttggagttggagaaatgaaagaccatattgccaaattatttcctgtggagaactacctacacctccaaatggaaataagattggaactcaaacttcatatggctcaacagctatctttacctgcgacttgggattcatgcttgtgggctctgctgtaagggaatgcctttcctcaggtctttggagtgaatctgaaaccagatgcctagcgggtcattgtggaattccagaactgattgtgaatggtcaagtcattggagaaaattatggatatagagacacagttgtatatcaatgtaatcctggttttcgattgattggttcttcagtgaggatatgtcaacaggatcacaattggtctggtcagctcccatcctgtgtgcctgttagctgtggtcaccctggtagtccaatttatggaagaacaagtggaaatgggttcaactttaatgatgtggtaacattctcatgcaatattgggtatcttatgcaagggccaacaaaggcacagtgccaggccaacagacagtggagccatcctccacctatgtgcaaagtggtcaactgttctgatcctggaattccagccaattctaaaagagaaagtaaaatagaacatggaaattttacttacggcactgtggtattctatgactgcaatcctggatattttttatttggatcttcagttttgatatgtcaaccaaatggacaatgggacaaacctttaccagaatgtatcatgattgactgtggacaccctggcgttcctcctaatgcagtcctgtctggcgagaagtatacttttgggtctactgttcactattcctgcacaggaaagcgttcccttttaggccagtcatcaagaacctgccaattgaatggccattggagtggatcacaacctcattgttcaggtgatgctactgggacatgtggcgatccaggtactcccggccatggctctagacaggaaagcaatttcagaactaaaagtactgtacgttatgcttgtgatactggttacatccttcatggctcagaagaaagaacatgtttagctaatggcagttggaccggaaggcagccagagtgcaaagctgtgcagtgtggtaacccaggaaccacagccaatgggaaagtcttccgaattgatggcacaacattttctagttcagtcatttattcctgcatggagggatacatcctttctggaccttcagttagacagtgcacagccaatggaacatggtctggaactttacctaactgtacaataatcagttgtggagacccaggtataccagccaatggactgagatatggagatgattatgtggttggacaaaatgtttcttacatgtgccagccaggctacacgatggaattgaatggctccagaatcaggacttgtacaattaatggcacatggagtggagtaatgccaacttgtagagctgttacctgcccaactcctccccagatctctaatggaaggctggaaggaacaaatttcgactggggctttagtattagctacatctgttctccaggctatgagctatccttccctgctgttttgacctgtgtagggaatggtacctggagtggtgaagtaccgcagtgcttaccaaagttttgtggtgaccctggtatacctgcccaaggaaaaagagaaggcaaaagctttatataccagtcagaggtttcattcagctgcaattttcctttcatattagtgggatcaagcaccagaatatgtcaagcagatggcacttggagtggttcatcacctcactgcatagagcctacccaaacctcttgtgaaaacccaggtgtgcctcggcatggatctcagaacaatacattcggatttcaagtaggaagtgttgtacagttccattgcaaaaaaggacaccttctccaagggtctacaacacgcacctgcctccctgatcttacgtggagtgggattcagcctgaatgcataccccacagctgtaaacagccagaaactcctgctcatgcaaatgtcgtagggatggaccttccatctcatgggtatacactgatttatacctgtcagcctggcttcttcttagcaggtggaacagaacatagagtgtgtagatccgataacacctggactggaaaagttcccatttgtgaagctggttctaaaatattggtgaaagatcctagacctgcactgggaacacccagcccaaagctaagtgttcctgatgatgtatttgcccaaaattatatatggaaaggctcttacaatttcaaaggaaggaaacaacccatgaccttaacagttactagtttcaatgcttccactgggagagttaacgcaacactgagcaatagcaacatggagctgctactttcaggggtatataaaagccaggaagctcgcctaatgttacgcatatatcttattaaagtacctgctcatgcttctgtgaagaaaatgaaggaagaaaattgggcaatggatggctttgtttctgctgagcctgatggagctacttatgtatttcaaggatttattcaaggcaaagattatggacaatttggcctacaaagactgggactgaatatgtcagaaggttcaaattcttcaaatcaacctcatggtacaaatagtagttctgtagccattgctattcttgtgcctttttttgcacttatatttgcaggatttggattttatctttataaacaaaggactgcacctaaaacacagtatacaggatgttcagttcatgaaaataacaatggccaagcagcttttgaaaatcccatgtatgacaccaacgcaaagtcagtggaagggaaggcggtacgatttgatcccaacttgaacacggtttgcacaatggtataacgaggcaacctttgccttcttcagaagcttggaaatcgacacacaaaacagtgcacatttagttcactgctaaacaaattaaagcacacttttcaggacttgctgggtcaccttttcctgaggaatgatacagaagagtgttttttcataaactggaccataattcttcatgtttaccatggagagttttacagaaatttggctgcactctgagagtgcttactcacagtttatttgctttttttaaaaaggagattattctaaaatataaacttatttgcatatattggaggagcatccactatcagtatttctgtgctttataaactatattagagggactgggtttaaaaaaaaagatatagggtagaaataagagctatacttacaagagtcaatagatcactgacttctctttaactgtcctgagctacatcacgcccacaaatctgtctttcataccactctatctgccattcattcttgttaaatgaggcattgttttctttatttaagattgagttatgactttaaatgtttatgagctagtttatgcctcggaagacataaggtttcccattccaatttgaatctttctatttctttagcatcatattgctcttcttcttttagactggttgtcatagtttctgcaaagggcaagttcattgtgctaccctcccaattcccccattatggagtaaccagtattattcagtgagctatggggtagtgtttcactccttgcttcaatatggttttttcctatttatttttattattttttaatcccaaatgtgatagtagcttcagtatgtttcctcacccaaaaaccatttggctggcagaaattatctagaaaaattattattttgcagttatctgagacaccaaacttaccatcctttattttacaatatttttgatcgaccaaataaaatgtcctaataatctactctatttatatctacatttccttccagctgagtcttcaaatttagcattattttgacacttttaattttcatttaacaatggattagaaaaatattttggtctagccactaaacataatgactgaaaaaaattattattataaatcaccaatataaatttattgcctacaattgtggacttatcatatttttatatatttttaaatttctgtacctttattgttaaacaccaagtttcacatacaagaggtttctttcattgtcaaattaagatatgtatttgtaagttattggtggctcatttaaactgtatcatacagtaatgccagcatttttatttaataggtcatcgtcttccttttatagctgttttacttcattgaatacgatcatgtacccagtgttaactctttgttgttgtccctttcaaatatggataactctgtgaacagtcttgactttttgtatcatgagacagagtgcctaagagaaacccttgcacctgggagcgctgcttggctctatctctacaacatttaatgaatttcttgtaaaccactttgagatacattgttttggaaattcatacaattttctcaacatggtactctactggcaggatgcagttttaaattttatgccatcagttatttattcttgtttattcaaatgactgcaataacaatgattcattcattaatgttaaggctaatacatttaagatcttgtttaaacaatgtttcttctgcaactggctactcctcttatattaatgcatacacttttgtaaagaagtatatttttatgaaaagaaactttgtaaaagtatgatgtaaattttcagtgcaatgtaaacaaaataaaaatggataattgcttttgtaaaa

SEQ ID NO: 259049 - DNA, 11004 bp, Artificial Sequence
  derived and/or modified sequence
atgtggagctggttcctgtgctggaagcccgtgcagctggacagacagaccgccagcggcttcatctacacctgcggcggcaccctgaagggcctgaacggcaccatcgagagccccggcttcccctacggctaccccaacggcgccaactgcacctgggtgatcatcgccgaggagagaaacagaatccagatcgtgttccagagcttcgccctggaggaggagtacgactacctgagcctgtacgacggccacccccaccccaccaacttcagaaccagactgaccggcttccacctgcccccccccgtgaccagcaccaagagcgtgttcagcctgagactgaccagcgacttcgccgtgagcgcccacggcttcaaggtgtactacgaggagctgcagagcagcagctgcggcaaccccggcgtgccccccaagggcgtgctgtacggcaccagattcgacgtgggcgacaagatcagatacagctgcgtgaccggctacatcctggacggccacccccagctgacctgcatcgccaacagcgtgaacaccgccagctgggacttccccgtgcccatctgcagagccgaggacgcctgcggcggcaccatgagaggcagcagcggcatcatcagcagccccagcttccccaacgagtaccacaacaacgccgactgcacctggaccatcgtggccgagcccggcgacaccatcagcctgatcttcaccgacttccagatggaggagaagtacgactacctggagatcgagggcagcgagccccccaccatctggctgagcggcatgaacatccccccccccatcatcagcaacaagaactggctgagactgcacttcgtgaccgacagcaaccacagatacagaggcttcagcgccccctaccagggcagcagcaccctgacccacaccaccagcaccggcgagctggaggagcacaacagaaccaccaccggcgccatcgccgtggccagcacccccgccgacgtgaccgtgagcagcgtgaccgccgtgaccatccacagactgagcgaggagcagagagtgcaggtgaccagcctgagaaacagcggcctggaccccaacaccagcaaggacggcctgagcccccaccccgccgacacccagagcaccagaagaagacccagacacgccgagcagatcgagagaaccaaggagctggccgtggtgacccacagagtgaagaaggccatcgacttcaagagcagaggcttcaagctgttccccggcaaggacaacagcaacaagttcagcatcctgaacgagggcggcatcaagaccgccagcaacctgtgccccgaccccggcgagcccgagaacggcaagagaatcggcagcgacttcagcctgggcagcaccgtgcagttcagctgcgacgaggactacgtgctgcagggcgccaagagcatcacctgccagagaatcgccgaggtgttcgccgcctggagcgaccacagacccgtgtgcaaggtgaagacctgcggcagcaacctgcagggccccagcggcaccttcaccagccccaacttccccttccagtacgacagcaacgcccagtgcgtgtgggtgatcaccgccgtgaacaccaacaaggtgatccagatcaacttcgaggagttcgacctggagatcggctacgacaccctgaccatcggcgacggcggcgaggtgggcgaccccagaaccgtgctgcaggtgctgaccggcagcttcgtgcccgacctgatcgtgagcatgagcagccagatgtggctgcacctgcagaccgacgagagcgtgggcagcgtgggcttcaaggtgaactacaaggagatcgagaaggagagctgcggcgaccccggcacccccctgtacggcatcagagagggcgacggcttcagcaacagagacgtgctgagattcgagtgccagttcggcttcgagctgatcggcgagaagagcatcgtgtgccaggagaacaaccagtggagcgccaacatccccatctgcatcttcccctgcctgagcaacttcaccgcccccatgggcaccgtgctgagccccgactaccccgagggctacggcaacaacctgaactgcatctggaccatcatcagcgaccccggcagcagaatccacctgagcttcaacgacttcgacctggagagccagttcgacttcctggccgtgaaggacggcgacagccccgagagccccatcctgggcaccttcaccggcgccgaggtgcccagccacctgaccagcaacagccacatcctgagactggagttccaggccgaccacagcatgagcggcagaggcttcaacatcacctacaacaccttcggccacaacgagtgccccgaccccggcatccccatcaacgccagaagattcggcgacaacttccagctgggcagcagcatcagcgtgatctgcgaggagggcttcatcaagacccagggcaccgagaccatcacctgcatcctgatggacggcaaggtgatgtggagcggcctgatccccaagtgcggcgccccctgcggcggccacttcagcgcccccagcggcgtgatcctgagccccggctggcccggctactacaaggacagcctgaactgcgagtgggtgatcgaggccgagcccggccacagcatcaagatcaccttcgagagattccagaccgagctgaactacgacgtgctggaggtgcacgacggccccaacctgctgagccccctgctgggcagctacaacggcacccaggtgccccagttcctgttcagcagcagcaacttcatctacctgctgttcaccaccgacaacagcagaagcaacaacggcttcaagatccactacgagagcgtgaccgtgaacacctacagctgcctggaccccggcatccccgtgcacggcagaagatacggccacgacttcagcatcggcagcaccgtgagcttcagctgcgacagcggctacagactgagccacgaggagcccctgctgtgcgagaagaaccactggtggagccaccccctgcccacctgcgacgccctgtgcggcggcgacgtgagaggccccagcggcaccatcctgagccccggctaccccgagttctaccccaacagcctgaactgcacctggaccgtggacgtgacccacggcaagggcgtgcagttcaacttccacaccttccacctggaggaccaccacgactacctgctgatcaccgagaacggcagcttcacccagcccctggccagactgaccggcagcgacctgccccccaccatcaacgccggcctgtacggcaacttcagagcccagctgagattcatcagcgacttcagcatcagctacgagggcttcaacatcaccttcagcgagtacaacctggagccctgcgaggaccccggcatcccccagtacggcagcagaatcggcttcaacttcggcatcggcgacaccctgaccttcagctgcagcagcggctacagactggagggcaccagcgagatcatctgcctgggcggcggcagaagagtgtggagcgcccccctgcccagatgcgtggccgagtgcggcgccagcgccaccaacaacgagggcatcctgctgagccccaactaccccctgaactacgagaacaaccacgagtgcatctacagcatccaggtgcaggccggcaagggcatcaacatcagcgccagaaccttccacctggcccagggcgacgtgctgaagatctacgacggcaaggacaagaccacccacctgctgggcgccttcaccggcgccagcatgagaggcctgaccctgagcagcaccagcaaccagctgtggctggagttcaacagcgacaccgagggcaccgacgagggcttccagctggtgtacaccagcttcgagctgagccactgcgaggaccccggcatcccccagttcggctacaagatcagcgaccagggccacttcgccggcagcaccatcatctacggctgcaaccccggctacaccctgcacggcagcagcctgctgaagtgcatgaccggcgagagaagagcctgggactaccccctgcccagctgcatcgccgagtgcggcggcagattcaagggcgagagcagcggcagaatcctgagccccggctaccccttcccctacgacaacaacctgagatgcatgtggatgatcgaggtggaccccggcaacatcgtgagcctgcagttcctggccttcgacaccgaggccagccacgacatcctgagagtgtgggacggcccccccgagaacgacatgctgctgaaggagatcagcggcagcctgatccccgagggcatccacagcaccctgaacatcgtgaccatccagttcgacaccgacttctacatcagcaagagcggcttcgccatccagttcagcagcagcgtggccaccgcctgcagagaccccggcgtgcccatgaacggcaccagaaacggcgacggcagagagcccggcgacaccgtggtgttccagtgcgaccccggctacgagctgcagggcgaggagagaatcacctgcatccaggtggagaacagatacttctggcagcccagcccccccgtgtgcatcgccccctgcggcggcaacctgaccggcagcagcggcttcatcctgagccccaacttcccccacccctacccccacagcagagactgcgactggaccatcaccgtgaacgccgactacgtgatcagcctggccttcatcagcttcagcatcgagcccaactacgacttcctgtacatctacgacggccccgacagcaacagccccctgatcggcagcttccaggacagcaagctgcccgagagaatcgagagcagcagcaacaccatgcacctggccttcagaagcgacggcagcgtgagctacaccggcttccacctggagtacaaggccaagctgagagagagctgcttcgaccccggcaacatcatgaacggcaccagactgggcatggactacaagctgggcagcaccgtgacctactactgcgacgccggctacgtgctgcagggctacagcaccctgacctgcatcatgggcgacgacggcagacccggctggaacagagccctgcccagctgccacgccccctgcggcagcagaagcaccggcagcgagggcaccgtgctgagccccaactaccccaagaactacagcgtgggccacaactgcgtgtacagcatcgccgtgcccaaggagttcgtggtgttcggccagttcgtgttcttccagaccagcctgcacgacgtggtggaggtgtacgacggccccacccagcagagcagcctgctgagcagcctgagcggcagccacagcggcgagagcctgcccctgagcagcggcaaccagatcaccatcagattcaccagcgtgggccccatcaccgccaagggcttccacttcgtgtaccaggccgtgcccagaaccagcagcacccagtgcagcagcgtgcccgagcccagattcggcagaagaatcggcaacgagttcgccgtgggcagcagcgtgctgttcgactgcaaccccggctacatcctgcacggcagcatcgccatcagatgcgagaccgtgcccaacagcctggcccagtggaacgacagcctgcccacctgcatcgtgccctgcggcggcatcctgaccaagagaaagggcaccatcctgagccccggctaccccgagccctacgacaacaacctgaactgcgtgtggaagatcaccgtgcccgagggcgccggcatccaggtgcaggtggtgagcttcgccaccgagcacaactgggacagcctggacttctacgacggcggcgacaacaacgcccccagactgggcagctacagcggcaccaccatcccccacctgctgaacagcaccagcaacaacctgtacctgaacttccagagcgacatcagcgtgagcgccgccggcttccacctggagtacaccgccatcggcctggacagctgccccgagccccagacccccagcagcggcatcaagatcggcgacagatacatggtgggcgacgtggtgagcttccagtgcgaccagggctacagcctgcagggccacagccacatcacctgcatgcccggccccgtgagaagatggaactaccccatccccatctgcctggcccagtgcggcggcgccatgagcgacttcagcggcgtgatcctgagccccggcttccccggcaactaccccagcagcctggactgcacctggaccatcaacctgcccatcggcttcggcgtgcacctgcagttcgtgaacttcagcaccgagaccatccacgactacctggaggtgagaagcggcagcagcgagaccagcaccgtgatcggcagactgagcggcccccagatccccagcagcctgttcagcaccacccacgagaccagcctgtacttccacagcgactacagccagaacaagcagggcttccacatcgtgtaccaggcctaccagctgcagagctgccccgaccccagacccttcagaaacggcttcgtgatcggcaacgacttcaccgtgggccagaccatcagcttcgagtgcttccccggctacaccctgatcggcaacagcgccctgacctgcctgcacggcgtgagcagaaactggaaccaccccctgcccagatgcgaggccctgtgcggcggcaacatcaccgccatgaacggcaccatctacagccccggctaccccgacgagtaccccaacttccaggactgcttctggctggtgagagtgccccccggcaacggcatctacatcaacttcaccgtgctgcagaccgagcccatctacgacttcatcaccgtgtgggacggccccgaccagaacagcccccagatcggccagttcagcggcaacaccgccctggagagcgtgtacagcaccagcaaccagatcctgatcaagttccacagcgacttcaccaccagcggcttcttcgtgctgagctaccacgcctaccagctgagagtgtgccagccccccccccccgtgcccaacgccgagatcctgaccgaggacgacgagttcgagatcggcgacatcatcagataccagtgcctgcccggcttcaccctggtgggcaacgccatcctgacctgcagactgggcgagagactgcagatggacggcgccccccccgtgtgccaggtgctgtgccccgccaacgagctgagactggacagcaccggcgtgatcctgagccccggctaccccgacagctaccccaacctgcagatgtgcgcctggagcatcagcgtggagaagggctacaacatcaccatgttcgtggagttcttccagaccgagaaggagttcgacgtgctgcaggtgtacgacggccccaacatccagagccccgtgctgatcagcctgagcggcgactacagcagcgccttcaacatcaccagcaacggccacgaggtgttcctgcagtggagcgccgaccacggcaacaacaagaagggcttcagaatcagatacatcgccttctactgcagcacccccgagagccccccccacggctacatcatcagccagaccggcggccagctgaacagcgtggtgagatgggcctgcgacagaggcttcagactggtgggcaagagcagcgccgtgtgcagaaagagcagctacggctaccacgcctgggacgcccccgtgcccgcctgccaggccatcagctgcggcatccccaaggcccccaccaacggcggcatcctgaccaccgactacctggtgggcaccagagtgacctacttctgcaacgacggctacagactgagcagcaaggagctgaccaccgccgtgtgccagagcgacggcacctggagcaaccacaacaagacccccagatgcgtggtggtgacctgccccagcatcaacagcttcatcctggagcacggcagatggagaatcgtgaacggcagccactacgagtacaagaccaaggtggtgttcagctgcgaccccggctaccacggcctgggccccgccagcatcgagtgcctgcccaacggcacctggagctggagaaacgagagaccctactgccagatcatcagctgcggcgagctgcccaccccccccaacggcaacaagatcggcacccagaccagctacggcagcaccgccatcttcacctgcgacctgggcttcatgctggtgggcagcgccgtgagagagtgcctgagcagcggcctgtggagcgagagcgagaccagatgcctggccggccactgcggcatccccgagctgatcgtgaacggccaggtgatcggcgagaactacggctacagagacaccgtggtgtaccagtgcaaccccggcttcagactgatcggcagcagcgtgagaatctgccagcaggaccacaactggagcggccagctgcccagctgcgtgcccgtgagctgcggccaccccggcagccccatctacggcagaaccagcggcaacggcttcaacttcaacgacgtggtgaccttcagctgcaacatcggctacctgatgcagggccccaccaaggcccagtgccaggccaacagacagtggagccaccccccccccatgtgcaaggtggtgaactgcagcgaccccggcatccccgccaacagcaagagagagagcaagatcgagcacggcaacttcacctacggcaccgtggtgttctacgactgcaaccccggctacttcctgttcggcagcagcgtgctgatctgccagcccaacggccagtgggacaagcccctgcccgagtgcatcatgatcgactgcggccaccccggcgtgccccccaacgccgtgctgagcggcgagaagtacaccttcggcagcaccgtgcactacagctgcaccggcaagagaagcctgctgggccagagcagcagaacctgccagctgaacggccactggagcggcagccagccccactgcagcggcgacgccaccggcacctgcggcgaccccggcacccccggccacggcagcagacaggagagcaacttcagaaccaagagcaccgtgagatacgcctgcgacaccggctacatcctgcacggcagcgaggagagaacctgcctggccaacggcagctggaccggcagacagcccgagtgcaaggccgtgcagtgcggcaaccccggcaccaccgccaacggcaaggtgttcagaatcgacggcaccaccttcagcagcagcgtgatctacagctgcatggagggctacatcctgagcggccccagcgtgagacagtgcaccgccaacggcacctggagcggcaccctgcccaactgcaccatcatcagctgcggcgaccccggcatccccgccaacggcctgagatacggcgacgactacgtggtgggccagaacgtgagctacatgtgccagcccggctacaccatggagctgaacggcagcagaatcagaacctgcaccatcaacggcacctggagcggcgtgatgcccacctgcagagccgtgacctgccccacccccccccagatcagcaacggcagactggagggcaccaacttcgactggggcttcagcatcagctacatctgcagccccggctacgagctgagcttccccgccgtgctgacctgcgtgggcaacggcacctggagcggcgaggtgccccagtgcctgcccaagttctgcggcgaccccggcatccccgcccagggcaagagagagggcaagagcttcatctaccagagcgaggtgagcttcagctgcaacttccccttcatcctggtgggcagcagcaccagaatctgccaggccgacggcacctggagcggcagcagcccccactgcatcgagcccacccagaccagctgcgagaaccccggcgtgcccagacacggcagccagaacaacaccttcggcttccaggtgggcagcgtggtgcagttccactgcaagaagggccacctgctgcagggcagcaccaccagaacctgcctgcccgacctgacctggagcggcatccagcccgagtgcatcccccacagctgcaagcagcccgagacccccgcccacgccaacgtggtgggcatggacctgcccagccacggctacaccctgatctacacctgccagcccggcttcttcctggccggcggcaccgagcacagagtgtgcagaagcgacaacacctggaccggcaaggtgcccatctgcgaggccggcagcaagatcctggtgaaggaccccagacccgccctgggcacccccagccccaagctgagcgtgcccgacgacgtgttcgcccagaactacatctggaagggcagctacaacttcaagggcagaaagcagcccatgaccctgaccgtgaccagcttcaacgccagcaccggcagagtgaacgccaccctgagcaacagcaacatggagctgctgctgagcggcgtgtacaagagccaggaggccagactgatgctgagaatctacctgatcaaggtgcccgcccacgccagcgtgaagaagatgaaggaggagaactgggccatggacggcttcgtgagcgccgagcccgacggcgccacctacgtgttccagggcttcatccagggcaaggactacggccagttcggcctgcagagactgggcctgaacatgagcgagggcagcaacagcagcaaccagccccacggcaccaacagcagcagcgtggccatcgccatcctggtgcccttcttcgccctgatcttcgccggcttcggcttctacctgtacaagcagagaaccgcccccaagacccagtacaccggctgcagcgtgcacgagaacaacaacggccaggccgccttcgagaaccccatgtacgacaccaacgccaagagcgtggagggcaaggccgtgagattcgaccccaacctgaacaccgtgtgcaccatggtgtag

SEQ ID NO: 259050 - protein, 112 aa, Artificial Sequence
  derived and/or modified sequence
MGGLEPCSRLLLLPLLLAVSGLRPVQAQAQSDCSCSTVSPGVLAGIVMGDLVLTVLIALAVYFLGRLVPRGRGAAEATRKQRITETESPYQELQGQRSDVYSDLNTQRPYYK

SEQ ID NO: 259051 - DNA, 339 bp, Artificial Sequence
  derived and/or modified sequence
atgggcggcctggagccctgcagcagactgctgctgctgcccctgctgctggccgtgagcggcctgagacccgtgcaggcccaggcccagagcgactgcagctgcagcaccgtgagccccggcgtgctggccggcatcgtgatgggcgacctggtgctgaccgtgctgatcgccctggccgtgtacttcctgggcagactggtgcccagaggcagaggcgccgccgaggccaccagaaagcagagaatcaccgagaccgagagcccctaccaggagctgcagggccagagaagcgacgtgtacagcgacctgaacacccagagaccctactacaagtag

SEQ ID NO: 259052 - DNA, 339 bp, Artificial Sequence
  derived and/or modified sequence
atgggcggtttagagccatgttcccggttactcctgttaccccttctcctggccgtatcagggctgaggcccgtgcaggcccaggcccagtctgattgctcctgtagcacagttagcccgggagtactcgccggcatcgtgatgggcgacctagtactcacagtgctcatcgcattagccgtgtactttctgggccgcctggtacctagaggcagaggtgcagccgaagcaacaagaaagcagaggatcacggagacggaaagcccttaccaagagctacaagggcaacggagtgacgtctactctgacttgaatacccagagaccgtactataagtag

SEQ ID NO: 259053 - DNA, 339 bp, Artificial Sequence
  derived and/or modified sequence
atgggcggactggagccctgttcccggctcctcttgcttccattgctcttggcagtatccggtctgcggccagtccaagcccaggctcagtcagactgttcctgctctacagtttcccctggcgtccttgctggcattgtgatgggggatctggtgctgaccgtattgatcgccctggctgtctactttttgggcaggctcgtaccacgggggcgtggagctgctgaggctacccgcaaacaacgcataacagaaactgagagtccttatcaggaattacagggccagcgctccgatgtgtactctgatctgaacacccagagaccatattacaagtag

SEQ ID NO: 259054 - DNA, 339 bp, Artificial Sequence
  derived and/or modified sequence
atgggcggcctggagccctgcagccggctgctgctgctgcccctgctgctggccgtgtctggcctgcggcctgtgcaggcccaggcccagagcgactgcagctgcagcacagtgtcccctggggtgctggccggcatcgtgatgggagacctggtgctgactgtgctgattgccctggccgtgtacttcctgggccgcctggtgccccggggccgcggggctgctgaggccaccaggaagcagaggatcacagaaacagagagcccctaccaggagctgcagggccagaggagtgatgtgtacagcgacctgaacacccagaggccctactacaagtag

SEQ ID NO: 259055 - DNA, 339 bp, Artificial Sequence
  derived and/or modified sequence
atgggcggcctggagccctgcagccggctgctgctgctgcccctgctcctggccgtgagcggactgcgacccgtgcaggcgcaggcacagagcgactgttcctgctctactgtgagtcctggtgtcttggccggaatcgtgatgggcgatctcgtcttgaccgttctgattgctctggctgtgtatttcctcgggagacttgttccccgagggaggggggcagcagaggccactcggaaacagcgtataaccgagactgaatctccttaccaagagttacagggccaacgcagtgacgtgtactccgacttgaacacccagcggccgtactacaagtag

SEQ ID NO: 259056 - DNA, 339 bp, Artificial Sequence
  derived and/or modified sequence
atgggcggcctggagccctgcagccggctgctgctgctgcccctgttgctggcagtcagcggattgagaccggtccaggcccaggctcaatccgattgttcctgcagtacggtgtcgcccggggtgctggcagggattgtgatgggtgaccttgtgttaacagtactgatcgccctggctgtgtactttctgggcaggttggtgccgcgcggtaggggcgcagctgaagctacccggaaacagaggattacggaaacagaatcaccttaccaagagttgcagggacaaaggtccgatgtgtattccgatttgaacacccagaggccctactataagtag

SEQ ID NO: 259057 - DNA, 339 bp, Artificial Sequence
  derived and/or modified sequence
atgggcggtctcgagccatgttctaggcttctcctgcttcccctgttgctcgccgtctcggggctgaggccagtgcaggcgcaggcacagagcgactgtagctgttcaaccgttagcccaggcgtacttgccggaattgtcatgggcgacctagtgctgacggtgctgatagccctggccgtttatttcctgggaagactggttcctcgtgggaggggcgctgccgaggccacacgaaagcaacgcatcactgagactgaatctccctaccaggaactccagggccaaagaagcgacgtctactccgatctgaacacacagaggccatactataagtag

SEQ ID NO: 259058 - DNA, 339 bp, Artificial Sequence
  derived and/or modified sequence
atgggcggactggaaccatgtagtaggctcctgctgttacctctgcttctggccgtctctggcctccggccagtgcaggcacaagcccagtctgactgtagctgttcgaccgtatcccctggtgtgcttgctggcatcgtgatgggcgacttggttctcaccgttttgatcgccctcgctgtttacttcctcgggagactggtcccgcgaggcaggggggctgccgaagcaacacggaaacagcggatcacggaaaccgaatccccatatcaagaactccagggccaacgaagcgacgtgtatagcgatctgaacacacagcggccatattataagtag

SEQ ID NO: 259059 - DNA, 579 bp, Artificial Sequence
  derived and/or modified sequence
agacttcctccttcacttgcctggacgctgcgccacatcccaccggcccttacactgtggtgtccagcagcatccggcttcatggggggacttgaaccctgcagcaggctcctgctcctgcctctcctgctggctgtaagtggtctccgtcctgtccaggcccaggcccagagcgattgcagttgctctacggtgagcccgggcgtgctggcagggatcgtgatgggagacctggtgctgacagtgctcattgccctggccgtgtacttcctgggccggctggtccctcgggggcgaggggctgcggaggcgacccggaaacagcgtatcactgagaccgagtcgccttatcaggagctccagggtcagaggtcggatgtctacagcgacctcaacacacagaggccgtattacaaatgagcccgaatcatgacagtcagcaacatgatacctggatccagccattcctgaagcccaccctgcacctcattccaactcctaccgcgatacagacccacagagtgccatccctgagagaccagaccgctccccaatactctcctaaaataaacatgaagc

SEQ ID NO: 259060 - DNA, 415 bp, Artificial Sequence
  derived and/or modified sequence
acttgcctggacgctgcgccacatcccaccggcccttacactgtggtgtccagcagcatccggcttcatggggggacttgaaccctgcagcaggctcctgctcctgcctctcctgctggctgtaagtggtctccgtcctgtccaggcccaggcccagagcgattgcagttgctctacggtgagcccgggcgtgctggcagggatcgtgatgggagacctggtgctgacagtgctcattgccctggccgtgtacttcctgggccggctggtccctcgggggcgaggggctgcggaggcgacccggaaacagcgtatcactgagaccgagtcgccttatcaggagctccagggtcagaggtcggatgtctacagcgacctcaacacacagaggccgtattacaaatgagcccgaatc

SEQ ID NO: 259061 - protein, 151 aa, Artificial Sequence
  derived and/or modified sequence
MAEDLSAATSYTEDDFYCPVCQEVLKTPVRTTACQHVNRSETSTSDNTETYQENTSSSGHPTFKCPLCQESNFTRQRLLDHCNSNHLFQIVPVTCPICVSLPWGDPSQITRNFVSHLNQRHQFDYGEFVNLQLDEETQYQTAVEESFQVNI

SEQ ID NO: 259062 - DNA, 456 bp, Artificial Sequence
  derived and/or modified sequence
atggccgaggacctgagcgccgccaccagctacaccgaggacgacttctactgccccgtgtgccaggaggtgctgaagacccccgtgagaaccaccgcctgccagcacgtgaacagaagcgagaccagcaccagcgacaacaccgagacctaccaggagaacaccagcagcagcggccaccccaccttcaagtgccccctgtgccaggagagcaacttcaccagacagagactgctggaccactgcaacagcaaccacctgttccagatcgtgcccgtgacctgccccatctgcgtgagcctgccctggggcgaccccagccagatcaccagaaacttcgtgagccacctgaaccagagacaccagttcgactacggcgagttcgtgaacctgcagctggacgaggagacccagtaccagaccgccgtggaggagagcttccaggtgaacatctag

SEQ ID NO: 259063 - DNA, 456 bp, Artificial Sequence
  derived and/or modified sequence
atggccgaagacctttccgcggccacttcctacacagaggatgacttttattgtccagtttgccaggaggtactgaagacgcccgtccgtaccacagcctgtcagcacgttaacagaagcgaaacttcaacatctgataatactgagacttaccaagaaaacacttccagtagtggacatcccaccttcaagtgtccactctgccaggagtcaaatttcacaaggcaaagactcctggatcattgcaactctaatcacctattccagatcgtgcccgtcacctgccctatttgtgtgtccctgccctggggggacccctcgcaaataacccggaatttcgttagccatctgaatcagcgtcatcagttcgattatggcgagttcgttaacctccagttggatgaagagactcagtatcagactgccgtggaggaatcttttcaggtaaatatatag

SEQ ID NO: 259064 - DNA, 456 bp, Artificial Sequence
  derived and/or modified sequence
atggccgaggacctgtctgctgccaccagctacacagaagatgacttctactgccctgtgtgccaggaggtgctgaagacccctgtgaggaccacagcctgccagcacgtgaacagaagtgagaccagcaccagtgacaacacagagacctaccaggagaacaccagcagcagcggccaccccaccttcaagtgccccctgtgccaggagagcaacttcacccggcagaggctgctggaccactgcaacagcaaccacctgttccagatcgtgcctgtgacctgccccatctgtgtgtccctgccctggggagaccccagccagatcaccaggaactttgtgagccacctgaaccagaggcaccagtttgattatggagaatttgtgaacctgcagctggatgaggagacccagtaccagacagctgtggaggagagcttccaggtgaacatctag

SEQ ID NO: 259065 - DNA, 456 bp, Artificial Sequence
  derived and/or modified sequence
atggccgaggacctgagcgccgccaccagctacaccgaggacgacttctattgcccagtctgtcaggaagtcctcaaaaccccagtgcggactaccgcctgtcaacacgtgaacaggtctgagacctctacctccgacaataccgagacttatcaagagaatacatcatcttcaggacatcctacattcaagtgcccactttgtcaggaatccaactttactagacagcgcctccttgaccactgtaattccaaccacctgttccagatcgtgcctgttacctgtcccatctgtgtatccctgccctggggtgacccatcgcaaattacccgcaacttcgttagccatctgaaccaacggcaccagttcgattacggggaattcgttaacctgcaactcgatgaggagactcaatatcaaactgcagtcgaggaaagctttcaagtaaacatttag

SEQ ID NO: 259066 - DNA, 456 bp, Artificial Sequence
  derived and/or modified sequence
atggccgaagacctcagcgcagccacaagctataccgaagatgacttctattgccccgtgtgccaggaggttttgaaaacacccgtgcgaacaacagcttgccagcatgtgaacagatccgagaccagtactagcgacaatacagaaacgtatcaggaaaatacaagtagcagcggtcatccaacgttcaaatgcccgctttgccaggagtctaactttacgcggcagaggttactggaccattgtaactccaaccacctcttccagatcgtccctgtcacttgccccatttgtgtgtctctcccctggggcgacccgagtcaaattactcgcaatttcgtcagccatttgaatcagcgacaccagtttgactacggtgaattcgtaaacctacagcttgacgaagagacacagtaccagacagccgttgaggaatcattccaggtgaacatttag

SEQ ID NO: 259067 - DNA, 2071 bp, Artificial Sequence
  derived and/or modified sequence
gttcatgtagggagtcgggccccgggccgccaccgtcacctcggccgctgccgctgtcgccatcgccttgtttccccatcccccgccatggccgaggacctctctgcggccacgtcctacaccgaagatgatttctactgccccgtctgtcaggaggtgctcaaaacgcccgtgcggaccacggcctgtcagcacgtcaataggagtgaaacatccacatctgataacacagaaacttaccaagagaatacaagttcttctggtcatcctacttttaagtgtcccctgtgtcaagaatcaaattttaccagacagcgtttactggatcactgtaacagtaatcacctatttcagatagttcctgtgacatgtcctatttgtgtgtctcttccttggggagatcctagccagattaccagaaatttcgttagtcatctaaatcagagacatcaatttgattatggagaatttgtgaatcttcagctagatgaagaaacccaataccaaactgctgttgaagaatcttttcaagtaaacatctgaaggctgtagacatctctgcatctttgtacctgcaagtgccatctttaagggggaaactacatgaagtcaccgttacagtaacttgatgtgtatattaataaaagtaattcagtcattttagtttttgattgaaaataaaggtagggcttctaaaaacttcatcatcttgataagttaaaaaatgaaagttatgacattagctttaaaggtgtaaaaaagatgtttcactaatgtaacggtgaaagagaatccctgttgtactttatctttttgtaatattatttttgaatttttcattattatgttgcttttgaaatttgatgcattcctcccatttactttattattgtacacatttaacacacagtagcaaattttgaacgatgtgattgatataacctaacaaatctgagccagttattattagagttgcagaatagaaacttgaagtgctaaatggaataatccaaaggaaattttttaaatgcaggttctagctgaaaaattcaactataagaaaattgtatttatataacatttactatttttgaagactagtgagatttctgtaataattttaattctttaaaaagtgaaagcttgttgtaaagatattttctttttgttattagaaggaaatacaaagagaaaaatttctttctttcatgggcatttgataatttcagtctttgactgatttgtaagcctagaatatactaagctgaataacagctctttggcctcagaattttcagtagccagtatttctgattaactaagttgaaactcttattagaaactttcagttggtgatattgtattctagaagatataaatgagaggtttggcttcatctcagtttagaaatttattcaaagctaaagatgtatatatacatatacttttgtgtgtatatatacacatatgtgtgtatgcagtttgtcaggttatatatagaatttctattaaggattttttaaatggacaagcaatagggggttgaagtgtttatctgatttgtttaaaattttgtatatcaccaaatttttaaaaagtgatagtcacagtgctaagttatctagttggctactattacaccttaaaaattgagtttacacacacacaattacctgtttatatggtgctcatttgttattctcaaatataatgtgtgaccgtgatatagtgagaaagattctaccaaccactgtttcactactttttagttaaaattgggtatgttcttaatattcattagtgagaatcacaaagtattttgtagaaggcccaaatcacagaataaaggactaagagtggatttgctgacattccatactaatatacattgtttatgctttctttaaaataactagaagaacataaaagaaagagaatctcagaagtagtttgctgctaatatatacatatattgtataaaaaggtatattttggttttgttaaaacccttgttgacttttctacactgaacattttttttaacttgatttaataaaaatgttaattttgg

SEQ ID NO: 259068 - protein, 3333 aa, Artificial Sequence
  derived and/or modified sequence
MAAAARPRGRALGPVLPPTPLLLLVLRVLPACGATARDPGAAAGLSLHPTYFNLAEAARIWATATCGERGPGEGRPQPELYCKLVGGPTAPGSGHTIQGQFCDYCNSEDPRKAHPVTNAIDGSERWWQSPPLSSGTQYNRVNLTLDLGQLFHVAYILIKFANSPRPDLWVLERSVDFGSTYSPWQYFAHSKVDCLKEFGREANMAVTRDDDVLCVTEYSRIVPLENGEVVVSLINGRPGAKNFTFSHTLREFTKATNIRLRFLRTNTLLGHLISKAQRDPTVTRRYYYSIKDISIGGQCVCNGHAEVCNINNPEKLFRCECQHHTCGETCDRCCTGYNQRRWRPAAWEQSHECEACNCHGHASNCYYDPDVERQQASLNTQGIYAGGGVCINCQHNTAGVNCEQCAKGYYRPYGVPVDAPDGCIPCSCDPEHADGCEQGSGRCHCKPNFHGDNCEKCAIGYYNFPFCLRIPIFPVSTPSSEDPVAGDIKGCDCNLEGVLPEICDAHGRCLCRPGVEGPRCDTCRSGFYSFPICQACWCSALGSYQMPCSSVTGQCECRPGVTGQRCDRCLSGAYDFPHCQGSSSACDPAGTINSNLGYCQCKLHVEGPTCSRCKLLYWNLDKENPSGCSECKCHKAGTVSGTGECRQGDGDCHCKSHVGGDSCDTCEDGYFALEKSNYFGCQGCQCDIGGALSSMCSGPSGVCQCREHVVGKVCQRPENNYYFPDLHHMKYEIEDGSTPNGRDLRFGFDPLAFPEFSWRGYAQMTSVQNDVRITLNVGKSSGSLFRVILRYVNPGTEAVSGHITIYPSWGAAQSKEIIFLPSKEPAFVTVPGNGFADPFSITPGIWVACIKAEGVLLDYLVLLPRDYYEASVLQLPVTEPCAYAGPPQENCLLYQHLPVTRFPCTLACEARHFLLDGEPRPVAVRQPTPAHPVMVDLSGREVELHLRLRIPQVGHYVVVVEYSTEAAQLFVVDVNVKSSGSVLAGQVNIYSCNYSVLCRSAVIDHMSRIAMYELLADADIQLKGHMARFLLHQVCIIPIEEFSAEYVRPQVHCIASYGRFVNQSATCVSLAHETPPTALILDVLSGRPFPHLPQQSSPSVDVLPGVTLKAPQNQVTLRGRVPHLGRYVFVIHFYQAAHPTFPAQVSVDGGWPRAGSFHASFCPHVLGCRDQVIAEGQIEFDISEPEVAATVKVPEGKSLVLVRVLVVPAENYDYQILHKKSMDKSLEFITNCGKNSFYLDPQTASRFCKNSARSLVAFYHKGALPCECHPTGATGPHCSPEGGQCPCQPNVIGRQCTRCATGHYGFPRCKPCSCGRRLCEEMTGQCRCPPRTVRPQCEVCETHSFSFHPMAGCEGCNCSRRGTIEAAMPECDRDSGQCRCKPRITGRQCDRCASGFYRFPECVPCNCNRDGTEPGVCDPGTGACLCKENVEGTECNVCREGSFHLDPANLKGCTSCFCFGVNNQCHSSHKRRTKFVDMLGWHLETADRVDIPVSFNPGSNSMVADLQELPATIHSASWVAPTSYLGDKVSSYGGYLTYQAKSFGLPGDMVLLEKKPDVQLTGQHMSIIYEETNTPRPDRLHHGRVHVVEGNFRHASSRAPVSREELMTVLSRLADVRIQGLYFTETQRLTLSEVGLEEASDTGSGRIALAVEICACPPAYAGDSCQGCSPGYYRDHKGLYTGRCVPCNCNGHSNQCQDGSGICVNCQHNTAGEHCERCQEGYYGNAVHGSCRACPCPHTNSFATGCVVNGGDVRCSCKAGYTGTQCERCAPGYFGNPQKFGGSCQPCSCNSNGQLGSCHPLTGDCINQEPKDSSPAEECDDCDSCVMTLLNDLATMGEQLRLVKSQLQGLSASAGLLEQMRHMETQAKDLRNQLLNYRSAISNHGSKIEGLERELTDLNQEFETLQEKAQVNSRKAQTLNNNVNRATQSAKELDVKIKNVIRNVHILLKQISGTDGEGNNVPSGDFSREWAEAQRMMRELRNRNFGKHLREAEADKRESQLLLNRIRTWQKTHQGENNGLANSIRDSLNEYEAKLSDLRARLQEAAAQAKQANGLNQENERALGAIQRQVKEINSLQSDFTKYLTTADSSLLQTNIALQLMEKSQKEYEKLAASLNEARQELSDKVRELSRSAGKTSLVEEAEKHARSLQELAKQLEEIKRNASGDELVRCAVDAATAYENILNAIKAAEDAANRAASASESALQTVIKEDLPRKAKTLSSNSDKLLNEAKMTQKKLKQEVSPALNNLQQTLNIVTVQKEVIDTNLTTLRDGLHGIQRGDIDAMISSAKSMVRKANDITDEVLDGLNPIQTDVERIKDTYGRTQNEDFKKALTDADNSVNKLTNKLPDLWRKIESINQQLLPLGNISDNMDRIRELIQQARDAASKVAVPMRFNGKSGVEVRLPNDLEDLKGYTSLSLFLQRPNSRENGGTENMFVMYLGNKDASRDYIGMAVVDGQLTCVYNLGDREAELQVDQILTKSETKEAVMDRVKFQRIYQFARLNYTKGATSSKPETPGVYDMDGRNSNTLLNLDPENVVFYVGGYPPDFKLPSRLSFPPYKGCIELDDLNENVLSLYNFKKTFNLNTTEVEPCRRRKEESDKNYFEGTGYARVPTQPHAPIPTFGQTIQTTVDRGLLFFAENGDRFISLNIEDGKLMVRYKLNSELPKERGVGDAINNGRDHSIQIKIGKLQKRMWINVDVQNTIIDGEVFDFSTYYLGGIPIAIRERFNISTPAFRGCMKNLKKTSGVVRLNDTVGVTKKCSEDWKLVRSASFSRGGQLSFTDLGLPPTDHLQASFGFQTFQPSGILLDHQTWTRNLQVTLEDGYIELSTSDSGSPIFKSPQTYMDGLLHYVSVISDNSGLRLLIDDQLLRNSKRLKHISSSRQSLRLGGSNFEGCISNVFVQRLSLSPEVLDLTSNSLKRDVSLGGCSLNKPPFLMLLKGSTRFNKTKTFRINQLLQDTPVASPRSVKVWQDACSPLPKTQANHGALQFGDIPTSHLLFKLPQELLKPRSQFAVDMQTTSSRGLVFHTGTKNSFMALYLSKGRLVFALGTDGKKLRIKSKEKCNDGKWHTVVFGHDGEKGRLVVDGLRAREGSLPGNSTISIRAPVYLGSPPSGKPKSLPTNSFVGCLKNFQLDSKPLYTPSSSFGVSSCLGGPLEKGIYFSEEGGHVVLAHSVLLGPEFKLVFSIRPRSLTGILIHIGSQPGKHLCVYLEAGKVTASMDSGAGGTSTSVTPKQSLCDGQWHSVAVTIKQHILHLELDTDSSYTAGQIPFPPASTQEPLHLGGAPANLTTLRIPVWKSFFGCLRNIHVNHIPVPVTEALEVQGPVSLNGCPDQ

SEQ ID NO: 259069 - DNA, 10002 bp, Artificial Sequence
  derived and/or modified sequence
atggcggctgccgccagaccaagaggcagagcattgggaccagtactaccacccacacctctcttgttgctagtgttgcgggtcctgcccgcctgtggggcaaccgcacgggaccccggtgccgccgctggcctgtcactccaccctacatatttcaacctagccgaggccgctcgcatttgggccaccgccacttgcggcgaacgcgggcctggggagggccgtccccagcccgaactgtactgcaagctggtgggaggccccactgcaccaggcagcggccataccatccaaggtcagttctgcgattactgcaacagtgaggaccccagaaaagctcaccccgtcactaatgcaatagatggcagtgagagatggtggcagtctccgccattgtctagtggtacccagtataaccgggtgaacctgacactcgatcttggccagctttttcacgtggcgtatatcctgattaaatttgctaattcccccagaccagacctgtgggtactggaaagaagcgtggattttggcagcacatacagtccgtggcagtatttcgcgcacagcaaagtggactgtctgaaggagttcggcagggaggccaacatggcggttacaagagacgatgatgtcttatgcgtcactgaatattcacggatcgtacccctggaaaatggcgaggtggtagtatccctcatcaatggtcgaccaggagcgaaaaatttcactttcagccatactttgagagagttcacaaaagcaaccaatatccgcctacggtttctgagaacaaatacactgctcggccatctcatttcgaaggcccaacgggatcctacagttacgcgacggtactactacagcattaaagatatcagcataggaggacaatgcgtctgcaatggccatgctgaggtctgcaacatcaataatcccgaaaaactcttccgatgcgagtgccagcaccacacttgtggagagacgtgcgaccgctgttgcactggctataaccagagacggtggcgaccagctgcctgggagcagagtcatgaatgcgaggcttgcaattgccacgggcacgccagtaattgttactacgacccagacgtcgaaagacagcaagcttctcttaatacgcagggaatctacgccggtggcggggtgtgcattaactgccaacacaacacagcgggcgttaactgcgagcagtgcgctaaaggatactataggccatatggcgttcccgtggacgctcctgatggctgcattccatgttcttgcgacccagagcatgccgatggttgtgagcagggatcaggccgttgccactgtaagcccaactttcacggggataactgtgaaaagtgtgccatcggctattataattttccattttgcctgcgcatccccatatttccggtcagtactcccagttctgaagatccagttgctggcgatattaagggctgcgattgcaacctggaaggggtgctgccagagatttgtgacgctcacggtaggtgtctgtgtagacccggcgtggaggggccacgatgtgacacatgccgatctggtttttattcctttcccatttgccaggcatgttggtgtagcgctttgggatcatatcagatgccctgcagtagcgttacaggtcagtgtgagtgtagacctggagtgactggccagcggtgcgaccggtgcctgtcgggagcctatgattttccacactgccagggtagctcttccgcatgcgatcccgcaggcacgatcaatagcaacttgggatactgtcagtgcaaactccacgtggaaggccccacatgctccagatgcaagttgttgtactggaatctggataaagagaacccatcagggtgcagtgaatgcaaatgtcacaaggctgggactgtttcaggaaccggcgagtgcagacaaggtgacggagactgtcattgtaagtcgcacgtcggcggagattcttgcgacacctgtgaagacggctactttgcgttggaaaagagtaactatttcggctgtcagggatgccagtgcgacattggcggggccttatcaagcatgtgcagcggaccatccggggtgtgtcaatgcagagagcacgtggtcgggaaagtgtgtcagcggcccgaaaacaactactactttcccgacctccatcatatgaagtacgagattgaggacggatctactcctaacggacgtgacctgcgctttggctttgatccattggcgtttccagaattttcatggagaggatatgcacagatgacttccgtgcagaacgacgtgcgcattacactgaatgttggtaagtcttctggttccctcttccgcgtgattcttaggtatgtgaatcctgggaccgaagccgtgagcggtcacatcaccatttaccctagttggggggccgcacagtctaaagagattatcttccttcctagcaaagaaccggccttcgtaactgtgccaggcaacggttttgctgaccctttcagcatcactccaggcatttgggttgcttgcattaaggccgaaggagtgctgttggactacttggttctccttcctagagactattacgaggcatccgtgctgcagctgcctgtgaccgaaccttgtgcatacgccggaccaccacaggaaaactgcctgctgtatcagcacctgcccgtaaccagatttccttgtaccttagcgtgcgaggcgcggcacttccttcttgacggcgaaccacgccccgtcgcagtaagacagcccacccctgcccaccctgttatggtggacctgtcaggtcgagaggttgagctccacctgcgccttcgcatccctcaggtcggacactatgtggttgtcgtggaatactcaacagaagccgctcagctgtttgtcgtcgacgtgaacgtcaagagctctggctcagtgcttgccggacaggtgaacatctacagctgtaactattccgtgctctgtcgaagcgctgtgattgaccacatgagccggatagctatgtacgaacttctcgcggacgccgacattcagctgaaagggcacatggctcgttttctgctccatcaggtatgcattataccgatcgaagaattctccgctgagtacgttcggccccaggttcactgtatcgcgtcatacggacgttttgttaatcagtccgccacatgcgtgtccttggcccatgaaaccccacctactgccctgatcttggatgtgttatccggtaggcccttccctcatctacctcagcagagttctccatcagtggatgtgctgccgggagtgaccctaaaggctccacagaatcaagtaacccttagaggaagggtgccacatttgggacggtacgtgttcgttatacatttttatcaagcggctcaccccacttttcccgctcaggtctctgtggacggcggttggcccagggccggaagcttccatgcctccttctgtccacatgtgctgggctgtcgggatcaagttattgccgaaggacagatcgaatttgacatatccgagcctgaagtcgccgctaccgtcaaggttcctgaaggaaaaagtctggtgctagtccgtgtcctggttgtgcccgctgaaaattacgactatcaaatcctgcataaaaaatcaatggacaagtccctggaattcatcacaaattgtgggaaaaattctttttatctcgatccgcagaccgcgagcaggttttgcaagaatagtgccaggtctctggtggccttctaccataaaggcgctcttccttgtgagtgtcaccctactggagcaaccgggccgcactgtagcccagaaggcggccagtgcccatgtcagcccaatgtgattggtagacaatgcacacgatgcgctacagggcattatggcttcccccgctgtaagccctgctcttgcgggcggagattgtgtgaggaaatgactggccaatgtcgctgccccccccgcacggtacgaccccagtgtgaggtctgcgagactcattccttcagctttcacccaatggcgggatgcgagggatgtaattgtagtaggcgggggacaattgaggccgcgatgcctgaatgcgaccgggactccgggcagtgtcgatgcaaacctaggataaccggtagacagtgcgaccgctgtgcctctggattctaccgcttcccggaatgtgtaccttgcaattgcaaccgtgatgggactgagcccggggtttgtgatcccggcaccggcgcatgtctctgcaaagagaatgttgaaggaactgaatgcaacgtgtgcagggaaggctcattccacctagatcctgccaatcttaagggctgcactagttgcttttgtttcggggtcaacaatcagtgtcatagcagtcataagcgtcgaacaaaatttgttgacatgcttggctggcacctggagacagcagatagagttgacatacccgtatcattcaatcccggaagcaatagcatggttgccgatctgcaggagctgcccgccaccattcactccgcttcttgggttgcaccaaccagttatttgggagacaaggtgagctcttacggcggttacctgacgtaccaagcaaagtcttttggcctccctggagatatggtgttactggaaaagaagcctgacgtgcagttgacaggacagcacatgagcattatttatgaggaaaccaatactcctagaccggatcgcctgcaccacggccgcgtccatgtggtcgaggggaatttccgccatgcttcatcaagagcgccagttagccgcgaggagctcatgacggtcctttctaggcttgcagacgtaagaatccaaggcttatacttcacagagacccaaagacttactcttagcgaggtagggctcgaggaagcttcagacaccgggtcaggcaggatcgcactcgccgtggagatttgcgcctgtccccctgcctacgccggcgatagctgccagggatgctcccctgggtattaccgggaccataaagggctttatacaggccgatgtgtgccttgcaactgcaatgggcactctaatcagtgccaagatggatccgggatttgcgtaaactgtcagcacaataccgccggtgaacattgtgaaaggtgccaggagggatactacggcaacgcggtccatggatcatgccgagcatgtccctgtccccatactaacagttttgcaaccggctgcgtggtaaatgggggagacgtaaggtgctcctgtaaggccggctatacgggcacacagtgcgagcgctgcgccccagggtactttggcaatccccaaaagttcggagggtcttgtcaaccttgctcttgtaactcaaatgggcagctcgggtcatgccatcctttgactggcgattgtattaatcaagagccgaaagactcaagtcctgctgaggaatgtgacgattgcgacagctgtgtgatgactctcctgaatgacctggcgactatgggcgaacagctcagactagtgaagtcccagctccagggactcagtgcgtctgcaggtctgttagagcagatgagacatatggaaacccaggccaaggacttgcgcaatcaacttctcaactacaggagcgccatatctaatcatggatcaaagatcgaaggtctggagagggaactgaccgacctgaatcaagagtttgaaaccctgcaggaaaaggcgcaggtcaatagtcggaaggcccagacgttgaataataacgttaatcgggcaacgcagtcggctaaggagctcgacgtgaaaattaaaaacgttattaggaatgtgcacatcctgcttaagcagatctccgggacagatggagaagggaacaatgtgccatctggtgatttctccagagagtgggcagaggcccagcgaatgatgcgcgaactgcggaacaggaacttcggcaagcatttgagagaagcggaggcagacaagcgggagtctcagctgctattaaacaggattaggacttggcagaagacacaccagggggaaaataatgggcttgcgaatagtataagagacagcttgaatgaatacgaggccaagctgtccgatcttagggcacgcctgcaggaggctgccgctcaagcaaaacaagccaacggcctgaatcaggagaatgagagggctctgggcgcaatccagcggcaggtaaaggagataaacagtctccagtccgactttacaaaatacctgaccacagccgatagcagtctgttacaaacaaacatcgctctgcaactgatggagaagtctcagaaagagtacgaaaaactggccgcttccctcaacgaggctcggcaggaactgtcagacaaggtccgggagctgtctagatctgcaggaaaaacttcattagtggaggaggctgaaaaacacgcccgatctctgcaagaactcgccaagcaactcgaagagattaagagaaacgcatcaggggacgaattggtacgctgcgccgtggatgcagccaccgcctatgagaatattttgaatgccattaaagccgctgaggacgcagctaatagagcagcttctgcctctgaaagcgctttgcagactgttatcaaggaggatctgccacgtaaagctaagaccctctcaagcaacagcgataagctcctcaatgaagctaagatgacgcaaaaaaaattaaagcaagaggtcagcccggccctcaataaccttcagcaaacgcttaatatagtgactgtccagaaggaggttattgacaccaaccttacaacccttcgggatggcctgcacggcattcaacggggagacatagacgcaatgattagtagcgcaaaatccatggtgaggaaggctaacgacattaccgacgaggtgctggacggcctcaatcccatacagaccgacgtcgaacgaatcaaggacacttacggacgcacccagaatgaggactttaaaaaagcgctcactgacgccgataattctgtgaacaaattgaccaataagttgcctgacttgtggcggaaaatagaatcaattaatcagcagcttctccctctgggaaatatttccgataatatggaccgcatccgagagttaatacagcaagcaagagacgccgcttccaaggtggccgtaccaatgcggtttaacgggaaatccggggttgaggtacgcctgcctaacgaccttgaggatcttaaggggtacacttctctctcattgttcttgcagcgaccaaactcccgagagaatggaggcaccgagaacatgtttgtcatgtatcttggcaacaaagatgcaagcagagactacatcgggatggccgtggtggacggacaacttacttgcgtgtacaatttgggagatcgtgaggcggagctgcaagtggatcaaatcctcaccaagtctgagaccaaggaggctgtaatggacagagtgaaattccagcggatatatcagttcgctcgtctcaattatacaaaaggagctacttcttctaagcctgaaacccctggggtatatgatatggacggcaggaactccaatacactacttaatctagatccagaaaatgtggtgttctacgtagggggctatccccccgattttaaactcccctcacgcctcagcttcccaccgtacaaaggatgcattgaactagacgatttgaatgaaaacgtcctgtctttgtataatttcaaaaaaacatttaaccttaacaccacagaggtggagccatgcaggagaagaaaagaggaatccgacaagaactacttcgagggcacaggctacgcccgcgtgccaactcagccccatgctccaattcctactttcggacagacaatccaaactacagttgaccgggggctcttgttctttgccgagaatggtgaccgcttcatttcgttgaacatcgaggacggcaagctgatggtgaggtacaaactgaattccgagctacccaaggagagaggggtgggggacgcaattaataacgggcgtgaccactctattcagatcaaaatcgggaagctgcagaagcggatgtggattaacgttgacgttcagaatacaataattgatggcgaggtctttgactttagcacttattacctcggagggattccaatcgccattagagagcggttcaatatatctacacctgccttcagaggatgcatgaagaatctgaagaaaacatcaggtgtggtgagactcaacgatacggtcggagtaactaagaagtgtagcgaggactggaaactggtaagatcggcctctttctccaggggcgggcaactctccttcaccgacttgggcttaccgcccacggaccaccttcaggcttctttcggctttcagacctttcagcccagcggtatcctgctggatcatcagacttggacacgcaacctgcaggtgactctggaagacgggtatatcgagctctcgacaagcgattcaggcagccccatatttaagagtcctcaaacttacatggacgggctgcttcactatgtgtcggtcatctccgataactcaggactaaggctgttaatcgacgatcagctattaaggaacagtaaaagactgaagcacatctccagctccagacaatccctacggctgggcggctccaactttgagggctgcatcagtaatgtattcgtacaaagactttctctgtcacctgaagtgctcgacctaactagcaactcattgaagcgcgatgtttccctggggggctgtagtctcaacaagcctccttttctgatgctgttgaagggcagtacccggtttaataagaccaagacgttcaggatcaaccaactgcttcaggatacacctgtggcctcgcctcggtctgtgaaggtgtggcaagacgcgtgcagcccactgccaaagactcaggccaatcacggggctctccagttcggggatatacctacttcccacctcctctttaaacttccacaagagctgttaaagcctcggtcccagtttgccgtggacatgcaaacaacatcctcccgcggactagtcttccacacaggcactaagaacagcttcatggcactatacctcagcaaaggacggttagtatttgccttgggcacagatggtaaaaagctgagaattaaatccaaagaaaagtgcaacgacggaaagtggcatacagtagtgtttgggcatgatggcgaaaaagggaggcttgttgttgatggcctgcgtgcacgcgagggcagcttaccaggaaacagtacaatatctatccgggccccagtgtatctggggtccccaccgagtgggaaaccaaagtcccttcccactaactcctttgtcggctgtctgaaaaactttcaactggattctaagcccttgtataccccttcctcctcctttggtgtcagttcgtgtttgggtgggcccctggagaagggaatatatttctcagaagaggggggccatgtggttctagcccacagcgtgttgctggggcccgagttcaagttggtgttcagtatacgcccacgttcacttacaggaattttaatacacattggctcccaacctggtaagcacctgtgtgtgtacctggaagctggcaaagtgaccgcctccatggatagcggcgccggaggaacttcgacaagtgtgacaccaaagcagagtctctgcgacgggcagtggcatagtgtggcggtgacaataaaacagcatattttgcatctcgaactggacactgattcaagctacaccgctgggcagatcccatttcctccggcaagtactcaggagcctttgcatttgggaggtgccccagctaatctgacgacgctgcgcatccctgtctggaaatcatttttcggatgtctgcggaacatccatgtgaaccacattcccgtcccagtgacggaagccctggaagtgcaggggcccgtaagtttaaatggttgcccagaccaatag

SEQ ID NO: 259070 - DNA, 10506 bp, Artificial Sequence
  derived and/or modified sequence
gcaggtccgggaggcgcaggcggagagcggcggtgcccccgagcccctctgcggacggctcaggcgggaggaccccgcgcggctggatggcggcggccgcgcggcctcggggtcgggcactggggccagtactgccgccgacgccgctgctcctgctggtactgcgggtgctgccagcctgcggggcgaccgctcgggatcccggggccgcggccgggctcagccttcacccgacttacttcaacctggccgaggcggcgaggatttgggccaccgccacctgcggggagaggggacccggcgaggggaggccccagcccgagctctactgcaagttggtcgggggccccaccgccccaggcagcggccacaccatccagggccagttctgtgactattgcaattctgaagaccccaggaaagcacatcctgtcaccaatgccatcgatggatctgaacgttggtggcaaagccctcccctgtcctcaggcacacagtacaacagagtcaacctcaccttggatctggggcagctcttccatgtggcctatattttaatcaaatttgcaaattctcctcgccctgatctttgggtcttggaaagatctgtagactttggaagcacctactcaccatggcaatattttgctcattctaaagtagactgtttaaaagaatttgggcgggaggcaaatatggctgtcacccgggatgatgatgtactttgtgttactgaatattcccgtattgtacctttggaaaatggtgaggttgtggtgtccttgataaacggtcgtccaggtgcaaaaaattttactttctctcacaccctgagggagtttaccaaggcaacaaacatccgcttgcgttttcttagaaccaatacgcttcttggacacctcatctccaaagcccagcgagatccaactgtcactcggcggtattattacagcataaaggacatcagcattggtgggcagtgtgtttgcaatggccatgctgaagtgtgcaatataaacaatcctgaaaaactgtttcggtgtgaatgccagcaccacacctgtggggagacgtgtgatcgctgctgcacagggtacaatcagaggcgctggcggcccgccgcttgggagcagagccacgagtgtgaagcatgcaactgccacggccatgccagcaactgttactatgatccagatgttgagcggcagcaggcaagcttgaatacccagggcatctatgctggtggaggggtctgcattaactgtcagcacaacacagctggagtaaactgtgaacagtgtgctaagggctattaccgcccttatggggttccagtggatgcccctgatggctgcatcccctgcagctgtgaccctgagcatgcggatggctgtgaacagggttcaggccgctgtcactgcaagccaaatttccacggagacaactgtgagaagtgtgcaattggatactacaatttcccattttgcttgagaattcccatttttcctgtttctacaccaagttcagaagatccagtagctggagatataaaagggtgtgactgtaatctggaaggtgttctccctgaaatatgtgatgcccacggacggtgcctgtgccgccctggggttgagggccctcgatgtgatacctgccgctctggtttctactcattccctatttgccaagcctgctggtgttcagcccttggatcctaccagatgccctgcagctcagtgactggacagtgtgaatgtcggccaggagttacaggacagcggtgtgacaggtgtctctcaggagcttatgatttcccccactgccaaggttccagcagtgcttgtgacccagctggtaccatcaactccaatttggggtattgccaatgcaagcttcatgttgaaggtcctacttgtagccgctgcaaactgttatattggaatctggacaaagaaaaccccagtggatgttcagaatgcaagtgccataaggcgggaacagtgagtggaactggagagtgtaggcagggagatggtgactgtcactgcaagtcccatgtgggtggcgattcctgcgacacctgtgaagatggatattttgctttggaaaagagcaattactttgggtgtcaagggtgtcagtgtgacattggtggggcattgtcctccatgtgcagtgggccctcgggagtgtgccagtgccgagagcatgtcgtgggaaaggtgtgccagcggcctgaaaacaactactatttcccagatttgcatcatatgaagtatgagattgaagacggcagcacacctaatgggagagaccttcgatttggatttgatccgctggcatttcctgagtttagctggagaggatatgcccaaatgacctcagtacagaatgatgtaagaataacattgaatgtagggaagtcaagtggctccttgtttcgtgttattctgagatacgttaaccctggaactgaagcagtatctggccatataactatttatccatcctggggtgctgctcaaagcaaagagatcatcttcctgccgagtaaggagccagcctttgtcactgtccctggaaatggttttgcagacccattttcaatcacaccaggaatatgggttgcttgtattaaggcagaaggagtccttctggattacctggtgctgctccccagggactactatgaagcctctgtactgcagctgccagtcacagaaccatgtgcctacgcaggacctccccaagaaaattgcttactctaccagcatttgccagtgaccagattcccctgtaccctggcttgtgaggccagacacttcctgcttgatggggagccaagacccgtggcagtgaggcagcccacacctgcacaccctgtcatggtggacctcagcgggagagaggtggaattgcatctgcggctgcgcatcccacaggttggccactacgtggttgtggtcgagtattccacggaggcagctcagctgtttgtggttgatgtgaatgtgaagagctccgggtctgttctggcaggccaggtgaacatttacagctgcaactacagtgttctctgccggagtgctgtgattgatcacatgagccgcatcgccatgtatgagctattggcagatgcagacattcagctcaagggacacatggcccgattccttctgcatcaagtttgtatcatacctattgaagaattctcagctgagtatgtgagaccacaagtccactgcattgccagttatgggcgatttgtcaatcaaagtgccacctgtgtctccttggcccatgaaactcctccaacagcattaattttggatgttctaagtggcaggcctttccctcacctgccccagcagtcgtcaccttctgttgatgttcttcctggggtcaccttgaaggcaccgcagaatcaagtgaccctgagaggacgtgtaccacacctgggccgatacgtctttgtcatccatttttaccaagcagcgcacccgacgtttcccgcgcaggtgtcggtggatggcgggtggccacgggcaggctccttccatgcctctttttgcccccatgtgcttggctgccgggatcaagtgattgccgaaggccagattgagtttgacatctcagagcctgaagtggccgcaactgtgaaggttccagaaggaaagtccttggttttggtccgtgttctagtggtgcctgcagaaaactatgactaccaaatacttcacaaaaaatccatggacaagtcactcgagtttatcaccaattgtggaaaaaacagcttttaccttgacccccagacagcctccagattctgtaagaattccgccaggtccctggtggccttttaccacaagggcgccctgccttgtgagtgccaccccactggggccaccggccctcactgcagccctgagggtgggcagtgcccatgccagcccaacgtcatcgggcggcagtgcacccgctgtgcaacaggccactacggattcccacgctgcaagccgtgcagctgtggtcggcgcctttgtgaagagatgacggggcagtgccgctgccctccccgcacggtcaggccccagtgtgaggtgtgtgagacacactcattcagcttccaccccatggccggctgcgaaggctgcaactgttccaggaggggcaccatcgaggctgccatgccggagtgtgaccgggacagcgggcagtgcagatgcaagcccagaatcacagggcggcagtgtgaccgatgtgcttccgggttttaccgctttcctgagtgtgttccctgcaattgcaacagagatgggactgagccaggagtgtgtgacccagggaccggggcttgcctctgcaaggaaaatgtagaaggcacagagtgtaatgtgtgtcgagaaggctcattccatttggacccagccaatctcaagggttgtaccagctgtttctgttttggagtaaataatcaatgtcacagctcacataagcgaaggactaagtttgtggatatgctgggctggcacctggagacagcagacagagtggacatccctgtctctttcaacccaggcagcaacagtatggtggcggatctccaggagctgcccgcaaccatccacagcgcgtcctgggtcgcacccacctcctacctgggggacaaggtttcttcatatggtggttacctcacttaccaagccaagtcctttggcttgcctggcgacatggttcttctggaaaagaagccggatgtacagctcactggtcagcacatgtccatcatctatgaggagacaaacaccccacggccagaccggctgcatcatggacgagtgcacgtggtcgagggaaacttcagacatgccagcagccgtgccccagtgtctagggaggagctgatgacagtgctgtctagactggcagatgtgcgcatccaaggcctctacttcacagagactcaaaggctcaccctgagcgaggtggggctagaggaagcctctgacacaggaagtgggcgcatagcacttgctgtggaaatctgtgcctgcccccctgcctacgctggtgactcttgtcagggttgtagccctggatactatcgggatcataaaggcttgtataccggacggtgtgttccctgcaattgcaacggacattcaaatcaatgccaggatggctcaggcatatgtgttaactgtcagcacaacaccgcgggagagcactgtgaacgctgccaggagggctactatggcaacgccgtccacggatcctgcagggcctgcccatgtcctcacactaacagctttgccactggctgtgtggtgaatgggggagacgtgcggtgctcctgcaaagctgggtacacaggaacacagtgtgaaaggtgtgcaccgggatatttcgggaatccccagaaattcggaggtagctgccaaccatgcagttgtaacagcaatggccagctgggcagctgtcatcccctgactggagactgcataaaccaagaacccaaagatagcagccctgcagaagaatgtgatgattgcgacagctgtgtgatgaccctcctgaacgacctggccaccatgggcgagcagctccgcctggtcaagtctcagctgcagggcctgagtgccagcgcagggcttctggagcagatgaggcacatggagacccaggccaaggacctgaggaatcagttgctcaactaccgttctgccatttcaaatcatggatcaaaaatagaaggcctggaaagagaactgactgatttgaatcaagaatttgagactttgcaagaaaaggctcaagtaaattccagaaaagcacaaacattaaacaacaatgttaatcgggcaacacaaagcgcaaaagaactggatgtgaagattaaaaatgtcatccggaatgtgcacattcttttaaagcagatctctgggacagatggagagggaaacaacgtgccttcaggtgacttttccagagagtgggctgaagcccagcgcatgatgagggaactgcggaacaggaactttggaaagcacctcagagaagcagaagctgataaaagggagtcgcagctcttgctgaaccggataaggacctggcagaaaacccaccagggggagaacaatgggcttgctaacagtatccgggattctttaaatgaatacgaagccaaactcagtgaccttcgtgctcggctgcaggaggcagctgcccaagccaagcaggcaaatggcttgaaccaagaaaacgagagagctttgggagccattcagagacaagtgaaagaaataaattccctgcagagtgatttcaccaagtatctaaccactgcagactcatctttgttgcaaaccaacattgcgctgcagctgatggagaaaagccagaaggaatatgaaaaattagctgccagtttaaatgaagcaagacaagaactaagtgacaaagtaagagaactttccagatctgctggcaaaacatcccttgtggaggaggcagaaaagcacgcgcggtccttacaagagctggcaaagcagctggaagagatcaagagaaacgccagcggggatgagctggtgcgctgtgctgtggatgccgccaccgcctacgagaacatcctcaatgccatcaaagcggccgaggacgcagccaacagggctgccagtgcatctgaatctgccctccagacagtgataaaggaagatctgccaagaaaagctaaaaccctgagttccaacagtgataaactgttaaatgaagccaagatgacacaaaagaagctaaagcaagaagtcagtccagctctcaacaacctacagcaaaccctgaatattgtgacagttcagaaagaagtgatagacaccaatctcacaactctccgagatggtcttcatgggatacagagaggtgatattgatgctatgatcagtagtgcaaagagcatggtcagaaaggccaacgacatcacagatgaggttctggatgggctcaaccccatccagacagatgtggaaagaattaaggacacctatgggaggacacagaacgaagacttcaaaaaggctctgactgatgcagataactcggtgaataagttaaccaacaaactacctgatctttggcgcaagattgaaagtatcaaccaacagctgttgcccttgggaaacatctctgacaacatggacagaatacgagaactaattcagcaggccagagatgctgccagtaaggttgctgtccccatgaggttcaatggtaaatctggagtcgaagtccgactgccaaatgacctggaagatttgaaaggatatacatctctgtccttgtttctccaaaggcccaactcaagagaaaatgggggtactgagaatatgtttgtgatgtaccttggaaataaagatgcctcccgggactacatcggcatggcagttgtggatggccagctcacctgtgtctacaacctgggggaccgtgaggctgaactccaagtggaccagatcttgaccaagagtgagactaaggaggcagttatggatcgggtgaaatttcagagaatttatcagtttgcaaggcttaattacaccaaaggagccacatccagtaaaccagaaacacccggagtctatgacatggatggtagaaatagcaatacactccttaatttggatcctgaaaatgttgtattttatgttggaggttacccacctgattttaaacttcccagtcgactaagtttccctccatacaaaggttgtattgaattagatgacctcaatgaaaatgttctgagcttgtacaacttcaaaaaaacattcaatctcaacacaactgaagtggagccttgtagaaggaggaaggaagagtcagacaaaaattattttgaaggtacgggctatgctcgagttccaactcaaccacatgctcccatcccaacctttggacagacaattcagaccaccgtggatagaggcttgctgttctttgcagaaaacggggatcgcttcatatctctaaatatagaagatggcaagctcatggtgagatacaaactgaattcagagctaccaaaagagagaggagttggagacgccataaacaacggcagagaccattcgattcagatcaaaattggaaaactccaaaagcgtatgtggataaatgtggacgttcaaaacactataattgatggtgaagtatttgatttcagcacatattatctgggaggaattccaattgcaatcagggaaagatttaacatttctacgcctgctttccgaggctgcatgaaaaatttgaagaaaaccagtggtgtcgttagattgaatgatactgtgggagtaaccaaaaagtgctcggaagactggaagcttgtgcgatctgcctcattctccagaggaggacaattgagtttcactgatttgggcttaccacctactgaccacctccaggcctcatttggatttcagacctttcaacccagtggcatattattagatcatcagacatggacaaggaacctgcaggtcactctggaagatggttacattgaattgagcaccagcgatagcggcagcccaatttttaaatctccacagacgtatatggatggtttactgcattatgtatctgtaataagcgacaactctggactacggcttctcatcgatgaccagcttctgagaaatagcaaaaggctaaaacacatttcaagttcccggcagtctctgcgtctgggcgggagcaattttgagggttgtattagcaatgtttttgtccagaggttatcactgagtcctgaagtcctagatttgaccagtaactctctcaagagagatgtgtccctgggaggctgcagtttaaacaaaccaccttttctaatgttgcttaaaggttctaccaggtttaacaagaccaagacttttcgtatcaaccagctgttgcaggacacaccagtggcctccccaaggagcgtgaaggtgtggcaagatgcttgctcaccacttcccaagacccaggccaatcatggagccctccagtttggggacattcccaccagccacttgctattcaagcttcctcaggagctgctgaaacccaggtcacagtttgctgtggacatgcagacaacatcctccagaggactggtgtttcacacgggcactaagaactcctttatggctctttatctttcaaaaggacgtctggtctttgcactggggacagatgggaaaaaattgaggatcaaaagcaaggagaaatgcaatgatgggaaatggcacacggtggtgtttggccatgatggggaaaaggggcgcttggttgtggatggactgagggcccgggagggaagtttgcctggaaactccaccatcagcatcagagcgccagtttacctgggatcacctccatcagggaaaccaaagagcctccccacaaacagctttgtgggatgcctgaagaactttcagctggattcaaaacccttgtataccccttcttcaagcttcggggtgtcttcctgcttgggtggtcctttggagaaaggcatttatttctctgaagaaggaggtcatgtcgtcttggctcactctgtattgttggggccagaatttaagcttgttttcagcatccgcccaagaagtctcactgggatcctaatacacatcggaagtcagcccgggaagcacttatgtgtttacctggaggcaggaaaggtcacggcctctatggacagtggggcaggtgggacctcaacgtcggtcacaccaaagcagtctctgtgtgatggacagtggcactcggtggcagtcaccataaaacaacacatcctgcacctggaactggacacagacagtagctacacagctggacagatccccttcccacctgccagcactcaagagccactacaccttggaggtgctccagccaatttgacgacactgaggatccctgtgtggaaatcattctttggctgtctgaggaatattcatgtcaatcacatccctgtccctgtcactgaagccttggaagtccaggggcctgtcagtctgaatggttgtcctgaccagtaacccaagcctatttcacagcaaggaaattcaccttcaaaagcactgattacccaatgcacctccctccccagctcgagatcattcttcactcaggacacaaaccagacaggtttaatagcgaatctaattttgaattctgaccatggatacccatcactttggcattcagtgctacatgtgtattttatataaaaatcccatttcttgaagataaaaaaattgttattcaaattgttatgcacagaatgtttttggtaatattaatttccactaaaaaattaaatgtcttttaagaaacattcttttccacttgttaaaaaaattaaatatattttaaagcactttaagaatatgaaactttcatatatgttaaaggattataatttatggaattaaaaaatgcagtgtagtccttaaa

SEQ ID NO: 259071 - DNA, 10497 bp, Artificial Sequence
  derived and/or modified sequence
gcaggtccgggaggcgcaggcggagagcggcggtgcccccgagcccctctgcggacggctcaggcgggaggaccccgcgcggctggatggcggcggccgcgcggcctcggggtcgggcactggggccagtactgccgccgacgccgctgctcctgctggtactgcgggtgctgccagcctgcggggcgaccgctcgggatcccggggccgcggccgggctcagccttcacccgacttacttcaacctggccgaggcggcgaggatttgggccaccgccacctgcggggagaggggacccggcgaggggaggccccagcccgagctctactgcaagttggtcgggggccccaccgccccaggcagcggccacaccatccagggccagttctgtgactattgcaattctgaagaccccaggaaagcacatcctgtcaccaatgccatcgatggatctgaacgttggtggcaaagccctcccctgtcctcaggcacacagtacaacagagtcaacctcaccttggatctggggcagctcttccatgtggcctatattttaatcaaatttgcaaattctcctcgccctgatctttgggtcttggaaagatctgtagactttggaagcacctactcaccatggcaatattttgctcattctaaagtagactgtttaaaagaatttgggcgggaggcaaatatggctgtcacccgggatgatgatgtactttgtgttactgaatattcccgtattgtacctttggaaaatggtgaggttgtggtgtccttgataaacggtcgtccaggtgcaaaaaattttactttctctcacaccctgagggtttaccaaggcaacaaacatccgctttttcttagaaccaatacgcttcttggacacctcatctccaaagcccagcgagatccaactgtcactcggcggtattattacagcataaaggacatcagcattggtgggcagtgtgtttgcaatggccatgctgaagtgtgcaatataaacaatcctgaaaaactgtttcggtgtgaatgccagcaccacacctgtggggagacgtgtgatcgctgctgcacagggtacaatcagaggcgctggcggcccgccgcttgggagcagagccacgagtgtgaagcatgcaactgccacggccatgccagcaactgttactatgatccagatgttgagcggcagcaggcaagcttgaatacccagggcatctatgctggtggaggggtctgcattaactgtcagcacaacacagctggagtaaactgtgaacagtgtgctaagggctattaccgcccttatggggttccagtggatgcccctgatggctgcatcccctgcagctgtgaccctgagcatgcggatggctgtgaacagggttcaggccgctgtcactgcaagccaaatttccacggagacaactgtgagaagtgtgcaattggatactacaatttcccattttgcttgagaattcccatttttcctgtttctacaccaagttcagaagatccagtagctggagatataaaagggtgtgactgtaatctggaaggtgttctccctgaaatatgtgatgcccacggacggtgcctgtgccgccctggggttgagggccctcgatgtgatacctgccgctctggtttctactcattccctatttgccaagcctgctggtgttcagcccttggatcctaccagatgccctgcagctcagtgactggacagtgtgaatgtcggccaggagttacaggacagcggtgtgacaggtgtctctcaggagcttatgatttcccccactgccaaggttccagcagtgcttgtgacccagctggtaccatcaactccaatttggggtattgccaatgcaagcttcatgttgaaggtcctacttgtagccgctgcaaactgttatattggaatctggacaaagaaaaccccagtggatgttcagaatgcaagtgccataaggcgggaacagtgagtggaactggagagtgtaggcagggagatggtgactgtcactgcaagtcccatgtgggtggcgattcctgcgacacctgtgaagatggatattttgctttggaaaagagcaattactttgggtgtcaagggtgtcagtgtgacattggtggggcattgtcctccatgtgcagtgggccctcgggagtgtgccagtgccgagagcatgtcgtgggaaaggtgtgccagcggcctgaaaacaactactatttcccagatttgcatcatatgaagtatgagattgaagacggcagcacacctaatgggagagaccttcgatttggatttgatccgctggcatttcctgagtttagctggagaggatatgcccaaatgacctcagtacagaatgatgtaagaataacattgaatgtagggaagtcaagtggctccttgtttcgtgttattctgagatacgttaaccctggaactgaagcagtatctggccatataactatttatccatcctggggtgctgctcaaagcaaagagatcatcttcctgccgagtaaggagccagcctttgtcactgtccctggaaatggttttgcagacccattttcaatcacaccaggaatatgggttgcttgtattaaggcagaaggagtccttctggattacctggtgctgctccccagggactactatgaagcctctgtactgcagctgccagtcacagaaccatgtgcctacgcaggacctccccaagaaaattgcttactctaccagcatttgccagtgaccagattcccctgtaccctggcttgtgaggccagacacttcctgcttgatggggagccaagacccgtggcagtgaggcagcccacacctgcacaccctgtcatggtggacctcagcgggagagaggtggaattgcatctgcggctgcgcatcccacaggttggccactacgtggttgtggtcgagtattccacggaggcagctcagctgtttgtggttgatgtgaatgtgaagagctccgggtctgttctggcaggccaggtgaacatttacagctgcaactacagtgttctctgccggagtgctgtgattgatcacatgagccgcatcgccatgtatgagctattggcagatgcagacattcagctcaagggacacatggcccgattccttctgcatcaagtttgtatcatacctattgaagaattctcagctgagtatgtgagaccacaagtccactgcattgccagttatgggcgatttgtcaatcaaagtgccacctgtgtctccttggcccatgaaactcctccaacagcattaattttggatgttctaagtggcaggcctttccctcacctgccccagcagtcgtcaccttctgttgatgttcttcctggggtcaccttgaaggcaccgcagaatcaagtgaccctgagaggacgtgtaccacacctgggccgatacgtctttgtcatccatttttaccaagcagcgcacccgacgtttcccgcgcaggtgtcggtggatggcgggtggccacgggcaggctccttccatgcctctttttgcccccatgtgcttggctgccgggatcaagtgattgccgaaggccagattgagtttgacatctcagagcctgaagtggccgcaactgtgaaggttccagaaggaaagtccttggttttggtccgtgttctagtggtgcctgcagaaaactatgactaccaaatacttcacaaaaaatccatggacaagtcactcgagtttatcaccaattgtggaaaaaacagcttttaccttgacccccagacagcctccagattctgtaagaattccgccaggtccctggtggccttttaccacaagggcgccctgccttgtgagtgccaccccactggggccaccggccctcactgcagccctgagggtggggcccatgccagcccaacgtcatcgggcggcagtgcacccgctgtgcaacaggcctacggattcccacgctgcaagcgtaagtcgtgcagctgtggtcggcgcctttgtgaagagatgacggggcagtgccgctgccctccccgcacggtcaggccccagtgtgaggtgtgtgagacacactcattcagcttccaccccatggccggctgcgaaggctgcaactgttccaggaggggcaccatcgaggctgccatgccggagtgtgaccgggacagcgggcagtgcagatgcaagcccagaatcacagggcggcagtgtgaccgatgtgcttccgggttttaccgctttcctgagtgtgttccctgcaattgcaacagagatgggactgagccaggagtgtgtgacccagggaccggggcttgcctctgcaaggaaaatgtagaaggcacagagtgtaatgtgtgtcgagaaggctcattccatttggacccagccaatctcaagggttgtaccagctgtttctgttttggagtaaataatcaatgtcacagctcacataagcgaaggactaagtttgtggatatgctgggctggcacctggagacagcagacagagtggacatccctgtctctttcaacccaggcagcaacagtatggtggcggatctccaggagctgcccgcaaccatccacagcgcgtcctgggtcgcacccacctcctacctgggggacaaggtttcttcatatggtggttacctcacttaccaagccaagtcctttggcttgcctggcgacatggttcttctggaaaagaagccggatgtacagctcactggtcagcacatgtccatcatctatgaggagacaaacaccccacggccagaccggctgcatcatggacgagtgcacgtggtcgagggaaacttcagacatgccagcagccgtgccccagtgtctagggaggagctgatgacagtgctgtctagactggcagatgtgcgcatccaaggcctctacttcacagagactcaaaggctcaccctgagcgaggtggggctagaggaagcctctgacacaggaagtgggcgcatagcacttgctgtggaaatctgtgcctgcccccctgcctacgctggtgactcttgtcagggttgtagccctggatactatcgggatcataaaggcttgtataccggacggtgtgttccctgcaattgcaacggacattcaaatcaatgccaggatggctcaggcatatgtgttaactgtcagcacaacaccgcgggagagcactgtgaacgctgccaggagggctactatggcaacgccgtccacggatcctgcagggcctgcccatgtcctcacactaacagctttgccactggctgtgtggtgaatgggggagacgtgcggtgctcctgcaaagctgggtacacaggaacacagtgtgaaaggtgtgcaccgggatatttcgggaatccccagaaattcggaggtagctgccaaccatgcagttgtaacagcaatggccagctgggcagctgtcatcccctgactggagactgcataaaccaagaacccaaagatagcagccctgcagaagaatgtgatgattgcgacagctgtgtgatgaccctcctgaacgacctggccaccatgggcgagcagctccgcctggtcaagtctcagctgcagggcctgagtgccagcgcagggcttctggagcagatgaggcacatggagacccaggccaaggacctgaggaatcagttgctcaactaccgttctgccatttcaaatcatggatcaaaaatagaaggcctggaaagagaactgactgatttgaatcaagaatttgagactttgcaagaaaaggctcaagtaaattccagaaaagcacaaacattaaacaacaatgttaatcgggcaacacaaagcgcaaaagaactggatgtgaagattaaaaatgtcatccggaatgtgcacattcttttaaagcagatctctgggacagatggagagggaaacaacgtgccttcaggtgacttttccagagagtgggctgaagcccagcgcatgatgagggaactgcggaacaggaactttggaaagcacctcagagaagcagaagctgataaaagggagtcgcagctcttgctgaaccggataaggacctggcagaaaacccaccagggggagaacaatgggcttgctaacagtatccgggattctttaaatgaatacgaagccaaactcagtgaccttcgtgctcggctgcaggaggcagctgcccaagccaagcaggcaaatggcttgaaccaagaaaacgagagagctttgggagccattcagagacaagtgaaagaaataaattccctgcagagtgatttcaccaagtatctaaccactgcagactcatctttgttgcaaaccaacattgcgctgcagctgatggagaaaagccagaaggaatatgaaaaattagctgccagtttaaatgaagcaagacaagaactaagtgacaaagtaagagaactttccagatctgctggcaaaacatcccttgtggaggaggcagaaaagcacgcgcggtccttacaagagctggcaaagcagctggaagagatcaagagaaacgccagcggggatgagctggtgcgctgtgctgtggatgccgccaccgcctacgagaacatcctcaatgccatcaaagcggccgaggacgcagccaacagggctgccagtgcatctgaatctgccctccagacagtgataaaggaagatctgccaagaaaagctaaaaccctgagttccaacagtgataaactgttaaatgaagccaagatgacacaaaagaagctaaagcaagaagtcagtccagctctcaacaacctacagcaaaccctgaatattgtgacagttcagaaagaagtgatagacaccaatctcacaactctccgagatggtcttcatgggatacagagaggtgatattgatgctatgatcagtagtgcaaagagcatggtcagaaaggccaacgacatcacagatgaggttctggatgggctcaaccccatccagacagatgtggaaagaattaaggacacctatgggaggacacagaacgaagacttcaaaaaggctctgactgatgcagataactcggtgaataagttaaccaacaaactacctgatctttggcgcaagattgaaagtatcaaccaacagctgttgcccttgggaaacatctctgacaacatggacagaatacgagaactaattcagcaggccagagatgctgccagtaaggttgctgtccccatgaggttcaatggtaaatctggagtcgaagtccgactgccaaatgacctggaagatttgaaaggatatacatctctgtccttgtttctccaaaggcccaactcaagagaaaatgggggtactgagaatatgtttgtgatgtaccttggaaataaagatgcctcccgggactacatcggcatggcagttgtggatggccagctcacctgtgtctacaacctgggggaccgtgaggctgaactccaagtggaccagatcttgaccaagagtgagactaaggaggcagttatggatcgggtgaaatttcagagaatttatcagtttgcaaggcttaattacaccaaaggagccacatccagtaaaccagaaacacccggagtctatgacatggatggtagaaatagcaatacactccttaatttggatcctgaaaatgttgtattttatgttggaggttacccacctgattttaaacttcccagtcgactaagtttccctccatacaaaggttgtattgaattagatgacctcaatgaaaatgttctgagcttgtacaacttcaaaaaaacattcaatctcaacacaactgaagtggagccttgtagaaggaggaaggaagagtcagacaaaaattattttgaaggtacgggctatgctcgagttccaactcaaccacatgctcccatcccaacctttggacagacaattcagaccaccgtggatagaggcttgctgttctttgcagaaaacggggatcgcttcatatctctaaatatagaagatggcaagctcatggtgagatacaaactgaattcagagctaccaaaagagagaggagttggagacgccataaacaacggcagagaccattcgattcagatcaaaattggaaaactccaaaagcgtatgtggataaatgtggacgttcaaaacactataattgatggtgaagtatttgatttcagcacatattatctgggaggaattccaattgcaatcagggaaagatttaacatttctacgcctgctttccgaggctgcatgaaaaatttgaagaaaaccagtggtgtcgttagattgaatgatactgtgggagtaaccaaaaagtgctcggaagactggaagcttgtgcgatctgcctcattctccagaggaggacaattgagtttcactgatttgggcttaccacctactgaccacctccaggcctcatttggatttcagacctttcaacccagtggcatattattagatcatcagacatggacaaggaacctgcaggtcactctggaagatggttacattgaattgagcaccagcgatagcggcagcccaatttttaaatctccacagacgtatatggatggtttactgcattatgtatctgtaataagcgacaactctggactacggcttctcatcgatgaccagcttctgagaaatagcaaaaggctaaaacacatttcaagttcccggcagtctctgcgtctgggcgggagcaattttgagggttgtattagcaatgtttttgtccagaggttatcactgagtcctgaagtcctagatttgaccagtaactctctcaagagagatgtgtccctgggaggctgcagtttaaacaaaccaccttttctaatgttgcttaaaggttctaccaggtttaacaagaccaagacttttcgtatcaaccagctgttgcaggacacaccagtggcctccccaaggagcgtgaaggtgtggcaagatgcttgctcaccacttcccaagacccaggccaatcatggagccctccagtttggggacattcccaccagccacttgctattcaagcttcctcaggagctgctgaaacccaggtcacagtttgctgtggacatgcagacaacatcctccagaggactggtgtttcacacgggcactaagaactcctttatggctctttatctttcaaaaggacgtctggtctttgcactggggacagatgggaaaaaattgaggatcaaaagcaaggagaaatgcaatgatgggaaatggcacacggtggtgtttggccatgatggggaaaaggggcgcttggttgtggatggactgagggcccgggagggaagtttgcctggaaactccaccatcagcatcagagcgccagtttacctgggatcacctccatcagggaaaccaaagagcctccccacaaacagctttgtgggatgcctgaagaactttcagctggattcaaaacccttgtataccccttcttcaagcttcggggtgtcttcctgcttgggtggtcctttggagaaaggcatttatttctctgaagaaggaggtcatgtcgtcttggctcactctgtattgttggggccagaatttaagcttgttttcagcatccgcccaagaagtctcactgggatcctaatacacatcggaagtcagcccgggaagcacttatgtgtttacctggaggcaggaaaggtcacggcctctatggacagtggggcaggtgggacctcaacgtcggtcacaccaaagcagtctctgtgtgatggacagtggcactcggtggcagtcaccataaaacaacacatcctgcacctggaactggacacagacagtagctacacagctggacagatccccttcccacctgccagcactcaagagccactacaccttggaggtgctccagccaatttgacgacactgaggatccctgtgtggaaatcattctttggctgtctgaggaatattcatgtcaatcacatccctgtccctgtcactgaagccttggaagtccaggggcctgtcagtctgaatggttgtcctgaccagtaacccaagcctatttcacagcaaggaaattcaccttcaaaagcactgattacccaatgcacctccctccccagctcgagatcattcttcactcaggacacaaaccagacaggtttaatagcgaatctaattttgaattctgaccatggatacccatcactttggcattcagtgctacatgtgtattttatataaaaatcccatttcttgaagataaaaaaattgttattcaaattgttatgcacagaatgtttttggtaatattaatttccactaaaaaattaaatgtcttttaagaaacattcttttccacttgttaaaaaaattaaatatattttaaagcactttaagaatatgaaactttcatatatgttaaaggattataatttatggaattaaaaaatgcagtgtagtcctt

SEQ ID NO: 259072 - DNA, 10002 bp, Artificial Sequence
  derived and/or modified sequence
atggctgctgctgcccggccccggggccgggccctgggccctgtgctgccccccacccccctgctgctgctggtgctgcgggtgctgcctgcctgtggggccacagcccgggaccctggagctgctgctggcctgagcctgcaccccacctacttcaacctggccgaggccgcccgcatctgggccacagccacctgtggggagcggggccctggagagggccggccccagcctgagctgtactgcaagctggtgggcggccccacagcccctggcagcggccacaccatccagggccagttctgtgactactgcaacagcgaggaccccaggaaggcccaccctgtgaccaatgccattgatggcagcgagcgctggtggcagagcccccccctgagcagcggcacccagtacaacagagtgaacctgaccctggacctgggccagctgttccacgtggcctacatcctgatcaagtttgccaacagccccaggccagacctgtgggtgctggagaggtctgtggactttggcagcacctacagcccctggcagtactttgcccacagcaaggtggactgcctgaaggagtttggccgggaggccaacatggctgtgaccagagatgatgatgtgctgtgtgtgacagagtacagcagaattgtgcccctggagaatggagaggtggtggtgtccctcatcaatggccggcctggggccaagaacttcaccttcagccacaccctgcgggagttcaccaaggccaccaacatccggctgcgcttcctgcggaccaacaccctgctgggccacctgatcagcaaggcccagagggaccccaccgtgacccggcgctactactacagcatcaaggacatcagcattggaggccagtgtgtgtgcaatggacatgctgaggtgtgcaacatcaacaaccctgagaagctgttccgctgtgagtgccagcaccacacctgtggggagacctgtgaccgctgctgcaccggctacaaccagaggcgctggaggcctgctgcctgggagcagagccatgaatgtgaggcctgcaactgccacggccacgccagcaactgctactatgaccctgatgtggagcggcagcaggccagcctgaacacccagggcatctatgccggcggcggcgtgtgcatcaactgccagcacaacacagctggggtgaactgtgagcagtgtgccaagggctactaccggccctatggagtgcctgtggatgccccagatggctgcatcccctgcagctgtgaccctgagcacgcagatggctgtgagcagggcagcggccgctgccactgcaagcccaacttccacggggacaactgtgagaagtgtgccatcggctactacaacttccccttctgcctgcgcatccccatcttccctgtgtccacccccagcagtgaagatcctgtggccggggacatcaagggctgtgactgcaacctggagggcgtgctgcctgagatctgtgatgcccacggccgctgcctgtgcaggcctggggtggagggcccccgctgtgacacctgccgcagcggcttctacagcttccccatctgccaggcctgctggtgcagcgccctgggcagctaccagatgccctgcagctctgtgacaggccagtgtgagtgcaggcctggggtgacaggccagagatgtgaccgctgcctgagcggggcctatgacttcccccactgccagggcagcagcagcgcctgtgaccctgctggcaccatcaacagcaacctgggctactgccagtgcaagctgcacgtggagggccccacctgcagccgctgcaagctgctgtactggaacctggacaaggagaaccccagcggctgcagcgagtgcaagtgccacaaggccggcaccgtgtctggcaccggggagtgccggcagggagatggagactgccactgcaagagccacgtgggcggggacagctgtgacacctgtgaagatggctactttgccctggagaagagcaactacttcggctgccagggctgccagtgtgacatcggcggggccctgagctccatgtgcagcggccccagcggcgtgtgccagtgccgggagcacgtggtgggcaaggtgtgccagaggcctgagaacaactactacttcccagacctgcaccacatgaagtatgaaattgaagatggcagcacccccaacggccgggacctgcgcttcggctttgaccccctggccttccctgagttctcctggaggggctacgcccagatgacctctgtgcagaatgatgtgcgcatcaccctgaatgtgggcaagagcagcggcagcctcttccgggtcatcctgcgctacgtgaaccctggaacagaggccgtgtctggccacatcaccatctaccccagctggggcgccgcccagagcaaggagatcatcttcctgcccagcaaggagcccgcctttgtgacagtgcctggaaatggatttgctgaccccttcagcatcaccccaggcatctgggtggcctgcatcaaggccgagggcgtgctgctggactacctggtgctgctgccccgggactactatgaggcctctgtgctgcagctgcctgtgacagagccctgtgcctatgccggccccccccaggagaactgcctgctgtaccagcacctgcctgtgacccgcttcccctgcaccctggcctgtgaggcccggcacttcctgctggatggagagcccaggcctgtggccgtgcggcagcccaccccagcccaccctgtgatggtggacctgagcggccgggaggtggagctgcacctgcggctgcgcatcccccaggtgggccactacgtggtggtggtggagtacagcacagaggccgcccagctgtttgtggtggatgtgaatgtgaagagcagcggctctgtgctggccggccaggtgaacatctacagctgcaactacagcgtgctgtgccgctctgctgtgattgaccacatgagcagaattgccatgtatgagctgctggctgatgctgacatccagctgaagggccacatggcccgcttcctgctgcaccaggtgtgcatcatccccatcgaggagttcagcgcagaatatgtgcggccccaggtgcactgcatcgccagctatggccgctttgtgaaccagagcgccacctgtgtgtccctggcccacgagaccccacccacagccctgatcctggatgtgctgagcggccggcccttcccccacctgccccagcagagcagccccagcgtggatgtgctgcccggggtgaccctgaaggccccccagaaccaggtgaccctgcggggccgggtgccccacctgggccgctacgtgtttgtgatccacttctaccaggccgcccaccccaccttccctgcccaggtgtctgtggatggcggctggccccgggccggcagcttccacgccagcttctgcccccacgtgctgggctgccgggaccaggtgattgctgagggccagatcgagtttgacatcagcgagcctgaggtggccgccaccgtgaaggtgcctgagggcaagagcctggtgctggtgcgggtgctggtggtgcctgctgagaactatgactaccagatcctgcacaagaagtccatggacaagagcctggagttcatcaccaactgtgggaagaacagcttctacctggacccccagacagccagccgcttctgcaagaacagcgcccggagcctggtggccttctaccacaagggggccctgccctgtgagtgccaccccactggagccaccggcccccactgcagccctgagggcggccagtgcccctgccagcccaacgtcatcggccggcagtgcacccgctgtgccaccggccactacggcttcccccgctgcaagccctgcagctgtggccggcggctgtgtgaggagatgacaggccagtgccgctgcccccccaggacagtgcggccccagtgtgaggtgtgtgagacccacagcttctccttccaccccatggccggctgtgagggctgcaactgcagccggcggggcaccatcgaggccgccatgccagaatgtgaccgggacagcggccagtgccgctgcaagccccgcatcaccggccggcagtgtgacagatgtgccagcggcttctaccgcttcccagaatgtgtgccctgcaactgcaacagagatggaacagagcccggggtgtgtgaccccggcactggagcctgcctgtgcaaggaaaatgtggagggcacagagtgcaatgtgtgccgggagggcagcttccacctggaccctgccaacctgaagggctgcaccagctgcttctgctttggagtgaacaaccagtgccacagcagccacaagaggaggaccaagtttgtggacatgctgggctggcacctggagacagctgacagagtggacatccctgtgtccttcaaccctggcagcaacagcatggtggccgacctgcaggagctgcctgccaccatccacagcgcctcctgggtggcccccaccagctacctgggggacaaggtgtcctcctatggaggctacctgacctaccaggccaagagctttggcctgcccggggacatggtgctgctggagaagaagccagatgtgcagctgaccggccagcacatgagcatcatctatgaggagaccaacacccccaggccagaccggctgcaccacggccgggtgcacgtggtggagggcaacttcagacatgccagcagccgggcccctgtgtcccgggaggagctgatgacagtgctgagccggctggctgatgtgcgcatccagggcctgtacttcacagagacccagaggctgaccctgtctgaggtgggcctggaggaggccagtgacaccggcagcggcagaattgccctggccgtggagatctgtgcctgccccccagcctatgctggggacagctgccagggctgcagccctggctactacagagaccacaagggcctgtacacaggccgctgtgtgccctgcaactgcaatggccacagcaaccagtgccaggacggcagcggcatctgtgtgaactgccagcacaacacagctggggagcactgtgagcgctgccaggagggctactatggaaatgctgtgcacggcagctgccgggcctgcccctgcccccacaccaacagctttgccaccggctgtgtggtgaatggaggagatgtgcgctgcagctgcaaggccggctacacaggcacccagtgtgagcgctgtgcccctggctacttcggcaacccccagaagtttggaggcagctgccagccctgcagctgcaacagcaatggccagctgggcagctgccaccccctgaccggggactgcatcaaccaggagcccaaggacagcagccctgctgaggagtgtgatgactgtgacagctgtgtgatgaccctgctgaatgacctggccaccatgggagagcagctgcggctggtgaagagccagctgcagggcctgagcgccagcgctggcctgctggagcagatgaggcacatggagacccaggccaaggacctgaggaaccagctgctgaactacagaagtgccatcagcaaccacggcagcaagattgagggcctggagcgggagctgacagacctgaaccaggagtttgagaccctgcaggagaaggcccaggtgaacagcaggaaggcccagaccctgaacaacaacgtgaacagagccacccagagcgccaaggagctggatgtgaagatcaagaatgtcatcagaaatgtgcacatcctgctgaagcagatcagcggcacagatggagagggcaacaacgtgcccagcggggacttcagccgggagtgggccgaggcccagaggatgatgagggagctgaggaacagaaactttgggaagcacctgcgggaggccgaggccgacaagcgggagagccagctgctgctgaaccgcatccgcacctggcagaagacccaccagggcgagaacaacggcctggccaacagcatccgggacagcctgaatgaatatgaggccaagctgagtgacctgcgggcccggctgcaggaggccgccgcccaggccaagcaggccaacggcctgaaccaggagaatgaaagagccctgggcgccatccagaggcaggtgaaggagatcaacagcctgcagagcgacttcaccaagtacctgaccacagctgacagcagcctgctgcagaccaacatcgccctgcagctgatggagaagagccagaaggagtatgagaagctggccgccagcctgaatgaggcccggcaggagctgagtgacaaggtgcgggagctgagccgctctgctgggaagaccagcctggtggaggaggccgagaagcacgcccggagcctgcaggagctggccaagcagctggaggagatcaagagaaatgccagcggagatgagctggtgcgctgtgctgtggatgctgccacagcctatgagaacatcctgaatgccatcaaggctgctgaagatgctgccaacagagctgccagcgccagcgagagcgccctgcagaccgtcatcaaggaggacctgcccaggaaggccaagaccctgagcagcaacagcgacaagctgctgaatgaggccaagatgacccagaagaagctgaagcaggaggtgtccccagccctgaacaacctgcagcagaccctgaacatcgtgacagtgcagaaggaggtgattgacaccaacctgaccaccctgagagatggcctgcacggcatccagagaggagacattgatgccatgatcagcagcgccaagtccatggtgaggaaggccaatgacatcacagatgaggtgctggatggcctgaaccccatccagacagatgtggagcgcatcaaggacacctacggccgcacccagaatgaagacttcaagaaggccctgacagatgctgacaacagcgtgaacaagctgaccaacaagctgcctgacctgtggaggaagattgagagcatcaaccagcagctgctgcccctgggcaacatcagtgacaacatggaccgcatccgggagctgatccagcaggccagagatgctgccagcaaggtggccgtgcccatgaggttcaacgggaagtctggagtggaggtgcggctgcccaatgacctggaggacctgaagggctacaccagcctgagcctcttcctgcagaggcccaacagcagagaaaatggaggaacagagaacatgtttgtgatgtacctgggcaacaaggatgccagccgggactacatcggcatggctgtggtggatggccagctgacctgtgtgtacaacctgggggaccgggaggccgagctgcaggtggaccagatcctgaccaagtctgagaccaaggaggccgtgatggacagagtgaagttccagaggatctaccagtttgcccggctgaactacaccaagggggccaccagcagcaagccagagaccccaggagtgtatgacatggatggaagaaacagcaacaccctgctgaacctggaccctgaaaatgtggtgttctacgtgggcggctaccccccagacttcaagctgcccagccggctgtccttccccccctacaagggctgcatcgagctggatgacctgaatgaaaatgtgctgagcctgtacaacttcaagaagaccttcaacctgaacaccacagaggtggagccctgcagaagaaggaaggaggagagtgacaagaactactttgagggcaccggctacgcccgggtgcccacccagccccacgcccccatccccaccttcggccagaccatccagaccaccgtggaccggggcctgctcttctttgctgaaaatggagaccgcttcatcagcctgaacattgaagatggcaagctgatggtgcgctacaagctgaacagcgagctgcccaaggagcggggcgtgggagatgccatcaacaacggccgggaccacagcatccagatcaagattggcaagctgcagaagaggatgtggatcaacgtggatgtgcagaacaccatcattgatggagaggtgtttgacttcagcacctactacctgggcggcatccccatcgccatccgggagcgcttcaacatcagcaccccagccttccggggctgcatgaagaacctgaagaagaccagcggcgtggtgcggctgaatgacacagtgggcgtgaccaagaagtgcagcgaggactggaagctggtgcgcagcgccagcttcagcagaggaggccagctgtccttcacagacctgggcctgcccccaacagaccacctgcaggccagctttggcttccagaccttccagcccagcggcatcctgctggaccaccagacctggaccaggaacctgcaggtgaccctggaggatggctacatcgagctgagcaccagtgacagcggcagccccatcttcaagagcccccagacctacatggatggcctgctgcactacgtgtctgtcatcagtgacaacagcggcctgcggctgctgattgatgaccagctgctgaggaacagcaagaggctgaagcacatcagcagcagccggcagagcctgcggctgggcggcagcaactttgagggctgcatcagcaatgtgtttgtgcagaggctgagcctgagccctgaggtgctggacctgaccagcaacagcctgaagagagatgtgtccctgggcggctgcagcctgaacaagccacccttcctgatgctgctgaagggcagcacccgcttcaacaagaccaagaccttccgcatcaaccagctgctgcaggacacccctgtggccagccccaggtctgtgaaggtgtggcaggatgcctgcagccccctgcccaagacccaggccaaccacggggccctgcagtttggagacatccccaccagccacctgctcttcaagctgccccaggagctgctgaagcccaggagccagtttgctgtggacatgcagaccaccagcagccggggcctggtgttccacacaggcaccaagaacagcttcatggccctgtacctgagcaagggccgcctggtgtttgccctgggcacagatggcaagaagctgcgcatcaagagcaaggagaagtgcaatgatggcaagtggcacacagtggtgtttggacatgatggagagaagggccgcctggtggtggatggcctgcgggcccgggagggcagcctgcccggcaacagcaccatcagcatccgggcccctgtgtacctgggcagccccccatctgggaagcccaagagcctgcccaccaacagctttgtgggctgcctgaagaacttccagctggacagcaagcccctgtacacccccagcagcagctttggagtgagcagctgcctgggcggccccctggagaagggcatctacttcagcgaggagggcggccacgtggtgctggcccacagcgtgctgctgggccctgagttcaagctggtgttcagcatccggcccaggagcctgaccggcatcctgatccacatcggcagccagcccgggaagcacctgtgtgtgtacctggaggccggcaaggtgacagcctccatggattctggagctgggggcaccagcacctctgtgacccccaagcagagcctgtgtgatggccagtggcacagcgtggccgtgaccatcaagcagcacatcctgcacctggagctggacacagacagcagctacacagctggccagatccccttccccccagccagcacccaggagcccctgcacctgggcggggccccagccaacctgaccaccctgcgcatccctgtgtggaagagcttcttcggctgcctgaggaacatccacgtgaaccacatccctgtgcctgtgacagaggccctggaggtgcagggccctgtgtccctgaatggctgcccagaccagtag

SEQ ID NO: 259073 - DNA, 10002 bp, Artificial Sequence
  derived and/or modified sequence
atggccgccgccgcccggccccggggccgggccctgggccccgtgctcccaccgactccgctgctgctgttggtcctgagagtgttacccgcttgcggagcaacggcccgcgaccccggggcagctgcgggactgtcactgcacccgacgtacttcaatttggccgaagcagccagaatttgggccaccgctacgtgtggcgagcgtggtcccggggagggtcgaccgcagccagaactgtattgtaaattggtcggtgggcccactgccccggggtctgggcatacaatccagggtcaattctgcgactattgcaacagcgaagacccccgtaaggcccaccctgttaccaacgctatagatgggtcagaacgctggtggcagtcccctccactctcgagtgggactcagtacaatcgggtgaatctcaccttagacctcggacaactgtttcatgttgcttacatcttgataaagttcgctaatagcccgcggcctgatctatgggtcctggaaaggtctgtggactttggaagcacttatagcccctggcagtattttgctcactctaaggtagattgtctgaaagagttcgggcgggaagccaatatggctgttactagggacgatgacgtcctgtgtgttaccgaatatagtcggattgtgcctctcgagaacggagaggttgtggtctcgcttatcaacggtcggcccggggcaaagaacttcacattctcgcataccttgcgcgaattcacaaaagctaccaatataaggcttcgctttctgcggacaaacaccttgctggggcacctgatttcaaaggcccagagagatcccacggtgacacggcgctattattacagcatcaaggatatcagcatcgggggacaatgcgtgtgtaatgggcacgctgaggtttgcaatattaacaacccagagaagctgtttcggtgtgagtgccagcaccacacctgcggagagacttgtgacaggtgctgtacaggctacaaccagaggaggtggaggccagccgcttgggagcagagccacgagtgcgaggcctgcaattgtcacggccacgcgagcaattgttactacgatcctgacgttgagcggcagcaagcctccctgaatacccagggtatatacgccggaggaggagtgtgtatcaattgtcagcataatacagccggggtaaattgtgagcagtgcgccaagggatactatcgtccatacggggtccccgtcgacgctcccgacggctgtattccttgcagttgcgatcctgaacatgctgatggatgcgaacaaggttctgggcgttgccattgcaaacccaactttcacggcgacaactgcgagaaatgcgctattgggtattacaactttccattttgcctgcggatccccattttcccagtgagcactccctccagcgaggaccccgtcgccggtgacattaagggatgtgattgcaatttggaaggagtgctgccagaaatctgtgatgcccacggccggtgcttatgtcgccctggggtagagggaccacggtgcgatacgtgtcgttccggcttctacagctttcccatctgccaggcttgctggtgtagtgcacttggcagttatcaaatgccttgctcctcagtcacagggcagtgtgaatgcagacctggcgtgacaggccagagatgcgatcgctgcctgagtggagcttacgatttccctcactgccagggttcgtcgtccgcctgtgaccctgccggaacaattaactcaaacttgggttattgccaatgtaagctgcatgttgaaggccccacttgctccaggtgcaaattattgtactggaatttggataaagaaaatccatcaggctgttcagagtgcaagtgtcacaaagccgggacagtttctgggactggagagtgcaggcagggagatggagactgccactgcaagtcgcatgtaggcggagattcttgcgacacatgtgaagacggctactttgcactggagaagagtaactattttgggtgccaaggctgccaatgtgatataggaggagccctctcaagcatgtgctctgggccctccggcgtgtgccagtgtcgggaacacgtagtggggaaagtttgccagcgccctgagaataattattattttccggacctgcatcatatgaagtacgagattgaggatggatctacccccaatgggagggacctcaggttcgggttcgatcctctagcatttccagagtttagttggagaggctatgcgcaaatgaccagcgtgcagaacgacgtccgcatcaccctgaacgtcggtaagtcctctggatcgctgttccgggttatattgcgatacgtcaaccccgggactgaggcggtgagtgggcacataacaatttacccttcatggggtgctgcgcaaagcaaggaaataatcttccttccctcaaaggaaccagctttcgtgacagtgccaggtaacggctttgccgatccgtttagcattaccccaggtatctgggtggcctgtatcaaggctgagggcgtcttactggactacctggtgctgctgccacgggactactacgaggcgagtgtgttgcaattgcctgtgactgagccttgtgcatatgccgggcccccccaggaaaactgcctcttataccagcatctgcccgtcacacgattcccatgtacactggcttgtgaagcgcggcatttcctgctggacggagagccccggccagttgccgtccgtcaacctacccccgctcaccctgtgatggtcgacctgtcggggcgcgaagtcgagctgcacctgcggctaagaatcccccaggtgggacattacgttgtggtagtggagtattctacagaggcggcacaactgtttgtcgtggatgttaacgtgaagtccagcggctcagttctggcaggccaggtcaatatctactcttgtaattactctgttctgtgcaggtccgctgtgatcgatcatatgtcccgcatcgccatgtacgagctccttgcagatgccgatatccagctcaaaggacatatggcccgatttcttctgcatcaggtttgcatcatcccaatcgaggagttttcggcggaatacgtccgaccgcaagtgcactgtatagcctcatatggcaggtttgtgaaccagtcggcaacctgtgtctctctggcacacgaaactccgcccactgctctgatcctcgatgtgctcagtgggaggccttttccgcatctgccccagcagagtagcccttccgtcgacgttcttcccggggttaccctgaaagcccctcaaaatcaggtcacactacggggccgggtgccacatctgggtcggtacgtcttcgtgattcatttttaccaagccgctcacccaactttccctgctcaggtgagcgtggatggggggtggccccgagctggaagttttcacgctagcttttgtcctcatgtgctgggctgtagggatcaagtcattgcggagggacaaatagaattcgatatttctgaacccgaagtcgcagccaccgtcaaggttcccgaaggtaagtctctcgtcctcgttcgtgtcctggtcgttcccgcggagaattacgactaccaaattctacacaaaaagagtatggataaaagcctagaattcattactaattgtggcaaaaattcattttacctggaccctcagacggcctccagattttgtaagaacagtgctcgttcattagtggcattctaccataagggagcactgccatgcgagtgccaccctaccggcgccaccggaccacactgtagcccggaaggcgggcagtgcccctgccaaccaaatgtgattggccgtcagtgcacgagatgcgccacaggacattatggattccccaggtgcaaaccctgctcatgcggacgcaggctgtgtgaggaaatgactggccagtgtaggtgcccgccaagaaccgtccggccacagtgcgaagtgtgtgaaacacactctttcagcttccacccaatggccgggtgtgagggatgcaactgttctcggcgcggtaccattgaggcggcaatgcctgaatgcgacagagattcagggcaatgccgttgcaagccacgtatcacaggtcgccaatgtgaccggtgcgccagcggtttctatagattccctgagtgcgttccatgcaactgtaatagggatggtacagaacctggagtttgcgacccaggaaccggcgcgtgtttgtgtaaggaaaatgtcgaagggaccgaatgtaatgtctgtcgcgaaggcagttttcatctggaccccgccaacttgaagggttgcacatcatgcttctgcttcggggttaataatcaatgtcactcatcccacaaaagaaggactaaattcgtggacatgctcggatggcacctggagaccgccgacagagtagatattcccgtatcgtttaatccagggtcaaacagcatggtggccgatcttcaagaattgccagccacaatacattcagcgtcttgggtggcccccacgtcatatttaggggataaggtctccagctacggggggtaccttacgtaccaggccaagtcattcgggctgcctggggatatggtactactggagaagaaaccagatgtgcaacttactgggcaacacatgagcatcatttacgaggagaccaacacacccaggccagataggctgcaccatggccgggttcatgtggtggagggaaacttccgccatgcctcatcccgggcccctgtctctcgggaggaactgatgacggtgctgtcccggctggccgacgtccgtattcaaggtttatatttcacagaaacacaaaggctgactctgtcggaggtcggactggaagaagcctcagacactggatccggcagaatagctttagccgttgaaatttgtgcctgtccgcccgcatacgccggggactcctgccaaggttgcagcccagggtactatagggaccataagggtctgtacacagggcggtgcgtaccctgcaattgcaatggacactctaatcaatgccaggacggatcaggcatctgtgtgaactgtcagcataataccgcaggcgaacactgtgaacggtgccaagaggggtattacggtaacgctgtgcacggctcatgtagagcctgtccatgcccgcacaccaacagtttcgcgacagggtgtgtggtaaatgggggcgacgtgcggtgtagctgcaaagccggctacacaggcacccagtgcgaacgctgtgccccagggtacttcgggaacccccagaaatttggagggagttgccaaccttgctcatgtaactctaacgggcaattagggtcctgccatcctcttacaggcgactgcataaaccaggagccaaaggattcgagccctgcagaggagtgcgacgactgcgacagctgtgtcatgacactcctgaatgatcttgcaacaatgggagaacagctgcgtctcgtgaagtcccagctgcagggactgtctgcatcagcgggacttctcgagcaaatgaggcacatggagacccaggccaaagaccttaggaatcagttgttgaactatagaagcgcgatctcgaaccatggctccaagatcgaaggactcgagagagagttgacggaccttaaccaggagttcgagactctccaggagaaagcccaggtgaattcccgcaaggcccagaccctgaataataatgttaaccgggcaactcagtcggccaaggaacttgacgttaaaattaagaatgtgattaggaacgtccacatccttctgaaacagatcagcgggactgatggtgaaggcaataacgtccctagtggtgactttagccgtgaatgggcagaggcccaaaggatgatgagagaactcagaaaccggaatttcgggaagcatctgcgcgaagccgaagccgacaagcgcgaatcacagctgctgctcaatagaattagaacatggcagaaaacgcaccagggcgagaacaacggcctcgccaattcaatccgcgactcgttaaatgagtacgaggcaaagctgtctgatttaagagctcgattgcaggaggcggcagctcaggccaagcaggccaacgggttgaatcaggaaaatgagcgcgcacttggagccatccagcgccaggttaaagagataaacagcctgcaatccgacttcaccaaataccttaccacggcggactcaagccttctgcagaccaacattgccctacaacttatggaaaaaagtcaaaaagagtatgagaaattggccgcatctctgaacgaggcccgacaggagctctcggacaaagttagggaactttcacggagtgccggtaagactagccttgtagaggaggctgagaagcacgcccgcagcctgcaggaattggcgaagcagctggaagagataaagcggaacgctagcggggatgaattagttagatgtgcagtcgatgctgcgactgcgtacgagaatattctgaacgctatcaaagcggccgaggacgccgccaatcgagctgcgtcggcttctgagagcgccttacagaccgtcattaaggaagatctccctaggaaagctaagaccttgagtagtaactcagataagcttcttaatgaggcaaagatgacccagaagaaattaaaacaagaggtgagtccagctttaaacaacttacagcagactttgaacatcgtgacggtgcagaaagaagtgatagataccaacctgacaaccctcagggacggtctgcacggcatccagaggggcgatattgacgcaatgatcagttctgctaaatctatggtgaggaaagccaatgacataacagatgaggttctcgacggtctgaatcctatccagacagacgttgaaaggataaaagatacctatggtcgcactcagaacgaagatttcaagaaagcactgactgacgctgataacagcgtgaacaaattgacgaacaaactcccagacctttggcggaagattgagagtatcaatcagcagctgctccctctcggaaatatatccgataacatggataggatccgcgagctgatccagcaggccagggatgccgcttctaaggttgcagtgcctatgaggtttaacgggaaatctggcgtggaggtccgcctgccaaacgatttggaagatttgaagggttatactagtctctctttgttccttcagaggcctaatagtagggaaaatggaggcaccgagaacatgttcgtgatgtacctcgggaacaaggatgcaagcagggattatattggcatggccgtggtggacggtcaactcacatgcgtgtataatttgggcgatcgagaggctgagctccaagtggatcagattctcactaagtctgaaaccaaggaggccgtgatggacagagtgaagttccagcggatataccaattcgcccgcctcaactacaccaaaggcgcgacctcctcaaagcctgagacaccaggggtgtacgatatggacggaaggaacagtaatacactgttgaacttggaccctgagaacgttgtgttttacgtgggaggataccctccggactttaagctgccctcacggttatccttcccgccctacaagggttgtatcgaactggacgatctcaatgagaatgtgttgtccctctataatttcaagaaaacatttaacctgaacacaactgaggtggagccatgccgacgcagaaaggaggaatcagacaaaaactacttcgagggcaccggatacgctcgtgtgcccacccagccccatgcccctatcccgaccttcggccagaccatccaaacaactgtggatcgtgggctgttgttctttgctgagaacggtgacaggttcatctcacttaacatcgaggatggcaagttaatggtgcggtataagctgaattcagagttgcccaaggagcggggcgtcggagatgcgatcaataacgggagagaccatagcattcaaattaagatcggcaagctacagaaaaggatgtggattaacgttgacgtccaaaatacaatcattgacggcgaggtctttgacttttctacctattatctgggaggaattcccattgccatccgggagcggttcaatattagcacccctgcatttaggggctgcatgaagaatctgaaaaagacgagcggagtcgtgagactaaatgatacggtcggggttaccaagaagtgctccgaagactggaagctagttcgctcagccagtttctcacggggagggcagttgtcattcacagatctgggcctgcctcccacggaccacttacaggcgtcctttggattccagacctttcagccgagcggaatcctgttggaccatcagacatggaccagaaatcttcaggtcactcttgaggacggttatattgaactgtctactagcgatagcgggtcaccaatcttcaagtctccccagacttacatggatggactactccactacgtttcggtaattagcgacaacagcgggctgcgcttgctgatagatgaccagctgttgaggaacagtaagaggttaaagcacatctctagcagccgacagagcctacgcctgggcggttctaacttcgagggctgcatttctaacgtcttcgttcaaaggctgtctcttagccccgaggttttagacctgacttcaaatagtttgaaaagggacgtgtcactcggcggttgctccttgaacaagccccctttcctgatgctgctcaaagggtccactagattcaacaagaccaaaactttcagaataaaccagcttctacaggacactccggtggcctccccacgttccgtgaaggtttggcaggacgcctgcagtcctcttcccaaaactcaagccaaccacggtgccttgcagtttggagatatccctacctcacacctcctctttaagttgccgcaggagctgctgaaaccaagaagtcagtttgccgtggatatgcagaccacatctagtaggggcctggtattccatacaggcactaaaaatagctttatggcgttatatctctctaagggcaggctcgttttcgctctgggcactgacggtaagaagctgagaatcaagtccaaggaaaagtgcaatgacgggaagtggcacaccgtcgtgtttggccatgatggggagaagggcagactggttgtggacggcctgcgagcacgggaggggagtctccctggaaactcaaccatttctattagggccccggtatacctggggtccccacccagcgggaaacctaaatcactgccaaccaactccttcgtgggctgcctgaagaacttccaattagattcgaagcccttgtacactccttcaagtagcttcggcgtaagcagctgtctgggaggccctcttgagaaaggcatttatttctctgaggaaggaggacacgtggtactggctcattcagtcctgttgggccccgagttcaaactggtgttttccatccgaccccgttccctgaccggaatcctgattcatatcgggtctcagcccggcaagcacctatgcgtgtaccttgaggccggaaaggttaccgcctccatggacagcggggctggagggacaagtacctccgttactcccaaacagagcctatgtgatggccagtggcattctgtggctgtgactataaaacaacatatcctgcacttggaactagacacagattcctcctatactgcaggccagatcccatttccaccggcctccactcaggaacccctacatctgggcggtgcacctgccaacctgaccaccctgcggatccccgtatggaagtcgtttttcggatgtctgaggaatatccacgttaatcacatccccgtcccagtaactgaagccctggaggtgcaaggccctgtgtcgctgaatggatgcccggatcagtag

SEQ ID NO: 259074 - DNA, 10001 bp, Artificial Sequence
  derived and/or modified sequence
atggccgctgccgcaaggcccaggggtagagcactgggaccagtcctaccacctacacctttgctactgctggtgctgagggtactccccgcatgcggtgcaacggccagggatcctggagctgccgctggtctgagcctccaccccacctatttcaatttggccgaggctgcacggatttgggctaccgctacctgcggcgaaagggggcctggcgagggcaggccccagccggaactgtactgtaaattggtgggaggccctaccgcccctgggtccgggcatactattcaggggcagttctgcgactactgcaattccgaagacccgcgtaaagcccatcctgtgaccaatgcaattgatggctccgagcggtggtggcagagcccacccctcagctccggcacacaatataaccgggtcaacctcactctggacttgggacaactgttccacgtggcatatatcttaatcaagttcgccaactcacctcggccagacttatgggtactcgaaagatccgtggacttcgggagcacatactccccgtggcagtacttcgcccattcaaaagtagattgtcttaaagagtttgggcgagaggccaatatggctgtgacacgcgacgacgatgtgctctgcgttactgagtatagcaggatcgtccccctggaaaatggcgaggtggtggtcagcctgataaacggaagaccaggagcaaagaactttacattctctcataccttacgcgagtttaccaaggcaactaatatccgactgcggttcctccggactaatactcttctcggacatctgatcagcaaagcacaacgggacccaaccgtgacccgacggtactactattctatcaaagatatttctatcggcggtcaatgcgtctgtaacggacatgccgaagtgtgcaatataaacaaccccgagaagttgtttcgttgcgagtgtcagcaccacacctgcggcgaaacatgcgacagatgctgtaccggttacaaccagcggagatggcggccagcagcttgggaacagagccatgagtgcgaagcctgtaattgtcatggccacgcctccaactgctactacgatcccgacgttgaacgacagcaggccagtctgaatactcagggtatttatgcaggaggaggagtgtgcatcaactgccaacacaacaccgccggtgtcaactgcgagcagtgtgccaagggctattatcgcccttacggagtgccagtggatgctcccgatggatgtataccatgttcttgtgaccctgagcacgccgacggctgcgagcagggcagtggacgctgccattgcaagccgaacttccacggtgacaattgcgagaagtgcgctattgggtattacaattttcctttctgcctgcgaatcccaatcttccctgttagcacaccttcaagcgaagacccagtggcaggggatataaaagggtgtgattgcaacctcgagggagtgttgcccgagatctgcgatgcccacggacggtgtctgtgtcgcccaggtgtcgagggtccgagatgtgatacctgccgctctggcttctactcctttcctatttgtcaggcgtgctggtgttccgccctcggcagttatcagatgccctgctcttcggtgactggccaatgtgaatgccgaccaggcgtgactgggcagagatgcgatcggtgtctgagcggagcctacgatttcccccactgtcagggctccagcagtgcatgtgaccctgccggtaccataaactctaacctgggctattgtcagtgcaaactccacgtcgaagggcctacttgtagcagatgtaagctgctttattggaacttagacaaggagaatccctccgggtgtagtgagtgtaagtgtcacaaagctgggactgtctccggcacaggcgagtgtcggcagggcgatggcgactgccattgtaagagccacgtgggcggtgactcttgtgacacttgcgaggacgggtactttgcattggaaaaatctaactacttcggatgccagggctgtcaatgcgacatcggaggcgctctctcatccatgtgttcgggaccctcaggcgtgtgtcagtgccgggaacatgttgtaggtaaggtgtgtcagaggcccgagaacaattactacttccccgacctacatcatatgaagtatgaaatcgaggatggcagcacgccaaacggcagagatctgcggtttggattcgacccactggcctttcctgagttttcttggagaggatacgctcagatgacatccgtgcagaacgacgtaaggatcaccctcaacgtcggaaaatcctctggatctctctttcgcgtcatcctacgctatgtgaacccgggaactgaggcagtgtctggacatatcaccatctacccaagctggggtgcagcccagtcaaaagagattatttttctgccctccaaagaaccagcatttgtaacagtacccggaaacggattcgcggaccctttctctatcacccccggaatctgggtcgcttgtattaaagctgaaggtgtgctgctggactatctcgtcctgttgcctcgagattactatgaggcctctgtcctgcagttgccagttaccgaaccttgcgcctacgccggtccccctcaggagaattgccttctgtaccagcatttacctgtgacaaggttcccatgtaccctggcttgcgaagccaggcactttcttctggatggagagcccaggcccgtggcagtccgacagcctaccccagctcacccagtgatggtggatctcagcggaagggaggtagaacttcacctccggcttcggattccacaggtgggccactacgtcgtggtcgttgaatatagcactgaggccgctcagctcttcgtagtggacgtcaatgtgaagtccagcggaagcgtgttggccggtcaggtaaatatctattcttgtaactactccgtgctttgtcgttcagctgtaattgatcatatgagccgcatagcaatgtatgagttactcgccgacgccgacatacagctgaaaggtcacatggctcgctttcttcttcaccaagtgtgtattatcccgattgaagaattttctgccgaatacgtcaggcctcaggtgcactgcatagcatcttacggacgcttcgttaaccaatctgccacatgtgtcagcctggcccatgaaaccccgccaacagccttgattctggacgtactcagcggacggccatttccacacctgccacagcagtccagccctagcgttgatgtcttaccgggtgttactctgaaagccccacagaatcaggtgacgctgagaggccgagtgcctcacctgggcagatatgtgtttgtgatccacttttatcaggccgctcacccgacatttcctgcccaggtcagcgtggatggcggatggccacgggcagggagctttcatgccagtttttgtccccatgtgttgggctgtcgggaccaggtgatcgccgagggacaaattgaattcgacatttccgagcccgaagtggcagccactgtgaaagtccccgaaggtaagtcactcgtccttgtcagggtgctggttgtgcccgctgagaactacgactatcagattctgcacaagaagtccatggacaaaagcctggagtttatcaccaattgcggaaagaattccttttatctggatccgcagaccgccagtaggttctgcaagaactccgcacgcagtctggttgctttctaccacaagggggctctgccctgtgagtgtcatccaactggagcaactgggccacattgttcaccggagggaggacagtgtccctgccagcctaatgtcatcggtcgccagtgcacaagatgcgcaacaggccattacggctttcctagatgtaaaccttgcagctgcggcagacgactgtgtgaggagatgaccgggcagtgcagatgtccccctcgtaccgtgcggcctcagtgcgaggtgtgcgaaacacattctttttctttccatcctatggcaggctgcgaagggtgcaattgttctcggagggggacaatcgaagccgcaatgcccgaatgcgacagggacagtggacagtgtcgttgcaagcccagaatcacaggcaggcagtgtgataggtgcgcctccggcttttaccggttccccgagtgcgtcccttgcaactgtaacagagacggtaccgaaccgggagtttgtgacccgggtaccggcgcttgtctgtgcaaagaaaatgtggaaggcaccgagtgcaacgtgtgccgggagggcagtttccaccttgaccccgcaaacctgaagggctgcacttcttgcttctgcttcggtgtgaacaatcagtgccatagtagtcacaagcggagaaccaaattcgtggacatgctgggatggcacttggagacagcagatagagttgatatccccgtgagttttaaccccggatccaattctatggttgctgatcttcaggagctccccgctaccattcattccgcgagctgggttgctccgacatcctatctcggtgataaggtgtcttcctacggcggatatctgacataccaggctaaatccttcgggctgccaggagacatggtgctcctcgagaaaaagcccgacgtacagctgaccgggcagcacatgtcaatcatttacgaggagaccaatacccctagacctgatcgcctccatcacgggcgtgtccacgtcgtggaaggcaacttccggcacgcttcttcccgggctcccgtctcacgggaggaactcatgacagttttgagcaggctggcggacgttcgtatccaggggctgtacttcaccgagacacagagactgactctttcagaagtgggtctcgaagaagcctcagacacaggcagtggccgaatcgcactggctgtcgagatttgcgcctgccctcctgcttacgccggtgacagctgtcagggatgcagccctggttactacagggaccacaagggcctttataccggaagatgtgtcccttgcaactgtaacggccacagtaatcagtgtcaggacgggtcaggcatctgtgtaaattgtcagcacaataccgcaggagagcattgtgagagatgccaggaaggctactacggaaacgccgtacatggtagctgtcgggcatgcccttgtcctcacaccaactcattcgccaccggatgtgtggtgaacggaggagatgtgcgctgtagttgcaaagcaggatacaccggtacacagtgtgagaggtgtgctccaggttactttggaaacccacaaaagttcggcggatcatgtcagccttgctcatgtaacagtaatggccagctgggcagctgccatccacttactggggattgtattaaccaagaaccaaaagattctagccctgcggaggagtgcgatgattgcgattcttgcgttatgacactgcttaacgacctcgctacaatgggagagcagctcaggttggtgaaaagtcagctccaggggctatctgcctcagcgggtctgctggagcaaatgaggcatatggaaacacaggctaaggatctgcgcaatcagctcctcaactacagaagcgcaatatcgaaccatggctctaaaatagaaggtcttgaacgggaactaaccgacctaaatcaggagtttgaaaccctccaggaaaaggctcaagtgaattctcgcaaggcccagacgcttaacaataacgtcaatcgcgctactcaatctgcaaaggagctggacgtgaaaatcaaaaacgtgattagaaacgtccacattttgctgaagcagatttctggcaccgatggcgaaggaaataatgtgcctagcggagacttttcccgcgagtgggcagaagctcagaggatgatgagagaattgaggaacaggaatttcggaaagcacctgcgtgaggccgaagccgataagcgagagtctcagcttctcctgaacaggatacggacgtggcagaagactcaccagggcgagaacaatggcctggccaactcaatccgcgacagcttaaacgagtacgaggctaaactgtcagacttaagggcgcgtcttcaggaagcggctgctcaggccaagcaggctaacggcctgaatcaggaaaacgaaagagcactgggagcgatacagcgacaggtcaaggagatcaactcactccagtccgatttcactaaatacctgacaaccgcagattccagcttgctccagactaacatcgccctgcagctgatggagaaaagccaaaaggagtatgagaaactggctgcctccctaaacgaagctcggcaagagttgtcagataaggtaagggagctgtcccgatccgcgggtaaaacctcgctggtcgaagaggccgagaaacatgcaagatctcttcaggagcttgctaagcagctggaagaaattaagaggaatgcaagcggggatgagctcgtgcggtgtgctgtagacgctgccaccgcgtatgagaacattctgaacgctatcaaggccgctgaagacgccgcaaatagggctgcctcggcctcagagagcgccctgcagactgtaatcaaggaagatcttccaaggaaggctaagacgctaagctctaacagtgacaagcttctgaatgaggcgaaaatgacgcagaagaagctgaagcaggaagtgtctccagcgctcaataatttacagcagactctaaatatcgttacagtacagaaagaggtcatcgataccaatttgactacactccgagacgggcttcacgggatccaaagaggggatatcgatgccatgatatcatctgccaaatccatggttaggaaggctaatgacatcactgatgaggtgctggatggcctgaacccaatccagactgacgtggagcgcatcaaagatacatatgggcgaactcaaaacgaggatttcaaaaaagctcttacagatgccgacaactctgtcaataaactgaccaataagctccctgatttgtggcgcaagatcgaatcaattaaccagcagttgctccccctgggcaacatcagtgataacatggacagaattcgtgaactaatccagcaggcaagagacgccgcttctaaagtggccgtgccaatgcgcttcaacggcaagagcggcgttgaggtgagactgccgaacgatcttgaagacttgaagggttacacctctctaagccttttcctgcagcgacccaactctcgcgaaaatggcggaaccgaaaatatgttcgtcatgtaccttggaaataaggacgcaagtcgcgattacatcggcatggccgtcgtagatggacagctcacttgtgtttacaacctgggcgatagagaagccgaactgcaggtcgatcagatcctaacgaaatccgagacgaaggaagctgtgatggaccgcgtcaaattccagcgaatctatcaatttgcaaggctgaactatactaaaggcgctacaagtagtaagcccgaaactcctggcgtctatgatatggacggccgaaactcaaacacactccttaatctggatcccgagaatgtagtgttttacgtcggtggatacccccctgacttcaagctcccgagcaggctttcctttcctccctacaagggatgcatcgagctggacgatctgaacgaaaacgtcctctccctgtataactttaagaagacgtttaacctcaatactactgaggttgagccttgtaggagaaggaaggaggagtccgataaaaattactttgaaggtaccgggtacgcacgggtacccacgcagccacacgcccctatccccactttcggccagacgatacagacgactgtcgaccgaggactgctgttttttgccgaaaacggggatcggttcataagtctcaatatagaggacggaaagctcatggtgcgctacaaattaaacagtgagttacccaaggaacgcggtgtcggagatgccatcaacaacggacgggaccacagcatccagatcaagattgggaaactccagaagcgaatgtggatcaatgtggatgtgcagaataccataattgacggcgaggtgttcgatttcagcacctattatttggggggaattccaatcgctatcagagagagatttaacatctcaactcctgcctttcggggttgcatgaaaaacctcaagaagacgtcgggcgtagtgagactcaatgacaccgttggcgtcacaaaaaagtgcagtgaagactggaaactggtcaggtctgcctcatttagtagagggggtcagctcagcttcacagacctgggtttacctccaacagatcacttgcaggcctctttcggttttcagacctttcaaccctctgggatactgttggaccaccagacctggaccagaaacctgcaagtgactcttgaagacggctacatcgaactgagcacatctgacagtggcagccctattttcaaatctcctcaaacctacatggacggactgctgcattatgtctctgtgatcagtgacaactccggtctgaggttgctgattgatgatcagctgttgcgtaattcgaagcgcctgaagcacatttcaagtagtcgacagtccttgcgactgggtggcagcaactttgaggggtgcattagcaatgtatttgtccagcggctctccctgagtccggaggtgttggacctcacttctaattccctgaagcgagatgtgtctcttggcggatgctctctgaataaaccgccattcctgatgttgctgaaaggttccacacgatttaacaagaccaaaactttcagaattaaccaactgctgcaagacacaccagtggccagtcccaggagcgtgaaagtctggcaggatgcctgctctccactgccgaaaactcaggctaaccatggcgctctgcagtttggggacattccaacatcccatctcctattcaagctgcctcaggaactcttaaaaccacggtctcagttcgccgtcgacatgcaaaccacaagctcccgcggtctggtattccacaccggcaccaagaatagcttcatggcactgtatcttagcaaaggcagattggtatttgctctcgggacggatggcaagaagctgcgaatcaagagtaaggagaaatgtaatgacggcaagtggcataccgtggtgtttgggcacgatggcgaaaagggcagactagtggttgatgggctgcgcgcacgcgagggcagtctgccaggtaattctaccataagcattagggcccctgtgtatctgggctccccacccagcgggaaacctaaatccctacccaccaattccttcgtgggctgccttaagaacttccagctcgactccaagcccctttacacacctagctccagtttcggggtttcgagctgcctggggggtcccctggagaagggtatctacttctccgaggaagggggacacgtggtcttagcacactcagtcctcttaggacctgagttcaagcttgtcttttctatccggccacggtccctcaccggtatcctgatccacatcggctcccagcctggcaaacatctgtgtgtgtatttagaggcgggtaaggtgactgcctctatggatagcggcgctggtggcacaagcacgagcgtgaccccaaagcaaagtctgtgcgatggtcaatggcacagcgtggctgtcaccattaaacagcatattttgcacctggagctcgataccgacagcagctacacagctgggcagattcctttccctcctgctagcacacaagaaccgctacacctggggggagccccagctaatttgaccactctgcggatcccggtgtggaagagcttctttggttgcctccggaacattcacgttaatcacatccccgtgccagtcacagaagctctggaggttcaagggcctgtgtcattgaacggatgtccggaccagta

SEQ ID NO: 259075 - DNA, 10002 bp, Artificial Sequence
  derived and/or modified sequence
atggccgccgccgccagacccagaggcagagccctgggccccgtgctgccccccacccccctgctgctgctggtgctgagagtgctgcccgcctgcggcgccaccgccagagaccccggcgccgccgccggcctgagcctgcaccccacctacttcaacctggccgaggccgccagaatctgggccaccgccacctgcggcgagagaggccccggcgagggcagaccccagcccgagctgtactgcaagctggtgggcggccccaccgcccccggcagcggccacaccatccagggccagttctgcgactactgcaacagcgaggaccccagaaaggcccaccccgtgaccaacgccatcgacggcagcgagagatggtggcagagcccccccctgagcagcggcacccagtacaacagagtgaacctgaccctggacctgggccagctgttccacgtggcctacatcctgatcaagttcgccaacagccccagacccgacctgtgggtgctggagagaagcgtggacttcggcagcacctacagcccctggcagtacttcgcccacagcaaggtggactgcctgaaggagttcggcagagaggccaacatggccgtgaccagagacgacgacgtgctgtgcgtgaccgagtacagcagaatcgtgcccctggagaacggcgaggtggtggtgagcctgatcaacggcagacccggcgccaagaacttcaccttcagccacaccctgagagagttcaccaaggccaccaacatcagactgagattcctgagaaccaacaccctgctgggccacctgatcagcaaggcccagagagaccccaccgtgaccagaagatactactacagcatcaaggacatcagcatcggcggccagtgcgtgtgcaacggccacgccgaggtgtgcaacatcaacaaccccgagaagctgttcagatgcgagtgccagcaccacacctgcggcgagacctgcgacagatgctgcaccggctacaaccagagaagatggagacccgccgcctgggagcagagccacgagtgcgaggcctgcaactgccacggccacgccagcaactgctactacgaccccgacgtggagagacagcaggccagcctgaacacccagggcatctacgccggcggcggcgtgtgcatcaactgccagcacaacaccgccggcgtgaactgcgagcagtgcgccaagggctactacagaccctacggcgtgcccgtggacgcccccgacggctgcatcccctgcagctgcgaccccgagcacgccgacggctgcgagcagggcagcggcagatgccactgcaagcccaacttccacggcgacaactgcgagaagtgcgccatcggctactacaacttccccttctgcctgagaatccccatcttccccgtgagcacccccagcagcgaggaccccgtggccggcgacatcaagggctgcgactgcaacctggagggcgtgctgcccgagatctgcgacgcccacggcagatgcctgtgcagacccggcgtggagggccccagatgcgacacctgcagaagcggcttctacagcttccccatctgccaggcctgctggtgcagcgccctgggcagctaccagatgccctgcagcagcgtgaccggccagtgcgagtgcagacccggcgtgaccggccagagatgcgacagatgcctgagcggcgcctacgacttcccccactgccagggcagcagcagcgcctgcgaccccgccggcaccatcaacagcaacctgggctactgccagtgcaagctgcacgtggagggccccacctgcagcagatgcaagctgctgtactggaacctggacaaggagaaccccagcggctgcagcgagtgcaagtgccacaaggccggcaccgtgagcggcaccggcgagtgcagacagggcgacggcgactgccactgcaagagccacgtgggcggcgacagctgcgacacctgcgaggacggctacttcgccctggagaagagcaactacttcggctgccagggctgccagtgcgacatcggcggcgccctgagcagcatgtgcagcggccccagcggcgtgtgccagtgcagagagcacgtggtgggcaaggtgtgccagagacccgagaacaactactacttccccgacctgcaccacatgaagtacgagatcgaggacggcagcacccccaacggcagagacctgagattcggcttcgaccccctggccttccccgagttcagctggagaggctacgcccagatgaccagcgtgcagaacgacgtgagaatcaccctgaacgtgggcaagagcagcggcagcctgttcagagtgatcctgagatacgtgaaccccggcaccgaggccgtgagcggccacatcaccatctaccccagctggggcgccgcccagagcaaggagatcatcttcctgcccagcaaggagcccgccttcgtgaccgtgcccggcaacggcttcgccgaccccttcagcatcacccccggcatctgggtggcctgcatcaaggccgagggcgtgctgctggactacctggtgctgctgcccagagactactacgaggccagcgtgctgcagctgcccgtgaccgagccctgcgcctacgccggccccccccaggagaactgcctgctgtaccagcacctgcccgtgaccagattcccctgcaccctggcctgcgaggccagacacttcctgctggacggcgagcccagacccgtggccgtgagacagcccacccccgcccaccccgtgatggtggacctgagcggcagagaggtggagctgcacctgagactgagaatcccccaggtgggccactacgtggtggtggtggagtacagcaccgaggccgcccagctgttcgtggtggacgtgaacgtgaagagcagcggcagcgtgctggccggccaggtgaacatctacagctgcaactacagcgtgctgtgcagaagcgccgtgatcgaccacatgagcagaatcgccatgtacgagctgctggccgacgccgacatccagctgaagggccacatggccagattcctgctgcaccaggtgtgcatcatccccatcgaggagttcagcgccgagtacgtgagaccccaggtgcactgcatcgccagctacggcagattcgtgaaccagagcgccacctgcgtgagcctggcccacgagaccccccccaccgccctgatcctggacgtgctgagcggcagacccttcccccacctgccccagcagagcagccccagcgtggacgtgctgcccggcgtgaccctgaaggccccccagaaccaggtgaccctgagaggcagagtgccccacctgggcagatacgtgttcgtgatccacttctaccaggccgcccaccccaccttccccgcccaggtgagcgtggacggcggctggcccagagccggcagcttccacgccagcttctgcccccacgtgctgggctgcagagaccaggtgatcgccgagggccagatcgagttcgacatcagcgagcccgaggtggccgccaccgtgaaggtgcccgagggcaagagcctggtgctggtgagagtgctggtggtgcccgccgagaactacgactaccagatcctgcacaagaagagcatggacaagagcctggagttcatcaccaactgcggcaagaacagcttctacctggacccccagaccgccagcagattctgcaagaacagcgccagaagcctggtggccttctaccacaagggcgccctgccctgcgagtgccaccccaccggcgccaccggcccccactgcagccccgagggcggccagtgcccctgccagcccaacgtgatcggcagacagtgcaccagatgcgccaccggccactacggcttccccagatgcaagccctgcagctgcggcagaagactgtgcgaggagatgaccggccagtgcagatgcccccccagaaccgtgagaccccagtgcgaggtgtgcgagacccacagcttcagcttccaccccatggccggctgcgagggctgcaactgcagcagaagaggcaccatcgaggccgccatgcccgagtgcgacagagacagcggccagtgcagatgcaagcccagaatcaccggcagacagtgcgacagatgcgccagcggcttctacagattccccgagtgcgtgccctgcaactgcaacagagacggcaccgagcccggcgtgtgcgaccccggcaccggcgcctgcctgtgcaaggagaacgtggagggcaccgagtgcaacgtgtgcagagagggcagcttccacctggaccccgccaacctgaagggctgcaccagctgcttctgcttcggcgtgaacaaccagtgccacagcagccacaagagaagaaccaagttcgtggacatgctgggctggcacctggagaccgccgacagagtggacatccccgtgagcttcaaccccggcagcaacagcatggtggccgacctgcaggagctgcccgccaccatccacagcgccagctgggtggcccccaccagctacctgggcgacaaggtgagcagctacggcggctacctgacctaccaggccaagagcttcggcctgcccggcgacatggtgctgctggagaagaagcccgacgtgcagctgaccggccagcacatgagcatcatctacgaggagaccaacacccccagacccgacagactgcaccacggcagagtgcacgtggtggagggcaacttcagacacgccagcagcagagcccccgtgagcagagaggagctgatgaccgtgctgagcagactggccgacgtgagaatccagggcctgtacttcaccgagacccagagactgaccctgagcgaggtgggcctggaggaggccagcgacaccggcagcggcagaatcgccctggccgtggagatctgcgcctgcccccccgcctacgccggcgacagctgccagggctgcagccccggctactacagagaccacaagggcctgtacaccggcagatgcgtgccctgcaactgcaacggccacagcaaccagtgccaggacggcagcggcatctgcgtgaactgccagcacaacaccgccggcgagcactgcgagagatgccaggagggctactacggcaacgccgtgcacggcagctgcagagcctgcccctgcccccacaccaacagcttcgccaccggctgcgtggtgaacggcggcgacgtgagatgcagctgcaaggccggctacaccggcacccagtgcgagagatgcgcccccggctacttcggcaacccccagaagttcggcggcagctgccagccctgcagctgcaacagcaacggccagctgggcagctgccaccccctgaccggcgactgcatcaaccaggagcccaaggacagcagccccgccgaggagtgcgacgactgcgacagctgcgtgatgaccctgctgaacgacctggccaccatgggcgagcagctgagactggtgaagagccagctgcagggcctgagcgccagcgccggcctgctggagcagatgagacacatggagacccaggccaaggacctgagaaaccagctgctgaactacagaagcgccatcagcaaccacggcagcaagatcgagggcctggagagagagctgaccgacctgaaccaggagttcgagaccctgcaggagaaggcccaggtgaacagcagaaaggcccagaccctgaacaacaacgtgaacagagccacccagagcgccaaggagctggacgtgaagatcaagaacgtgatcagaaacgtgcacatcctgctgaagcagatcagcggcaccgacggcgagggcaacaacgtgcccagcggcgacttcagcagagagtgggccgaggcccagagaatgatgagagagctgagaaacagaaacttcggcaagcacctgagagaggccgaggccgacaagagagagagccagctgctgctgaacagaatcagaacctggcagaagacccaccagggcgagaacaacggcctggccaacagcatcagagacagcctgaacgagtacgaggccaagctgagcgacctgagagccagactgcaggaggccgccgcccaggccaagcaggccaacggcctgaaccaggagaacgagagagccctgggcgccatccagagacaggtgaaggagatcaacagcctgcagagcgacttcaccaagtacctgaccaccgccgacagcagcctgctgcagaccaacatcgccctgcagctgatggagaagagccagaaggagtacgagaagctggccgccagcctgaacgaggccagacaggagctgagcgacaaggtgagagagctgagcagaagcgccggcaagaccagcctggtggaggaggccgagaagcacgccagaagcctgcaggagctggccaagcagctggaggagatcaagagaaacgccagcggcgacgagctggtgagatgcgccgtggacgccgccaccgcctacgagaacatcctgaacgccatcaaggccgccgaggacgccgccaacagagccgccagcgccagcgagagcgccctgcagaccgtgatcaaggaggacctgcccagaaaggccaagaccctgagcagcaacagcgacaagctgctgaacgaggccaagatgacccagaagaagctgaagcaggaggtgagccccgccctgaacaacctgcagcagaccctgaacatcgtgaccgtgcagaaggaggtgatcgacaccaacctgaccaccctgagagacggcctgcacggcatccagagaggcgacatcgacgccatgatcagcagcgccaagagcatggtgagaaaggccaacgacatcaccgacgaggtgctggacggcctgaaccccatccagaccgacgtggagagaatcaaggacacctacggcagaacccagaacgaggacttcaagaaggccctgaccgacgccgacaacagcgtgaacaagctgaccaacaagctgcccgacctgtggagaaagatcgagagcatcaaccagcagctgctgcccctgggcaacatcagcgacaacatggacagaatcagagagctgatccagcaggccagagacgccgccagcaaggtggccgtgcccatgagattcaacggcaagagcggcgtggaggtgagactgcccaacgacctggaggacctgaagggctacaccagcctgagcctgttcctgcagagacccaacagcagagagaacggcggcaccgagaacatgttcgtgatgtacctgggcaacaaggacgccagcagagactacatcggcatggccgtggtggacggccagctgacctgcgtgtacaacctgggcgacagagaggccgagctgcaggtggaccagatcctgaccaagagcgagaccaaggaggccgtgatggacagagtgaagttccagagaatctaccagttcgccagactgaactacaccaagggcgccaccagcagcaagcccgagacccccggcgtgtacgacatggacggcagaaacagcaacaccctgctgaacctggaccccgagaacgtggtgttctacgtgggcggctacccccccgacttcaagctgcccagcagactgagcttccccccctacaagggctgcatcgagctggacgacctgaacgagaacgtgctgagcctgtacaacttcaagaagaccttcaacctgaacaccaccgaggtggagccctgcagaagaagaaaggaggagagcgacaagaactacttcgagggcaccggctacgccagagtgcccacccagccccacgcccccatccccaccttcggccagaccatccagaccaccgtggacagaggcctgctgttcttcgccgagaacggcgacagattcatcagcctgaacatcgaggacggcaagctgatggtgagatacaagctgaacagcgagctgcccaaggagagaggcgtgggcgacgccatcaacaacggcagagaccacagcatccagatcaagatcggcaagctgcagaagagaatgtggatcaacgtggacgtgcagaacaccatcatcgacggcgaggtgttcgacttcagcacctactacctgggcggcatccccatcgccatcagagagagattcaacatcagcacccccgccttcagaggctgcatgaagaacctgaagaagaccagcggcgtggtgagactgaacgacaccgtgggcgtgaccaagaagtgcagcgaggactggaagctggtgagaagcgccagcttcagcagaggcggccagctgagcttcaccgacctgggcctgccccccaccgaccacctgcaggccagcttcggcttccagaccttccagcccagcggcatcctgctggaccaccagacctggaccagaaacctgcaggtgaccctggaggacggctacatcgagctgagcaccagcgacagcggcagccccatcttcaagagcccccagacctacatggacggcctgctgcactacgtgagcgtgatcagcgacaacagcggcctgagactgctgatcgacgaccagctgctgagaaacagcaagagactgaagcacatcagcagcagcagacagagcctgagactgggcggcagcaacttcgagggctgcatcagcaacgtgttcgtgcagagactgagcctgagccccgaggtgctggacctgaccagcaacagcctgaagagagacgtgagcctgggcggctgcagcctgaacaagccccccttcctgatgctgctgaagggcagcaccagattcaacaagaccaagaccttcagaatcaaccagctgctgcaggacacccccgtggccagccccagaagcgtgaaggtgtggcaggacgcctgcagccccctgcccaagacccaggccaaccacggcgccctgcagttcggcgacatccccaccagccacctgctgttcaagctgccccaggagctgctgaagcccagaagccagttcgccgtggacatgcagaccaccagcagcagaggcctggtgttccacaccggcaccaagaacagcttcatggccctgtacctgagcaagggcagactggtgttcgccctgggcaccgacggcaagaagctgagaatcaagagcaaggagaagtgcaacgacggcaagtggcacaccgtggtgttcggccacgacggcgagaagggcagactggtggtggacggcctgagagccagagagggcagcctgcccggcaacagcaccatcagcatcagagcccccgtgtacctgggcagcccccccagcggcaagcccaagagcctgcccaccaacagcttcgtgggctgcctgaagaacttccagctggacagcaagcccctgtacacccccagcagcagcttcggcgtgagcagctgcctgggcggccccctggagaagggcatctacttcagcgaggagggcggccacgtggtgctggcccacagcgtgctgctgggccccgagttcaagctggtgttcagcatcagacccagaagcctgaccggcatcctgatccacatcggcagccagcccggcaagcacctgtgcgtgtacctggaggccggcaaggtgaccgccagcatggacagcggcgccggcggcaccagcaccagcgtgacccccaagcagagcctgtgcgacggccagtggcacagcgtggccgtgaccatcaagcagcacatcctgcacctggagctggacaccgacagcagctacaccgccggccagatccccttcccccccgccagcacccaggagcccctgcacctgggcggcgcccccgccaacctgaccaccctgagaatccccgtgtggaagagcttcttcggctgcctgagaaacatccacgtgaaccacatccccgtgcccgtgaccgaggccctggaggtgcagggccccgtgagcctgaacggctgccccgaccagtag

SEQ ID NO: 259076 - protein, 914 aa, Artificial Sequence
  derived and/or modified sequence
MEAAVKEEISLEDEAVDKNIFRDCNKIAFYRRQKQWLSKKSTYQALLDSVTTDEDSTRFQIINEASKVPLLAEIYGIEGNIFRLKINEETPLKPRFEVPDVLTSKPSTVRLISCSGDTGSLILADGKGDLKCHITANPFKVDLVSEEEVVISINSLGQLYFEHLQILHKQRAAKENEEETSVDTSQENQEDLGLWEEKFGKFVDIKANGPSSIGLDFSLHGFEHLYGIPQHAESHQLKNTGDGDAYRLYNLDVYGYQIYDKMGIYGSVPYLLAHKLGRTIGIFWLNASETLVEINTEPAVEYTLTQMGPVAAKQKVRSRTHVHWMSESGIIDVFLLTGPTPSDVFKQYSHLTGTQAMPPLFSLGYHQCRWNYEDEQDVKAVDAGFDEHDIPYDAMWLDIEHTEGKRYFTWDKNRFPNPKRMQELLRSKKRKLVVISDPHIKIDPDYSVYVKAKDQGFFVKNQEGEDFEGVCWPGLSSYLDFTNPKVREWYSSLFAFPVYQGSTDILFLWNDMNEPSVFRGPEQTMQKNAIHHGNWEHRELHNIYGFYHQMATAEGLIKRSKGKERPFVLTRSFFAGSQKYGAVWTGDNTAEWSNLKISIPMLLTLSITGISFCGADIGGFIGNPETELLVRWYQAGAYQPFFRGHATMNTKRREPWLFGEEHTRLIREAIRERYGLLPYWYSLFYHAHVASQPVMRPLWVEFPDELKTFDMEDEYMLGSALLVHPVTEPKATTVDVFLPGSNEVWYDYKTFAHWEGGCTVKIPVALDTIPVFQRGGSVIPIKTTVGKSTGWMTESSYGLRVALSTKGSSVGELYLDDGHSFQYLHQKQFLHRKFSFCSSVLINSFADQRGHYPSKCVVEKILVLGFRKEPSSVTTHSSDGKDQPVAFTYCAKTSILSLEKLSLNIATDWEVRII

SEQ ID NO: 259077 - DNA, 2745 bp, Artificial Sequence
  derived and/or modified sequence
atggaggctgccgtgaaggaggagatctccctggaagatgaggcagtggataaaaacatctttcgggattgcaataagattgctttctaccgtcggcagaagcagtggctgtctaagaagagcacctatcaagcactgctcgattcagtaacaacagatgaggacagtactagatttcagatcatcaatgaggcctcaaaggtgcccctgctcgcagaaatttacgggatcgagggaaatatattcaggctcaagatcaatgaggagactcctcttaagcctcgtttcgaggtacccgatgtgctcacttccaaaccatctactgtgcgacttatctcttgttccggagacaccggctccctaatcctcgccgatgggaagggggacttgaagtgccatataacagcaaaccccttcaaagtggacctcgtgtccgaggaagaggttgtgatatctattaattccctgggccagctgtactttgagcatttacagatcttacacaagcaaagagcggcaaaagagaacgaggaggagaccagcgttgacacatcgcaggagaaccaggaagatctcggattgtgggaagaaaaattcggtaagttcgttgatatcaaagccaacggcccgagttccatcgggctcgatttctcattacatggctttgagcacttgtatgggataccacagcatgctgaaagccaccagttaaagaataccggcgatggcgacgcatataggctgtacaatttggacgtttacggctatcagatttacgataaaatggggatctacggaagtgtaccttacctgttagcacacaagctgggcaggacaatcggaattttctggctgaacgcatctgagacattggtagagattaatactgaacccgctgtagaatacacacttacgcagatgggtcccgttgccgcaaagcagaaggtgaggagtcggacgcatgtgcactggatgtctgaaagcgggatcattgatgtatttcttctgaccggacccaccccatccgatgttttcaagcagtatagccacctgaccggcacccaggccatgccacctctgttcagcctgggataccaccagtgccggtggaactacgaagatgaacaagacgtgaaggccgtagacgcaggattcgatgaacacgacataccctacgatgccatgtggctggacatcgagcacactgagggcaagcgctacttcacctgggataagaacagatttcctaatccgaaacgcatgcaggaattgctgcggtctaagaaacggaagcttgtggtgatatctgatccccatataaaaattgatccagactatagcgtatatgtaaaggcgaaggaccaggggtttttcgttaagaaccaagaaggcgaggatttcgagggcgtttgttggccgggactatcctcatatctggattttaccaatcctaaggtacgcgaatggtattcttctcttttcgcattccctgtgtatcagggatctaccgacattctgttcctgtggaatgacatgaatgagcccagcgtcttcaggggccccgaacaaaccatgcaaaaaaatgctattcaccacgggaactgggagcacagagagctgcataatatctatggcttttaccatcagatggctaccgctgaggggctgatcaagcgaagcaaaggaaaagaacgcccatttgtactcacgcggagcttcttcgccggctcccagaaatatggggcagtatggaccggcgataacactgccgagtggagtaacttgaagatctctatacccatgcttctcacactgtctatcacaggaatcagtttctgtggggccgatatcggcgggtttattggcaatcccgagaccgaactgctcgtaaggtggtatcaggcaggagcatatcagccattctttcggggacatgccacaatgaacactaagcggagagagccgtggctgtttggcgaagagcacactaggcttatacgggaagccattcgcgagaggtatggtctgctgccttattggtacagcttgttttaccacgctcatgttgcttctcaacccgtaatgagacccctttgggtggaatttcccgacgagctgaaaactttcgacatggaggatgaatacatgctggggtccgcattgttagtccaccccgtgactgaaccaaaggccaccacagtagacgtctttctgccaggctctaacgaagtgtggtacgattataaaaccttcgctcactgggaaggagggtgcacggtcaagattcctgtcgccctggacactatcccagtgttccagagaggaggcagcgtcatacctatcaagacgaccgtcgggaaatcaacaggctggatgaccgagtcttcttatggacttagagtcgcactgagcacgaagggttcttcagtcggagaactttatctggacgatggccactctttccagtatctgcatcagaaacagttccttcaccgcaaattttcattctgctccagcgtgttaataaacagctttgccgaccagcggggacactatccttccaagtgcgtggtggagaagattctggtactggggtttagaaaagaaccttcctctgtgactactcactcgagcgacggaaaagaccagccagtggcatttacgtattgcgctaaaacctccattctatctctcgagaaattgagcctgaatatcgccaccgattgggaagtgcgtattatttag

SEQ ID NO: 259078 - DNA, 4512 bp, Artificial Sequence
  derived and/or modified sequence
ataatcaagacaaatttgccaaataaatcattgtagaaacgctagtttgggcctgaaaaattccaggagcaagagtcaagatttgtcactccatgagaatctggaggggactcccttcccagaaacttgacgatgaagtactggttgtaattttagaaagacacccaatcggcttttttaaaagatcgcccagggcccttgtcctgagagctgggagctggtcggagtgacagagaagccatggaagcagcagtgaaagaggaaataagtcttgaagatgaagctgtagataaaaacattttcagagactgtaacaagatcgcattttacaggcgtcagaaacagtggctttccaagaagtccacctatcaggcattattggattcagtcacaacagatgaagacagcaccaggttccaaatcatcaatgaagcaagtaaggttcctctcctggctgaaatttatggtatagaaggaaacattttcaggcttaaaattaatgaagagactcctctaaaacccagatttgaagttccggatgtcctcacaagcaagccaagcactgtaaggctgatttcatgctctggggacacaggcagtctgatattggcagatggaaaaggagacctgaagtgccatatcacagcaaacccattcaaggtagacttggtgtctgaagaagaggttgtgattagcataaattccctgggccaattatactttgagcatctacagattcttcacaaacaaagagctgctaaagaaaatgaggaggagacatcagtggacacctctcaggaaaatcaagaagatctgggcctgtgggaagagaaatttggaaaatttgtggatatcaaagctaatggcccttcttctattggtttggatttctccttgcatggatttgagcatctttatgggatcccacaacatgcagaatcacaccaacttaaaaatactggtgatggagatgcttaccgtctttataacctggatgtctatggataccaaatatatgataaaatgggcatttatggttcagtaccttatctcctggcccacaaactgggcagaactataggtattttctggctgaatgcctcggaaacactggtggagatcaatacagagcctgcagtagagtacacactgacccagatgggcccagttgctgctaaacaaaaggtcagatctcgcactcatgtgcactggatgtcagagagtggcatcattgatgtttttctgctgacaggacctacaccttctgatgtcttcaaacagtactcacaccttacaggcacacaagccatgccccctcttttctctttgggataccaccagtgccgctggaactatgaagatgagcaggatgtaaaagcagtggatgcagggtttgatgagcatgacattccttatgatgccatgtggctggacatagagcacactgagggcaagaggtacttcacctgggacaaaaacagattcccaaaccccaagaggatgcaagagctgctcaggagcaaaaagcgtaagcttgtggtcatcagtgatccccacatcaagattgatcctgactactcagtatatgtgaaggccaaagatcagggcttctttgtgaagaatcaggaaggggaagactttgaaggggtgtgttggccaggtctctcctcttacctggatttcaccaatcccaaggtcagagagtggtattcaagtctttttgctttccctgtttatcagggatctacggacatcctcttcctttggaatgacatgaatgagccttctgtctttagagggccagagcaaaccatgcagaagaatgccattcatcatggcaattgggagcacagagagctccacaacatctacggtttttatcatcaaatggctactgcagaaggactgataaaacgatctaaagggaaggagagaccctttgttcttacacgttctttctttgctggatcacaaaagtatggtgccgtgtggacaggcgacaacacagcagaatggagcaacttgaaaatttctatcccaatgttactcactctcagcattactgggatctctttttgcggagctgacataggcgggttcattgggaatccagagacagagctgctagtgcgttggtaccaggctggagcctaccagcccttcttccgtggccatgccaccatgaacaccaagcgacgagagccctggctctttggggaggaacacacccgactcatccgagaagccatcagagagcgctatggcctcctgccatattggtattctctgttctaccatgcacacgtggcttcccaacctgtcatgaggcctctgtgggtagagttccctgatgaactaaagacttttgatatggaagatgaatacatgctggggagtgcattattggttcatccagtcacagaaccaaaagccaccacagttgatgtgtttcttccaggatcaaatgaggtctggtatgactataagacatttgctcattgggaaggagggtgtactgtaaagatcccagtagccttggacactattccagtgtttcagcgaggtggaagtgtgataccaataaagacaactgtaggaaaatccacaggctggatgactgaatcctcctatggactccgggttgctctaagcactaagggttcttcagtgggtgagttatatcttgatgatggccattcattccaatacctccaccagaagcaatttttgcacaggaagttttcattctgttccagtgttctgatcaatagttttgctgaccagaggggtcattatcccagcaagtgtgtggtggagaagatcttggtcttaggcttcaggaaggagccatcttctgtgactacccactcatctgatggtaaagatcagcctgtggcttttacgtattgtgccaaaacatccatcctgagcctggagaagctctcactcaacattgccactgactgggaggtccgcatcatatgacaaagaactgcccctggtgatgtgagcagggacctgcctgcccctttcaacctttcccctcaccttttttgagatttttgctgcaatctgtttgccttccctgaatcaaaataatctttcattcgtcaccattatactaatgaacaatagatttcatgtttcaaaatttcagattttacatgttaagatgtactaacaatattccttgtatcaaacatctccttttctccctgatacatagccctgagacatttatagcgttcaggagtcttctattgcttccattccttcagcagggctgcgtgggtctgttttaacgtgggccaagcctacctgggcagcccatttgccagggcttgcctcaggccatgcagcattggcgctctggctgcagcagctgagttgctcaaggccagtgtccaagtggacagcagcctctggtactccccccagttatcttccacccacatggactgggcagagcagccctcttctgtgtgcactgcatacgctgcagccgtgggagttattctcccctagagatcgacttggcagcacgaaggattcttttctctttcatgcttctcaggctcaatagtttctaattaatcttaaaatccatgtcttttacattgtttttttaattaagtgctgtttactaaccaaataatatttataacatgagtaagctataattaataacaatgaaataaatacccatgtacccaccactggacttcagaagtagaactcatgactgggactaggatgaggcaagggagaccctggccttgggcacaaaatgtaagggatgccaaaaaaatacagtaatcaaagtaagtaatatttcaatccaatatttttaaaaatcagaattaatgcaaaaaaaaccatgatgaacaaaatattaaaatttaaaataaagacaggattagtattactgagttttccttttgtcccaggctctaatatggcttggcatggggcagaacattacaacataccagtcgtgtcatggtgcccaaggctccacagacctcagtggctccctgctgcctgccacagcatctgttttagcagcctcgactcctcagcactcctcagcacacacctcttcttatcaggcttcctccacttagcaacttgctaacggccacctctgtgccttctgatccctgggcgccaatatcctcctgcccttaccatccttccaggcccaacttaaatcccactttcccatgaagcctaactgcgtgaacacccctacccccatacccattagcagtgattttgcccttccccgtaatgctgtcccacttataactgtgctctacttagcattctcagggatcataccttaatgttttcagtatgtctgcgttctcctactagattgtatgtccctcaagagcatgttctgtttctcttctgtctgacagagcactattatacctgactttcagtaactgttagctgtgattagttagctggtggatttaattgattaaaaaattacgattgaatgta

SEQ ID NO: 259079 - DNA, 2745 bp, Artificial Sequence
  derived and/or modified sequence
atggaggccgctgtgaaggaggagatcagcctggaggatgaagctgtggacaagaacatcttccgggactgcaacaagatcgccttctaccgccggcagaagcagtggctgagcaagaagagcacctaccaggccctgctggacagcgtgaccacagatgaggacagcacccgcttccagatcatcaatgaggccagcaaggtgcccctgctggccgagatctatggaattgagggcaacatcttccggctgaagatcaatgaggagacccccctgaagcccaggtttgaggtgcctgatgtgctgaccagcaagcccagcacagtgcggctcatcagctgcagcggggacaccggcagcctcatcctggctgatggaaaaggagacctgaagtgccacatcacagccaaccccttcaaggtggacctggtgtctgaggaggaggtggtgatcagcatcaacagcctgggccagctgtactttgagcacctgcagatcctgcacaagcagagagctgccaaggaaaatgaggaggagacctctgtggacaccagccaggagaaccaggaggacctgggcctgtgggaggagaagtttgggaagtttgtggacatcaaggccaacggccccagcagcatcggcctggacttcagcctgcacggctttgagcacctgtatggcatcccccagcacgccgagagccaccagctgaagaacacaggagatggagatgcctaccgcctgtacaacctggatgtgtatggctaccagatctatgacaagatgggcatctacggctctgtgccctacctgctggcccacaagctgggccgcaccatcggcatcttctggctgaatgccagcgagaccctggtggagatcaacacagagcctgctgtggagtacaccctgacccagatgggccctgtggccgccaagcagaaggtgcgcagcaggacccacgtgcactggatgtctgagagcggcatcattgatgtgttcctgctgaccggccccacccccagtgatgtgttcaagcagtacagccacctgaccggcacccaggccatgccacccctcttcagcctgggctaccaccagtgccgctggaactatgaagatgagcaggatgtgaaggctgtggatgctggctttgatgaacatgacatcccctatgatgccatgtggctggacatcgagcacacagagggcaagcgctacttcacctgggacaagaaccgcttccccaaccccaagaggatgcaggagctgctgcggagcaagaagaggaagctggtggtgatcagtgacccccacatcaagattgatcctgactacagcgtgtatgtgaaggccaaggaccagggcttctttgtgaagaaccaggagggagaagattttgaaggagtgtgctggccaggcctgagcagctacctggacttcaccaaccccaaggtgcgggagtggtacagcagcctgtttgccttccctgtgtaccagggcagcacagacatcctcttcctgtggaatgacatgaatgagcccagcgtcttccggggccctgagcagaccatgcagaagaatgccatccaccacggcaactgggagcaccgggagctgcacaacatctacggcttctaccaccagatggccacagctgagggcctcatcaagaggagcaagggcaaggagcggccctttgtgctgaccaggagcttctttgctggcagccagaagtacggggctgtgtggacaggagacaacacagctgagtggagcaacctgaagatcagcatccccatgctgctgaccctgagcatcaccggcatctccttctgtggggctgacattggaggcttcatcggcaaccctgagacagagctgctggtgcgctggtaccaggccggggcctaccagcccttcttccggggccacgccaccatgaacaccaagaggcgggagccctggctgtttggagaggagcacaccaggctcatccgggaggccatccgggagagatatggcctgctgccctactggtacagcctcttctaccacgcccacgtggccagccagcctgtgatgaggcccctgtgggtggagttcccagatgagctgaagacctttgacatggaggatgagtacatgctgggcagcgccctgctggtgcaccctgtgacagagcccaaggccaccaccgtggatgtgttcctgcccggcagcaatgaggtgtggtatgactacaagacctttgcccactgggagggcggctgcaccgtgaagatccctgtggccctggacaccatccctgtgttccagagaggaggcagcgtcatccccatcaagaccaccgtgggcaagagcacaggctggatgacagagagcagctatggcctgcgggtggccctgagcaccaagggcagctctgtgggggagctgtacctggatgatggccacagcttccagtacctgcaccagaagcagttcctgcacaggaagttctccttctgcagctctgtgctgatcaacagctttgctgaccagaggggccactaccccagcaaatgtgtggtggagaagatcctggtgctgggcttcaggaaggagcccagctctgtgaccacccacagcagtgatggcaaggaccagcctgtggccttcacctactgtgccaagaccagcatcctgagcctggagaagctgagcctgaacatcgccacagactgggaggtgcgcatcatctag

SEQ ID NO: 259080 - DNA, 2745 bp, Artificial Sequence
  derived and/or modified sequence
atggaggccgccgtgaaggaggagatcagcctggaggacgaggccgtggataaaaatatcttcagagactgtaacaagatcgcattctacagaaggcaaaagcaatggctctcgaaaaaatccacataccaagccttgctggactccgtgactacagacgaagacagcacacgcttccaaataataaatgaagcaagtaaagtgccattactggccgagatatatggcatagagggaaacatttttcgactcaaaatcaatgaggaaaccccactgaaaccacggttcgaggttcctgacgtattgacttcgaagcctagtacggttaggctgatatcctgcagcggagacacaggatcactgattctggcagatgggaagggtgacttgaagtgtcatatcacagccaaccctttcaaagtggacttagtgtccgaagaggaggttgtcatttctatcaactctctgggccagctgtacttcgaacatttacaaatcctacataagcagagggctgccaaggagaatgaggaagagacaagcgtggatacaagccaggaaaatcaggaggatctgggcttgtgggaggagaagttcggaaagttcgtcgacattaaagctaacggtcctagctccatcggtctggatttctcactccacggattcgagcatttgtacggcatacctcagcacgccgaatctcaccagctcaaaaacacaggggatggagacgcgtatcgcctgtacaacctggatgtgtacggttaccagatatatgacaaaatgggcatctacggctccgttccgtatctcctggcacacaaactgggtcgaacgattggcattttctggctcaacgcttcagaaaccttggtggaaattaatactgagccagcggtggagtatactctgacccagatgggcccagttgcggcaaaacagaaagttcgcagccgcacccatgtccactggatgtcagagagcggaattattgatgtcttcctgttaactggacccactccctctgacgtcttcaagcagtacagccatcttactggcacacaggccatgccgccactcttttccctgggttatcatcaatgcaggtggaattatgaggacgagcaggacgtaaaagctgttgacgccggtttcgacgagcatgatataccttatgacgccatgtggctggacatcgagcatacagagggcaaacgatactttacttgggacaaaaatcgattcccgaaccctaaacgaatgcaggaacttctgcggagtaaaaagcgaaaactggtggtaatcagtgacccacacatcaagattgaccccgattacagcgtatacgtgaaagccaaggaccaggggttctttgtgaaaaaccaggagggggaagatttcgaaggagtttgttggcctgggctaagttcctatctggacttcacaaaccccaaggtgcgtgaatggtattcctctctgtttgccttcccagtatatcaagggtctactgacatactgtttctgtggaacgatatgaatgaaccgtctgtctttagagggccggagcagacaatgcagaaaaatgcaatccaccacggcaattgggagcacagggagctacataacatttacggattttaccatcagatggccactgccgaagggctcattaagcgctctaagggtaaagaaagacccttcgtgctgactagatccttcttcgctggctcacagaaatatggcgccgtgtggaccggcgataataccgctgaatggagcaatctgaagatttcaatacctatgcttctgactctgtccatcacaggaatatcattttgcggcgcagacattggcggatttatcggaaacccggaaaccgagcttctcgtgcgctggtatcaggccggggcctaccaaccattttttagaggccacgccactatgaatactaagcggcgcgagccatggttattcggggaggagcatacgagactcatccgggaagcgatcagagaacggtacgggctactcccatattggtatagtttgttttatcatgcccacgttgcctcccagcccgtgatgcgccctctgtgggtcgaatttccggacgagcttaaaactttcgacatggaggacgagtacatgctaggcagcgccctattggttcatcccgtcaccgagcccaaagcaactacggtcgacgttttcttacctggctcaaacgaggtgtggtacgactacaaaactttcgcccactgggagggagggtgcaccgtgaagatccctgtggctctggatactatcccagtgtttcagcggggcggaagtgtgatccctataaaaaccacggtcgggaagtccacagggtggatgactgagtccagttacggcctgcgcgtggctcttagcaccaaggggagctccgttggcgaactatatctagacgacgggcactccttccagtacttgcatcagaagcagttcctgcaccggaagttctctttctgctctagcgtgcttatcaacagtttcgccgatcagaggggtcactatccctccaagtgtgtggtggaaaagatactggtgctcggtttcaggaaggaaccaagttcagtcaccactcactcgagtgacggcaaggaccaacccgtcgcctttacctactgcgctaagacttcaattttatctcttgagaagctgagccttaatatcgcaaccgattgggaggtgagaatcatctag

SEQ ID NO: 259081 - DNA, 2745 bp, Artificial Sequence
  derived and/or modified sequence
atggaggcggctgtgaaggaggagatatctctagaggacgaagccgttgacaagaacatctttagagattgtaacaaaattgccttctaccggaggcagaaacagtggctttcaaagaagagtacatatcaggctctgctggattccgtcacgacagatgaagatagtactagattccagatcatcaacgaggcctctaaggtaccgctgctggctgagatttacgggatcgaagggaacatcttcagactgaaaatcaacgaagagacccctttaaagcctaggtttgaagtacctgacgtgctgacaagcaagccttcaacagtccgcttgatctcatgcagtggagataccggtagcctgattttagcagatggtaagggtgaccttaaatgtcacattactgccaacccttttaaggtggacctcgtgtcagaagaagaagtggtaatctccatcaacagcctcggacagttgtacttcgagcacctgcagattctgcacaagcaacgcgctgccaaagagaacgaagaggaaacttcagtagatactagccaggaaaaccaagaagacttggggctgtgggaggagaaattcggtaagttcgtggacataaaagctaacggtccttcttccattggactggacttttcactgcacggctttgaacacctgtacggcatcccacagcatgcagaatctcaccaattgaaaaatacaggtgacggcgacgcttacaggctctacaacttagacgtctatggatatcagatctacgataagatgggaatttacgggtcagtaccatatttgcttgcgcataagctgggcaggaccataggaattttttggctgaatgcaagcgagaccttggtggagatcaacaccgagcccgctgtcgaatacaccctgactcagatggggcctgtggcagctaagcagaaagttagaagccgtacacacgtccactggatgagcgagagcggaataattgatgtgttcctgcttacagggccaacaccctccgatgtcttcaaacagtattcacatttgactggaactcaggccatgcctcctctgttctctctgggctaccaccagtgccggtggaactatgaagacgaacaagacgtcaaagcagtggacgccggatttgatgaacacgatattccttacgacgccatgtggctcgacatagaacacaccgaggggaaacgctacttcacatgggacaaaaacaggttcccaaatcctaaacggatgcaggagttgttaaggagtaagaaacgcaagcttgtggtgatttcagacccacatatcaaaatcgatccagattatagtgtgtatgtcaaagctaaggatcagggctttttcgtgaagaaccaggagggagaggactttgagggtgtctgctggcccggattgtccagctatctggattttacaaacccaaaagtccgagagtggtacagctcgctgtttgccttccctgtgtaccagggctccaccgatattctgttcttgtggaacgatatgaacgagccatccgtgtttagggggcctgagcagacaatgcaaaagaacgcgatccaccacggaaattgggagcatcgcgaactgcacaatatctacgggttctaccatcaaatggccaccgccgagggtctaataaagaggtccaaaggtaaagagcgacccttcgttctcacgcgctccttcttcgcaggctcgcagaaatacggggcagtgtggaccggggataacacggcagagtggagcaacctgaagatctctatccccatgttgctgaccctgtctattaccggcatttctttctgcggcgctgatatcgggggtttcattggtaatccggagaccgaactcctcgttaggtggtaccaagctggagcgtaccaacctttttttcgaggccacgctaccatgaatacgaagcgcagagagccgtggcttttcggcgaggagcacacccgcctaatccgcgaagccatccgggaaagatatgggctgttgccttactggtactccctcttctaccatgcgcacgtggcttcacaacctgtcatgcgtcctctttgggtggagtttcccgacgagctgaaaaccttcgatatggaagacgagtacatgctgggctctgcattattagtgcaccctgttactgagcctaaggcaaccactgtggatgtatttctgccaggcagtaacgaggtctggtacgactataaaacatttgcccattgggaagggggatgcacagttaagattcccgtggcgctggataccatccctgtcttccagagaggaggtagcgtcatccctataaaaactactgtcgggaagagtactgggtggatgaccgagagttcctacggcctcagagtcgccctgtccacgaaggggtcatcagtgggggagctctacttggacgacggccattctttccagtaccttcaccaaaagcagttcttacatcgcaagttctccttctgttccagcgttctgatcaattcgtttgcagaccagcggggacactacccgagcaaatgtgtggtcgagaagatactggtgcttggcttcaggaaggaaccatccagcgttactacccacagctcagacggtaaagaccagcctgtagcgtttacctactgcgctaaaacctctatcttgtctttggaaaaactcagcttgaacatcgcaaccgactgggaggtgcgtataatttag

SEQ ID NO: 259082 - DNA, 2745 bp, Artificial Sequence
  derived and/or modified sequence
atggaggccgccgtgaaggaggagatcagcctggaggacgaggccgtggacaagaacatcttcagagactgcaacaagatcgccttctacagaagacagaagcagtggctgagcaagaagagcacctaccaggccctgctggacagcgtgaccaccgacgaggacagcaccagattccagatcatcaacgaggccagcaaggtgcccctgctggccgagatctacggcatcgagggcaacatcttcagactgaagatcaacgaggagacccccctgaagcccagattcgaggtgcccgacgtgctgaccagcaagcccagcaccgtgagactgatcagctgcagcggcgacaccggcagcctgatcctggccgacggcaagggcgacctgaagtgccacatcaccgccaaccccttcaaggtggacctggtgagcgaggaggaggtggtgatcagcatcaacagcctgggccagctgtacttcgagcacctgcagatcctgcacaagcagagagccgccaaggagaacgaggaggagaccagcgtggacaccagccaggagaaccaggaggacctgggcctgtgggaggagaagttcggcaagttcgtggacatcaaggccaacggccccagcagcatcggcctggacttcagcctgcacggcttcgagcacctgtacggcatcccccagcacgccgagagccaccagctgaagaacaccggcgacggcgacgcctacagactgtacaacctggacgtgtacggctaccagatctacgacaagatgggcatctacggcagcgtgccctacctgctggcccacaagctgggcagaaccatcggcatcttctggctgaacgccagcgagaccctggtggagatcaacaccgagcccgccgtggagtacaccctgacccagatgggccccgtggccgccaagcagaaggtgagaagcagaacccacgtgcactggatgagcgagagcggcatcatcgacgtgttcctgctgaccggccccacccccagcgacgtgttcaagcagtacagccacctgaccggcacccaggccatgccccccctgttcagcctgggctaccaccagtgcagatggaactacgaggacgagcaggacgtgaaggccgtggacgccggcttcgacgagcacgacatcccctacgacgccatgtggctggacatcgagcacaccgagggcaagagatacttcacctgggacaagaacagattccccaaccccaagagaatgcaggagctgctgagaagcaagaagagaaagctggtggtgatcagcgacccccacatcaagatcgaccccgactacagcgtgtacgtgaaggccaaggaccagggcttcttcgtgaagaaccaggagggcgaggacttcgagggcgtgtgctggcccggcctgagcagctacctggacttcaccaaccccaaggtgagagagtggtacagcagcctgttcgccttccccgtgtaccagggcagcaccgacatcctgttcctgtggaacgacatgaacgagcccagcgtgttcagaggccccgagcagaccatgcagaagaacgccatccaccacggcaactgggagcacagagagctgcacaacatctacggcttctaccaccagatggccaccgccgagggcctgatcaagagaagcaagggcaaggagagacccttcgtgctgaccagaagcttcttcgccggcagccagaagtacggcgccgtgtggaccggcgacaacaccgccgagtggagcaacctgaagatcagcatccccatgctgctgaccctgagcatcaccggcatcagcttctgcggcgccgacatcggcggcttcatcggcaaccccgagaccgagctgctggtgagatggtaccaggccggcgcctaccagcccttcttcagaggccacgccaccatgaacaccaagagaagagagccctggctgttcggcgaggagcacaccagactgatcagagaggccatcagagagagatacggcctgctgccctactggtacagcctgttctaccacgcccacgtggccagccagcccgtgatgagacccctgtgggtggagttccccgacgagctgaagaccttcgacatggaggacgagtacatgctgggcagcgccctgctggtgcaccccgtgaccgagcccaaggccaccaccgtggacgtgttcctgcccggcagcaacgaggtgtggtacgactacaagaccttcgcccactgggagggcggctgcaccgtgaagatccccgtggccctggacaccatccccgtgttccagagaggcggcagcgtgatccccatcaagaccaccgtgggcaagagcaccggctggatgaccgagagcagctacggcctgagagtggccctgagcaccaagggcagcagcgtgggcgagctgtacctggacgacggccacagcttccagtacctgcaccagaagcagttcctgcacagaaagttcagcttctgcagcagcgtgctgatcaacagcttcgccgaccagagaggccactaccccagcaagtgcgtggtggagaagatcctggtgctgggcttcagaaaggagcccagcagcgtgaccacccacagcagcgacggcaaggaccagcccgtggccttcacctactgcgccaagaccagcatcctgagcctggagaagctgagcctgaacatcgccaccgactgggaggtgagaatcatctag

SEQ ID NO: 259083 - protein, 536 aa, Artificial Sequence
  derived and/or modified sequence
MLLLWVSVVAALALAVLAPGAGEQRRRAAKAPNVVLVVSDSFDGRLTFHPGSQVVKLPFINFMKTRGTSFLNAYTNSPICCPSRAAMWSGLFTHLTESWNNFKGLDPNYTTWMDVMERHGYRTQKFGKLDYTSGHHSISNRVEAWTRDVAFLLRQEGRPMVNLIRNRTKVRVMERDWQNTDKAVNWLRKEAINYTEPFVIYLGLNLPHPYPSPSSGENFGSSTFHTSLYWLEKVSHDAIKIPKWSPLSEMHPVDYYSSYTKNCTGRFTKKEIKNIRAFYYAMCAETDAMLGEIILALHQLDLLQKTIVIYSSDHGELAMEHRQFYKMSMYEASAHVPLLMMGPGIKAGLQVSNVVSLVDIYPTMLDIAGIPLPQNLSGYSLLPLSSETFKNEHKVKNLHPPWILSEFHGCNVNASTYMLRTNHWKYIAYSDGASILPQLFDLSSDPDELTNVAVKFPEITYSLDQKLHSIINYPKVSASVHQYNKEQFIKWKQSIGQNYSNVIANLRWHQDWQKEPRKYENAIDQWLKTHMNPRAV

SEQ ID NO: 259084 - protein, 186 aa, Artificial Sequence [sequence omitted]

SEQ ID NO: 259085 - DNA, 1611 bp, Artificial Sequence
  derived and/or modified sequence
atgctattgctttgggtttccgtagtggccgcactggccttagcagtgctggctccaggggcaggcgagcagcgcagaagagcagcaaaggccccaaacgtggtgcttgtggtgtccgattccttcgatggacgcctcacattccatcctggcagccaggtagtcaagctgccattcatcaactttatgaagactagaggcacctcattcctgaacgcttacacgaatagtccgatctgctgcccctcccgggctgctatgtggagcggcttatttactcacctgaccgagtcatggaacaatttcaaagggctcgacccgaattacacgacttggatggatgtcatggagagacatggttataggacccagaagttcgggaaactggattatacctcagggcaccatagcatttctaatcgggtggaagcctggactcgcgatgttgctttcctgttacggcaggaaggtcgccccatggttaatttaatcagaaatcgtaccaaggttcgggtcatggagcgggattggcagaacacagataaagctgtcaactggcttcggaaagaggcaataaactacacagaacctttcgtgatctacctcgggctgaacctcccccacccatacccaagcccttccagtggggagaattttggttcttctactttccacacttctttgtactggctggagaaagtcagccacgacgcgatcaagatcccaaaatggtccccgctgtctgagatgcacccagtggactactattcatcttacaccaaaaattgtacaggtcggttcaccaagaaggagataaaaaacattagagctttctactatgcaatgtgtgccgagacagacgcaatgctcggggaaatcattcttgccctgcatcaactggaccttctacagaaaacaatcgtcatctattccagtgatcatggagagctcgcaatggaacatcgccaattttataaaatgtctatgtatgaagcctcagcccatgtgccattgttgatgatggggcccgggataaaggcgggtctgcaagtgtccaatgtggttagcctcgtcgacatatatccgacaatgcttgacatcgccggaataccccttccacagaacctgagtggatatagtctgctgcctctgtccagcgagacatttaagaacgaacataaggtgaagaacctccatccaccctggattctgtcggaattccatgggtgcaatgtgaacgcaagtacatatatgctgcgcacaaatcactggaaatacattgcctacagcgacggagcctctattctgccccagctcttcgatttgtccagcgacccagatgagctgacaaacgtggcagttaaattcccagagatcacctattcccttgaccaaaagctccacagcatcattaattaccccaaagtgtccgcttctgttcatcagtataacaaagagcagtttatcaagtggaagcagtcgatcggtcaaaattactctaacgtgatcgctaaccttcgctggcatcaggactggcagaaagagcccaggaagtatgagaacgctatcgatcaatggctgaagacccacatgaacccaagggcagtatag

SEQ ID NO: 259086 - DNA, 561 bp, Artificial Sequence
  derived and/or modified sequence
atgctgctcctgtgggtgtcagtggtcgccgcactggccctcgccgtactcgcacctggcgccggtgagcaacgacgcagagcagctaaggcccccaacgtggttcttgtcgtgtcagacagcttcgatgggcggttgacctttcaccccggctcacaggtagtgaagctcccgttcattaactttatgaagacgagaggtacttcattcctgaacgcttataccaactctccgatatgttgcccatcacgagccgccatgtggagtggcctgttcactcatcttactgaaagttggaacaatttcaaggggttggaccctaactatacgacctggatggacgtgatggagcgccacggctatcggacccagaaatttggtaagctggactacacatctggtcatcactctatctctaaccgggtggaagcatggactcgggacgtagcattccttctgcgccaggaaggtcggcccatggtgaacttaattcgcaatcgcactaaggtccgtgtaatggaacgggactggcagaacacagataaggcagtcacaggatag

SEQ ID NO: 259087 - DNA, 1611 bp, Artificial Sequence
  derived and/or modified sequence
atgctgctgctgtgggtgtctgtggtggccgccctggccctggccgtgctggcccctggagctggggagcagaggcggcgggccgccaaggccccaaatgtggtgctggtggtgtctgacagctttgatggccgcctgaccttccaccctggcagccaggtggtgaagctgcccttcatcaacttcatgaagacccggggcaccagcttcctgaatgcctacaccaacagccccatctgctgccccagcagagctgccatgtggagcggcctcttcacccacctgacagagagctggaacaacttcaagggcctggaccccaactacaccacctggatggatgtgatggagagacatggctaccgcacccagaagtttgggaagctggactacaccagcggccaccacagcatcagcaacagagtggaggcctggaccagagatgtggccttcctgctgcggcaggagggccggcccatggtgaacctgatccggaacagaaccaaggtgcgggtgatggagcgggactggcagaacacagacaaggctgtgaactggctgaggaaggaggccatcaactacacagagcccttcgtcatctacctgggcctgaacctgccccacccctaccccagccccagcagtggagaaaattttggcagcagcaccttccacaccagcctgtactggctggagaaggtgtcccatgatgccatcaagatccccaagtggagccccctgtctgagatgcaccctgtggactactacagcagctacaccaagaactgcaccggccgcttcaccaagaaggagatcaagaacatccgggccttctactatgccatgtgtgccgagacagatgccatgctgggggagatcatcctggccctgcaccagctggacctgctgcagaagaccatcgtcatctacagcagtgaccacggggagctggccatggagcaccggcagttctacaagatgtccatgtatgaggccagcgcccacgtgcccctgctgatgatgggccctggcatcaaggccggcctgcaggtgtccaatgtggtgtccctggtggacatctaccccaccatgctggacattgctggcatccccctgccccagaacctgagcggctacagcctgctgcccctgagcagcgagaccttcaagaatgagcacaaggtgaagaacctgcaccccccctggatcctgtctgagttccacggctgcaatgtgaatgccagcacctacatgctgcggaccaaccactggaagtacatcgcctacagtgatggagccagcatcctgccccagctgtttgacctgagcagtgaccctgatgagctgaccaacgtggccgtgaagtttcctgagatcacctacagcctggaccagaagctgcacagcatcatcaactaccccaaggtgtctgcctctgtgcaccagtacaacaaggagcagttcatcaagtggaagcagagcatcggccagaactacagcaatgtgattgccaacctgcgctggcaccaggactggcagaaggagcccaggaaatatgaaaatgccatcgaccagtggctgaagacccacatgaaccccagggctgtgtag

SEQ ID NO: 259088 - DNA, 561 bp, Artificial Sequence
  derived and/or modified sequence
atgctgctgctgtgggtgtctgtggtggccgccctggccctggccgtgctggcccctggagctggggagcagaggcggcgggccgccaaggccccaaatgtggtgctggtggtgtctgacagctttgatggccgcctgaccttccaccctggcagccaggtggtgaagctgcccttcatcaacttcatgaagacccggggcaccagcttcctgaatgcctacaccaacagccccatctgctgccccagcagagctgccatgtggagcggcctcttcacccacctgacagagagctggaacaacttcaagggcctggaccccaactacaccacctggatggatgtgatggagagacatggctaccgcacccagaagtttgggaagctggactacaccagcggccaccacagcatcagcaacagagtggaggcctggaccagagatgtggccttcctgctgcggcaggagggccggcccatggtgaacctgatccggaacagaaccaaggtgcgggtgatggagcgggactggcagaacacagacaaggctgtgactggatag

SEQ ID NO: 259089 - DNA, 1611 bp, Artificial Sequence
  derived and/or modified sequence
atgctgctgctgtgggtgagcgtggtggccgccctggccctggccgtgctcgcacctggagccggtgaacaacgtagaagagcagctaaggcgcctaacgtagtgttggtcgtgtccgacagttttgatggcaggctgaccttccacccaggcagccaggtggtgaagctgccatttataaactttatgaagacccgtggaacttcatttctcaacgcctacactaactcaccgatctgttgcccgagccgagctgcaatgtggtcgggtctgtttactcatttaacagagagctggaataacttcaaggggcttgaccccaattacactacatggatggacgttatggaacgccatggttaccgcacccagaaatttgggaaactagactacacttcgggccaccattcaattagcaatcgagttgaggcctggacccgcgatgtggcgtttctgctgaggcaggagggtcggcccatggtgaacctgatacggaatcggacaaaagtccgggtgatggaacgagattggcaaaacacagacaaagctgtgaattggctccgcaaggaggcaatcaattataccgagccattcgtgatttatctgggactcaatctacctcacccgtatccttcaccttcttcaggcgaaaactttggctcctccactttccacacatccctgtactggttagaaaaggtgagccacgacgcgattaagatccctaagtggtctcccctgagtgaaatgcaccctgtcgattattatagctcctacaccaaaaattgtaccggcagatttacgaaaaaagagatcaaaaacattcgggccttttattatgcaatgtgcgccgagaccgacgccatgcttggagagattatactcgccctgcaccagttggatctcctgcagaagaccattgtgatctacagttctgaccacggcgaactggccatggagcataggcagttttataaaatgtcgatgtacgaggcttctgctcatgtcccactcctgatgatgggacctggcataaaggctggactccaggtgagcaacgtcgtgtccctggtggatatctatcctaccatgctggatatagcaggaattccactcccgcagaatctgtctgggtactctctcctgcccctctcttctgaaactttcaaaaacgaacacaaggtgaagaacctgcatcccccgtggatattgtctgagtttcatggttgtaacgtgaacgcctccacctacatgctgcgcactaaccactggaagtacatcgcatattccgacggtgcctcaatcttgccacagctgtttgacctgagcagtgacccagatgagctcacaaatgtggccgtgaagtttccagaaatcacatacagcctggaccagaaactccactccataattaattatcccaaagtgtccgcctctgtccaccagtacaataaggaacaatttatcaaatggaagcagtccatcggccaaaactacagcaacgtgattgcaaatttacggtggcatcaggattggcagaaggagccaagaaagtacgaaaatgcgatagatcagtggctcaaaactcacatgaatcccagggccgtttag

SEQ ID NO: 259090 - DNA, 561 bp, Artificial Sequence
  derived and/or modified sequence
atgctgctgctgtgggtgagcgtggtggccgccctggccctggccgttctggctcccggggccggggaacagagacgacgggccgccaaagcgccaaatgtagtccttgtggtctcggattccttcgacggcaggcttaccttccaccccggctcccaagtggtgaaactccccttcatcaacttcatgaaaactcgagggacatcattcttgaacgcatatactaatagcccgatctgctgtcccagccgcgcagcaatgtggagcggactttttacacatctcacagaaagctggaacaactttaaaggattggatcccaattacacaacttggatggacgtcatggagcgacatggttataggacccagaaatttgggaagctggactataccagcggacaccactctatttccaatagagtggaggcttggacccgagatgtcgccttcttgctgcgacaggaggggcgaccgatggtgaatctcatccgtaaccggacaaaggtgagggtgatggagcgtgattggcaaaatacggacaaggctgttacaggctag

SEQ ID NO: 259091 - DNA, 1611 bp, Artificial Sequence
  derived and/or modified sequence
atgttgttattgtgggtttctgtcgttgcagcattggcactcgctgttttggccccaggcgctggcgagcagaggcggagggctgcaaaggcccctaacgttgtactggtggtttctgactcatttgatggccgtcttactttccaccccggttcccaggttgttaagcttccctttatcaacttcatgaagacccgcggaacgagctttctgaatgcgtatactaatagtcccatctgctgcccatctagagctgctatgtggtccggcctgttcacgcaccttacagagagctggaataactttaagggactcgacccaaattacaccacatggatggatgtgatggagcggcacggttacagaacacagaagttcggaaaacttgactataccagcggacatcactctatatctaaccgcgtagaggcctggactagggatgtggctttcttgctgcgacaggaggggcgtcctatggtgaatcttatccggaatcgaacaaaagttcgggttatggagcgcgactggcaaaacaccgataaagctgtgaattggcttcgcaaagaggccatcaactatactgaaccattcgttatctatctgggccttaatctgcctcacccgtatccctcccctagctctggtgaaaacttcggcagcagtacgttccacacctctttgtactggctcgagaaggtatcacacgacgcaataaaaatccccaagtggtcacccctgagcgagatgcaccccgtggactattacagcagttacactaaaaactgcaccggaaggtttacaaagaaggagatcaagaatataagagccttttactatgccatgtgcgctgaaaccgacgccatgttaggagagataatcttagcactccaccagttagatctcctacagaagaccattgtgatttactccagtgatcacggagaactcgctatggaacaccgacaattctataaaatgagcatgtacgaagcatcagcccacgtccctctcctcatgatgggcccaggcattaaggcaggcctacaggtcagtaacgttgtctctttagtggatatatatcccaccatgctggatattgccggtattcctctgcctcagaacctgtcaggatactcgctgctgcctctttcgtctgaaaccttcaagaacgagcacaaggtgaaaaacctccatcctccctggattctgtccgaattccacggatgcaatgtgaacgcaagtacctatatgctgaggacaaaccactggaaatatatcgcctactcagacggggctagtatcctgccacagctcttcgatctcagtagcgatcccgatgagctgacaaatgtggccgtaaaattccccgagatcacatactcactagatcaaaaattacactccatcatcaattatcctaaagtctcggcaagcgtgcaccagtacaataaagagcaattcatcaaatggaaacagtccatcggacagaactactctaacgttatcgcgaatctgcggtggcaccaagattggcagaaagaacccaggaaatacgagaacgcgattgatcagtggctgaagacccacatgaatcccagagctgtctag

SEQ ID NO: 259092 - DNA, 561 bp, Artificial Sequence
  derived and/or modified sequence
atgcttctcttatgggtgtcggttgtggctgctctggctctggccgtactggcccctggggcaggagagcagagacgacgagccgcaaaagcccctaacgtggtacttgtggttagcgacagttttgacggaaggttgacttttcaccctggctctcaggtcgtgaagctgccattcatcaattttatgaaaacccgcggaacctcatttcttaatgcttacacaaactcccctatctgttgcccttcccgagctgctatgtggagcggattgttcactcacctgactgaatcttggaacaacttcaaggggctggacccaaactacacaacttggatggatgtcatggaaagacacggctataggacacaaaagttcggcaaacttgattacacctcaggacatcattcaattagcaatagagtcgaggcctggacccgcgacgtcgcgttcctcctgcgacaggaaggcaggccaatggtgaatttaattagaaacagaacgaaggtgagagtaatggagcgcgactggcaaaataccgataaagctgttacaggatag

SEQ ID NO: 259093 - DNA, 3354 bp, Artificial Sequence
  derived and/or modified sequence
aaaagcgggaatttctctgttgcgcatgtgcgcgctctccgcctgataggagttgtagttctgcgggtgaagctcggcgttactatcaagcaaccaaactgcaagctttgggagttgttcgctgtccctgccctgctctgctagggagagaacgccagagggaggcggctggcccggcggcaggctctcagaaccgctaccggcgatgctactgctgtgggtgtcggtggtcgcagccttggcgctggcggtactggcccccggagcaggggagcagaggcggagagcagccaaagcgcccaatgtggtgctggtcgtgagcgactccttcgatggaaggttaacatttcatccaggaagtcaggtagtgaaacttccttttatcaactttatgaagacacgtgggacttcctttctgaatgcctacacaaactctccaatttgttgcccatcacgcgcagcaatgtggagtggcctcttcactcacttaacagaatcttggaataattttaagggtctagatccaaattatacaacatggatggatgtcatggagaggcatggctaccgaacacagaaatttgggaaactggactatacttcaggacatcactccattagtaatcgtgtggaagcgtggacaagagatgttgctttcttactcagacaagaaggcaggcccatggttaatcttatccgtaacaggactaaagtcagagtgatggaaagggattggcagaatacagacaaagcagtaaactggttaagaaaggaagcaattaattacactgaaccatttgttatttacttgggattaaatttaccacacccttacccttcaccatcttctggagaaaattttggatcttcaacatttcacacatctctttattggcttgaaaaagtgtctcatgatgccatcaaaatcccaaagtggtcacctttgtcagaaatgcaccctgtagattattactcttcttatacaaaaaactgcactggaagatttacaaaaaaagaaattaagaatattagagcattttattatgctatgtgtgctgagacagatgccatgcttggtgaaattattttggcccttcatcaattagatcttcttcagaaaactattgtcatatactcctcagaccatggagagctggccatggaacatcgacagttttataaaatgagcatgtacgaggctagtgcacatgttccgcttttgatgatgggaccaggaattaaagccggcctacaagtatcaaatgtggtttctcttgtggatatttaccctaccatgcttgatattgctggaattcctctgcctcagaacctgagtggatactctttgttgccgttatcatcagaaacatttaagaatgaacataaagtcaaaaacctgcatccaccctggattctgagtgaattccatggatgtaatgtgaatgcctccacctacatgcttcgaactaaccactggaaatatatagcctattcggatggtgcatcaatattgcctcaactctttgatctttcctcggatccagatgaattaacaaatgttgctgtaaaatttccagaaattacttattctttggatcagaagcttcattccattataaactaccctaaagtttctgcttctgtccaccagtataataaagagcagtttatcaagtggaaacaaagtataggacagaattattcaaacgttatagcaaatcttaggtggcaccaagactggcagaaggaaccaaggaagtatgaaaatgcaattgatcagtggcttaaaacccatatgaatccaagagcagtttgaacaaaaagtttaaaaatagtgttctagagatacatataaatatattacaagatcataattatgtattttaaatgaaacagttttaataattaccaagttttggccgggcacagtggctcacacctgtaatcccaggactttgggaggctgaggaaagcagatcacaaggtcaagagattgagaccatcctggccaacatggtgaaaccctgtctctactaaaaatacaaaaattagctgggcgcggtggtgcacacctatagtctcagctactcagaggctgaggcaggaggatcgcttgaacccgggaggcagcagttgcagtgagctgagattgcgccactgtactccagcctggcaacagagtgagactgtgtcgcaaaaaaataaaaataaaataataataattaccaatttttcattattttgtaagaatgtagtgtattttaagataaaatgccaatgattataaaatcacatattttcaaaaatggttattatttaggcctttgtacaatttctaacaatttagtggaagtatcaaaagaattgaagcaaatactgtaacagttatgttcctttaaataatagagaatataaaatattgtaataatatgtatcataaaatagttgtatgtgagcatttgatggtgctcgatgagttacttgtatttgatgggattgtttggatgtatttaatgggagtatttggagtatttaacgggatgtaaaccctggatgtacctgattttgttactgttttattttaataggtaatatatatacagggtaaaagcttcaaatggtacaaaagggttaacagtgatcgtgaagtctctgtcctttccctcttccctgccatccagttccccctccaagaagcaagtaccgaaaccacctgcttacgcatttttagagattggccacaaatttataaacaaatgtatatattcctttccccctacacaaacggtaacatactgcacacattgttctgcatgttgcttctttttccttttttttttcacttaacagtagatatctagaggtgaaattactgagtcaagactatatttagcaaaattacactagatactacaaattacctctaaagaaggtatactaactgataatctcaccatcaatgcatgtcttcttatcctttgccaacctaacagataaaaatgttctatttttatttttctttttatgagtaacgtagagcatattttcatgtatttaacagccactggaatctgctttaccatggcctttcctatttctattctttgcctatttttctgttggttgttggtctttgttttgtattacaggtgtgctttagatattagctttttgtaagagatcctgcaaatatcttctttccagtttgtcattgtcatttgtcttttgactttgttctggtattttttgatatgtagaaatttttattttcatgtaagcaaatttatgaatctttgtacaccataagtatatacaattatgatttgtcaattaaaaatattagtacaaaattta

SEQ ID NO: 259094 - DNA, 1115 bp, Artificial Sequence
  derived and/or modified sequence
gtgcgcgctctccgcctgataggagttgtagttctgcgggtgaagctcggcgttactatcaagcaaccaaactgcaagctttgggagttgttcgctgtccctgccctgctctgctagggagagaacgccagagggaggcggctggcccggcggcaggctctcagaaccgctaccggcgatgctactgctgtgggtgtcggtggtcgcagccttggcgctggcggtactggcccccggagcaggggagcagaggcggagagcagccaaagcgcccaatgtggtgctggtcgtgagcgactccttcgatggaaggttaacatttcatccaggaagtcaggtagtgaaacttccttttatcaactttatgaagacacgtgggacttcctttctgaatgcctacacaaactctccaatttgttgcccatcacgcgcagcaatgtggagtggcctcttcactcacttaacagaatcttggaataattttaagggtctagatccaaattatacaacatggatggatgtcatggagaggcatggctaccgaacacagaaatttgggaaactggactatacttcaggacatcactccattagtaatcgtgtggaagcgtggacaagagatgttgctttcttactcagacaagaaggcaggcccatggttaatcttatccgtaacaggactaaagtcagagtgatggaaagggattggcagaatacagacaaagcagtaactggttaagaaaggaagcaattaattacactgaaccatttgttatttacttgggattaaatttaccacacccttacccttcaccatcttctggagaaaattttggatcttcaacatttcacacatctctttattggcttgaaaaagtgtctcatgatgccatcaaaatcccaaagtggtcacctttgtcagaaatgcaccctgtagattattactcttcttatacaaaaaactgcactggaagatttacaaaaaaagaaattaagaatattagagcattttattatgctatgtgtgctgagacagatgccatgcttggtgaaattattttggcccttcatcaattagatcttcttcagaaaactattgtcatatactcctcaga

SEQ ID NO: 259095 - DNA, 1611 bp, Artificial Sequence
  derived and/or modified sequence
atgctgctgctgtgggtgagcgtggtggccgccctggccctggccgtgctggcccccggcgccggcgagcagagaagaagagccgccaaggcccccaacgtggtgctggtggtgagcgacagcttcgacggcagactgaccttccaccccggcagccaggtggtgaagctgcccttcatcaacttcatgaagaccagaggcaccagcttcctgaacgcctacaccaacagccccatctgctgccccagcagagccgccatgtggagcggcctgttcacccacctgaccgagagctggaacaacttcaagggcctggaccccaactacaccacctggatggacgtgatggagagacacggctacagaacccagaagttcggcaagctggactacaccagcggccaccacagcatcagcaacagagtggaggcctggaccagagacgtggccttcctgctgagacaggagggcagacccatggtgaacctgatcagaaacagaaccaaggtgagagtgatggagagagactggcagaacaccgacaaggccgtgaactggctgagaaaggaggccatcaactacaccgagcccttcgtgatctacctgggcctgaacctgccccacccctaccccagccccagcagcggcgagaacttcggcagcagcaccttccacaccagcctgtactggctggagaaggtgagccacgacgccatcaagatccccaagtggagccccctgagcgagatgcaccccgtggactactacagcagctacaccaagaactgcaccggcagattcaccaagaaggagatcaagaacatcagagccttctactacgccatgtgcgccgagaccgacgccatgctgggcgagatcatcctggccctgcaccagctggacctgctgcagaagaccatcgtgatctacagcagcgaccacggcgagctggccatggagcacagacagttctacaagatgagcatgtacgaggccagcgcccacgtgcccctgctgatgatgggccccggcatcaaggccggcctgcaggtgagcaacgtggtgagcctggtggacatctaccccaccatgctggacatcgccggcatccccctgccccagaacctgagcggctacagcctgctgcccctgagcagcgagaccttcaagaacgagcacaaggtgaagaacctgcaccccccctggatcctgagcgagttccacggctgcaacgtgaacgccagcacctacatgctgagaaccaaccactggaagtacatcgcctacagcgacggcgccagcatcctgccccagctgttcgacctgagcagcgaccccgacgagctgaccaacgtggccgtgaagttccccgagatcacctacagcctggaccagaagctgcacagcatcatcaactaccccaaggtgagcgccagcgtgcaccagtacaacaaggagcagttcatcaagtggaagcagagcatcggccagaactacagcaacgtgatcgccaacctgagatggcaccaggactggcagaaggagcccagaaagtacgagaacgccatcgaccagtggctgaagacccacatgaaccccagagccgtgtag

SEQ ID NO: 259096 - DNA, 561 bp, Artificial Sequence
  derived and/or modified sequence
atgctgctgctgtgggtgagcgtggtggccgccctggccctggccgtgctggcccccggcgccggcgagcagagaagaagagccgccaaggcccccaacgtggtgctggtggtgagcgacagcttcgacggcagactgaccttccaccccggcagccaggtggtgaagctgcccttcatcaacttcatgaagaccagaggcaccagcttcctgaacgcctacaccaacagccccatctgctgccccagcagagccgccatgtggagcggcctgttcacccacctgaccgagagctggaacaacttcaagggcctggaccccaactacaccacctggatggacgtgatggagagacacggctacagaacccagaagttcggcaagctggactacaccagcggccaccacagcatcagcaacagagtggaggcctggaccagagacgtggccttcctgctgagacaggagggcagacccatggtgaacctgatcagaaacagaaccaaggtgagagtgatggagagagactggcagaacaccgacaaggccgtgaccggctag

SEQ ID NO: 259097 - protein, 119 aa, Artificial Sequence
  derived and/or modified sequence
MNKILSSTVCFGLLTLLSVLSFLQSVHGRPYLTQGNEIFPDKKYTNREELLLALLNKNFDFQRPFNTDLALPNKLEELNQLEKLKEQLVEEKDSETSYAVDGLFSSHPSKRACFWKYCV

SEQ ID NO: 259098 - protein, 38 aa, Artificial Sequence
  derived and/or modified sequence
MNKILSSTVCFGLLTLLSVLSFLQSVHGRPYLTQGNEI

SEQ ID NO: 259099 - DNA, 360 bp, Artificial Sequence
  derived and/or modified sequence
atgaataagatcctgtcatctaccgtgtgcttcggactcctcacattgttgagtgtcctttcttttctccagtctgtacatggacgaccctatctcacgcagggcaacgaaatcttccccgataagaaatacaccaaccgggaggaattactgctggccttgctgaataagaacttcgattttcaaaggcctttcaatactgacttggcgctgccgaataagctggaggaactcaatcagttagaaaagctgaaagaacaactggtcgaggagaaggattcggagactagttatgcggtggatggcctgttctctagtcacccatcaaagcgggcttgcttttggaaatattgtgtgtag

SEQ ID NO: 259100 - DNA, 360 bp, Artificial Sequence
  derived and/or modified sequence
atgaacaagattcttagttcaacagtttgcttcggactcctcaccctgctctcagtgctgagctttttgcagtcagtacacggacggccttatcttacacagggaaatgaaatctttccagacaaaaaatacaccaatcgcgaagagctcctgctcgcgctgttgaataagaatttcgacttccagcggcctttcaatacagatctcgcactccccaataagctggaggaacttaatcaactggaaaagcttaaggagcagctggtggaagagaaagactctgagacgtcatacgctgtggatggattattttcttctcacccgtctaaacgcgcttgtttctggaaatattgtgtgtag

SEQ ID NO: 259101 - DNA, 117 bp, Artificial Sequence
  derived and/or modified sequence
atgaacaagatattgtcatccactgtctgtttcggtctcctgactctgctatcggttctgtcttttcttcagagcgtacacggaaggccttacctgacccagggtaatgagatatag

SEQ ID NO: 259102 - DNA, 360 bp, Artificial Sequence
  derived and/or modified sequence
atgaacaagattctttcttcaacggtctgctttggattacttacattgctgtccgtcctctcatttctgcagagcgtgcatggccgaccttatttgacccaaggtaatgagatcttcccagacaaaaaatacaccaatagagaggaattactcctcgccttgctgaacaagaatttcgactttcagcgcccgttcaacactgacctcgccctccctaacaagttagaggagctgaatcaattggagaagcttaaagaacagctggttgaagaaaaggactctgagacttcatatgctgtagacggactgtttagttctcaccccagcaagcgagcatgtttctggaagtactgtgtctag

SEQ ID NO: 259103 - DNA, 676 bp, Artificial Sequence
  derived and/or modified sequence
gtcacttctccaagtagtgaatcatgttaactacttgattgcattgcattttatagatttattttctttctttctttttccttcatctagatcattcgtaactgaggcacacttgccttttgcaactaagctctactgaattccaaagctatagaaatatccatcttgacctggaaagtctgtttctttgctagtccagaaggttttttttaacatgaacaagatcctctcaagcactgtttgctttggactcctaactttgttatccgtgttgagttttttacaatctgtgcatggacgaccatatcttacccaaggaaatgaaatatttccagataaaaaatatacaaatcgtgaggaactattgctggctctactgaataaaaattttgatttccaaagacctttcaacactgacctagccttacctaacaaactggaagaacttaaccagctggaaaagctaaaagaacagctagtggaggagaaggattctgagacgtcctatgctgtagatggtctattctcttctcatcctagcaaacgagcttgcttttggaaatactgtgtttaaagctttttctctggatgcaaaaaaagataagaatatcaggaaaatatatgtatctactcactctgctgtaggcagaccccctgaaactattgctgtggaata

SEQ ID NO: 259104 - DNA, 1005 bp, Artificial Sequence
  derived and/or modified sequence
agctagtggaaaaacaagagaagggaagtcaaaaggctacttgctgtcagctaaagccagacaacctctcctgtttcatctcctggcaacagaatgcatcctccttttgggaaactgcctctttccccactcctcagagtaaatcttgctgctgctcactctttgggtctgcactgcccataagagctgtagcactcaccgcgaaggtctgcagcttcactcttgaaaccagagagaccacgaacctaccgggagaaatgaacaaattccggacgcaccatctttaagaactgtaacactcactgcgaggatctgcggcttcattctttaagtctgtgagaccaagaacccaccaattccggcacactaatatgctgttggaaactggctatatggaaaggctatgtggaagaaaacaaacaccccagccaacataatggagctcccagctgacagctgacatctagctgattgccaaccactttggaaactgatcttcaaaacccacttgagctatgtcaagagaagccacctgtgacacagaagcagaaggatccaagtcaaaggagtttatttgggaggaaatagcacgagagaatgtgatacttgggaaaattatgtagagagagagattaaagatgcaagctataaaaggaattgataatataaaagctcctgagaagattggaagaatacatataagagaccctgatccttgataggatggaccttttctagaactaccatcaccctggaagctgaagaaaatcattcgtaactgaggcacacttgccttttgcaactaagctctactgaattccaaagctatagaaatatccatcttgacctggaaagtctgtttctttgctagtccagaaggttttttttaacatgaacaagatcctctcaagcactgtttgctttggactcctaactttgttatccgtgttgagttttttacaatctgtgcatggacgaccatatcttacccaaggaaatgaaata

SEQ ID NO: 259105 - DNA, 360 bp, Artificial Sequence
  derived and/or modified sequence
atgaataagatattgtcctccaccgtatgctttgggctcctaacactgctcagtgtcttatctttcctgcagtctgttcatggaaggccttacctgacccagggtaacgagatttttcccgacaagaagtacaccaaccgcgaagagctcttacttgcacttctcaataagaatttcgactttcagcgacccttcaataccgacctggccctgcctaataaactcgaggaactgaaccaactggaaaagcttaaggagcagctagtggaagagaaggattctgaaacttcgtacgctgttgatggcctgtttagttcacatccgtccaaacgggcgtgtttttggaagtactgcgtatag

SEQ ID NO: 259106 - DNA, 117 bp, Artificial Sequence
  derived and/or modified sequence
atgaacaagatactgtcctctaccgtttgcttcggactgctaactttactgtctgttctgagcttcctccaatccgtgcatggacgaccctaccttacccaaggcaacgagatatag

SEQ ID NO: 259107 - DNA, 360 bp, Artificial Sequence
  derived and/or modified sequence
atgaataagattttgtcatcgaccgtatgctttggcctactgacactgctgtccgtgctgtccttcttacagtccgtgcatggccgaccgtatcttacgcaagggaatgaaatcttccccgacaaaaaatatactaacagggaagaactcctcctggcattgctgaataagaactttgatttccagcgtccctttaacaccgatctcgccctaccgaacaagttagaagagctgaaccagctcgagaaactcaaggaacaactagtggaggaaaaggactctgagactagttatgctgttgatggattattctcctcgcacccctctaagcgcgcatgtttctggaagtactgtgtctag

SEQ ID NO: 259108 - DNA, 360 bp, Artificial Sequence
  derived and/or modified sequence
atgaacaagattttgtctagcacagtttgcttcgggctcctcacgctactgtccgtattgtcgtttctgcagtctgtacatggtagaccctatctgacgcagggaaatgaaatcttccccgataagaaatacactaatcgcgaagaactgttgctagccctgcttaataagaattttgactttcaaagaccattcaacacagacctcgctctgccaaataaattggaagaactgaaccaattggagaaactcaaagaacaactcgtggaagagaaggattcagagacttcatatgccgtggacggcttgttttcatcccacccgtctaagagagcatgtttctggaagtattgtgtgtag

SEQ ID NO: 259109 - DNA, 360 bp, Artificial Sequence
  derived and/or modified sequence
atgaacaagatcctgagcagcaccgtgtgcttcggcctgctgaccctgctgagcgtgctgagcttcctgcagagcgtgcacggcagaccctacctgacccagggcaacgagatcttccccgacaagaagtacaccaacagagaggagctgctgctggccctgctgaacaagaacttcgacttccagagacccttcaacaccgacctggccctgcccaacaagctggaggagctgaaccagctggagaagctgaaggagcagctggtggaggagaaggacagcgagaccagctacgccgtggacggcctgttcagcagccaccccagcaagagagcctgcttctggaagtactgcgtgtag

SEQ ID NO: 259110 - DNA, 117 bp, Artificial Sequence
  derived and/or modified sequence
atgaacaagatcctgagcagcaccgtgtgcttcggcctgctgaccctgctgagcgtgctgagcttcctgcagagcgtgcacggcagaccctacctgacccagggcaacgagatctag

SEQ ID NO: 259111 - DNA, 360 bp, Artificial Sequence
  derived and/or modified sequence
atgaataaaattctgtctagcacggtgtgctttggcttactcacactgctttctgttttgagctttttacagtccgtgcacggcagaccctacctgacgcaaggaaacgagatctttcccgataagaagtatacaaaccgggaagaactgttactggcactgctgaacaaaaacttcgactttcagcggccttttaataccgaccttgcccttcctaacaagctggaagagctgaaccagctggaaaaattgaaggagcaactcgtggaggagaaagacagtgagacaagctacgcagttgatggtctatttagctcccacccgagcaaaagggcgtgcttttggaagtactgcgtatag

SEQ ID NO: 259112 - DNA, 2395 bp, Artificial Sequence
  derived and/or modified sequence
aactcaaggcataaggcgatccagcacctaagatctcagcaaaaaaaagctaggtcctgaggcagctagtggaaaaacaagagaagggaagtcaaaaggctacttgctgtcagctaaagccagacaacctctcctgtttcatctcctggcaacagaatgcatcctccttttgggaaactgcctctttccccactcctcagagtaaatcttgctgctgctcactctttgggtctgcactgcccataagagctgtagcactcaccgcgaaggtctgcagcttcactcttgaaaccagagagaccacgaacctaccgggagaaatgaacaaattccggacgcaccatctttaagaactgtaacactcactgcgaggatctgcggcttcattctttaagtctgtgagaccaagaacccaccaattccggcacactaatatgctgttggaaactggctatatggaaaggctatgtggaagaaaacaaacaccccagccaacataatggagctcccagctgacagctgacatctagctgattgccaaccactttggaaactgatcttcaaaacccacttgagctatgtcaagagaagccacctgtgacacagaagcagaaggatccaagtcaaaggagtttatttgggaggaaatagcacgagagaatgatcattcgtaactgaggcacacttgccttttgcaactaagctctactgaattccaaagctatagaaatatccatcttgacctggaaagtctgtttctttgctagtccagaaggttttttttaacatgaacaagatcctctcaagcactgtttgctttggactcctaactttgttatccgtgttgagttttttacaatctgtgcatggacgaccatatcttacccaaggaaatgaaatatttccagataaaaaatatacaaatcgtgaggaactattgctggctctactgaataaaaattttgatttccaaagacctttcaacactgacctagccttacctaacaaactggaagaacttaaccagctggaaaagctaaaagaacagctagtggaggagaaggattctgagacgtcctatgctgtagatggtctattctcttctcatcctagcaaacgagcttgcttttggaaatactgtgtttaaagctttttctctggatgcaaaaaaagataagaatatcaggaaaatatatgtatctactcactctgctgtaggcagaccccctgaaactattgctgtggaataaaagatgaaatgctcctgattattgtaaatacaaaattgcatgcgggattgtgtaaagacaatgccaggttggactgccagaatgagccaacagcacttgcttccccctgtagagagcctatgaatggacgtgcagtcagggaggtttcatatcaccaagattcctatcccagaaaagcagatgttcatagctctgggaatggaatgcgcccctcgtggagagcctataaacggatgcatggaaggcgcctgtccatatggataagatagggttgtaaacgtcctcatcttgccatggctcttctaggcctctttagggttaaggcatatttccttctgagaatttctggtctaagcggttgtctagcttcatgtcctgtttccatggattgtttgtaaccagcttttgttacaattgttactgctgattaatatcttgctaatcataggttatggaaagattgtgtttctgttttaaggctctgttagaaattacacacacagtatattgtaaattcttatctctgtatactgtacttctacatacaaatgtactgtacttctacatacaaatgttatgttaaagaattacttcatccccatgtgaccatctcacctcataatcaaatgaccctaaatccctcattaacctacccctgcccttgctaaacttaataataaatgctggtatatccagtgcattgttggcaccatgggaccagaaggtggtgacccccctggacccagctttcactatcttgtgtgtgtctgttatttctcaacctgctgatccgcctgggaacaaagagccccgttgcattgcgggctactggccagatcccgcaatactctgctatttaaaattgtagctgtttcaatcataaagaaactggcatttattatgcatatgattttttcaccttgttcttgttactaagtcaattatgataagcttaaggtttatgttgtgaataatcactaatcagttgcacttttgaaggtatgtcactatcaaaatggttttgtagagctagagttgaaaatgctgtatctattgtatgctttccataaattcattgcttatgtaaagttttgtcctgttgtgactatgctgttgaactattaattaaaacattttgaaaagca

SEQ ID NO: 259113 - DNA, 360 bp, Artificial Sequence
  derived and/or modified sequence
atgaataagattctctccagtaccgtgtgtttcggccttctgactctgctcagtgtcttatcctttctgcaatcagtacacggtcgtccgtacctgacacagggcaacgagatttttcctgataaaaaatacaccaatagagaagaactgcttctggccctcctgaataaaaatttcgacttccagcgtcccttcaacaccgacctggcactccccaacaagctcgaagagttgaaccagctggagaagttgaaagaacaactggttgaagagaaggacagcgagacctcatacgctgtggacgggctgttctcatctcaccccagtaaaagagcctgcttttggaagtattgtgtttag

SEQ ID NO: 259114 - DNA, 117 bp, Artificial Sequence
  derived and/or modified sequence
atgaacaaaattctgtccagcaccgtgtgctttggtcttctcaccctactgtcagtactcagttttctccagagtgtgcacgggcgcccttatctgacgcaaggcaacgaaatctag

SEQ ID NO: 259115 - DNA, 360 bp, Artificial Sequence
  derived and/or modified sequence
atgaacaagatcctgagcagcacagtgtgcttcggcctgctgaccctgctgtctgtgctgtccttcctgcagagcgtgcacggccggccctacctgacccagggcaatgagatcttcccagacaagaagtacaccaaccgggaggagctgctgctggccctgctgaacaagaactttgacttccagaggcccttcaacacagacctggccctgcccaacaagctggaggagctgaaccagctggagaagctgaaggagcagctggtggaggagaaggacagcgagaccagctatgctgtggatggcctcttcagcagccaccccagcaagagggcctgcttctggaagtactgtgtgtag

SEQ ID NO: 259116 - DNA, 117 bp, Artificial Sequence
  derived and/or modified sequence
atgaacaagatcctgagcagcacagtgtgcttcggcctgctgaccctgctgtctgtgctgtccttcctgcagagcgtgcacggccggccctacctgacccagggcaatgagatctag

SEQ ID NO: 259117 - DNA, 360 bp, Artificial Sequence
  derived and/or modified sequence
atgaacaagatcctgagcagcaccgtgtgcttcggcctgctgaccctattgagtgtactgagctttctccagagtgtgcacgggcgaccttatctgacccaagggaatgagatttttccagataagaagtatactaatcgcgaagagttgcttctggctctgctcaataagaacttcgatttccagagaccctttaataccgatttggctcttcccaataagctggaggaactaaaccagttggagaaactgaaggaacaactggtcgaggaaaaagattccgagacatcttatgccgtggacggcttattctcaagccacccctccaagagagcctgcttctggaagtactgcgtgtag

SEQ ID NO: 259118 - DNA, 360 bp, Artificial Sequence
  derived and/or modified sequence
atgaacaagatcctgagcagcaccgtgtgcttcggcctgctgaccctgctatccgtgctgtcttttttacagtccgtgcatgggcgcccatatctaacacaggggaatgagatcttcccggacaagaaatatacaaatcgtgaggaactgctcctagctctgctgaacaaaaatttcgacttccagcggccattcaacaccgatctcgccctgcccaacaaactggaggaactgaaccagctggaaaagctgaaggaacagctggtcgaagagaaggacagtgagactagttatgccgtggacggtttgttcagctctcatccctccaaacgggcttgcttttggaagtactgtgtatag

SEQ ID NO: 259119 - DNA, 117 bp, Artificial Sequence
  derived and/or modified sequence
atgaacaagatcctgagcagcaccgtgtgcttcggcctgctgaccctcctgtctgtcttatcctttttacaaagcgtgcacgggagaccttacttgactcaggggaacgagatttag

SEQ ID NO: 259120 - RNA, 360 nt, Artificial Sequence
  derived and/or modified sequence
augaacaagauucuuucuucaacggucugcuuuggauuacuuacauugcuguccguccucucauuucugcagagcgugcauggccgaccuuauuugacccaagguaaugagaucuucccagacaaaaaauacaccaauagagaggaauuacuccucgccuugcugaacaagaauuucgacuuucagcgcccguucaacacugaccucgcccucccuaacaaguuagaggagcugaaucaauuggagaagcuuaaagaacagcugguugaagaaaaggacucugagacuucauaugcuguagacggacuguuuaguucucaccccagcaagcgagcauguuucuggaaguacugugucuag

SEQ ID NO: 259121 - RNA, 360 nt, Artificial Sequence
  derived and/or modified sequence
augaauaagauauuguccuccaccguaugcuuugggcuccuaacacugcucagugucuuaucuuuccugcagucuguucauggaaggccuuaccugacccaggguaacgagauuuuucccgacaagaaguacaccaaccgcgaagagcucuuacuugcacuucucaauaagaauuucgacuuucagcgacccuucaauaccgaccuggcccugccuaauaaacucgaggaacugaaccaacuggaaaagcuuaaggagcagcuaguggaagagaaggauucugaaacuucguacgcuguugauggccuguuuaguucacauccguccaaacgggcguguuuuuggaaguacugcguauag

SEQ ID NO: 259122 - RNA, 117 nt, Artificial Sequence
  derived and/or modified sequence
augaacaagauacuguccucuaccguuugcuucggacugcuaacuuuacugucuguucugagcuuccuccaauccgugcauggacgacccuaccuuacccaaggcaacgagauauag

SEQ ID NO: 259123 - RNA, 360 nt, Artificial Sequence
  derived and/or modified sequence
augaauaagauuuugucaucgaccguaugcuuuggccuacugacacugcuguccgugcuguccuucuuacaguccgugcauggccgaccguaucuuacgcaagggaaugaaaucuuccccgacaaaaaauauacuaacagggaagaacuccuccuggcauugcugaauaagaacuuugauuuccagcgucccuuuaacaccgaucucgcccuaccgaacaaguuagaagagcugaaccagcucgagaaacucaaggaacaacuaguggaggaaaaggacucugagacuaguuaugcuguugauggauuauucuccucgcaccccucuaagcgcgcauguuucuggaaguacugugucuag

SEQ ID NO: 259124 - RNA, 360 nt, Artificial Sequence
  derived and/or modified sequence
augaacaagauuuugucuagcacaguuugcuucgggcuccucacgcuacuguccguauugucguuucugcagucuguacaugguagacccuaucugacgcagggaaaugaaaucuuccccgauaagaaauacacuaaucgcgaagaacuguugcuagcccugcuuaauaagaauuuugacuuucaaagaccauucaacacagaccucgcucugccaaauaaauuggaagaacugaaccaauuggagaaacucaaagaacaacucguggaagagaaggauucagagacuucauaugccguggacggcuuguuuucaucccacccgucuaagagagcauguuucuggaaguauuguguguag

SEQ ID NO: 259125 - protein, 237 aa, Artificial Sequence
  derived and/or modified sequence
MAAVRVLVASRLAAASAFTSLSPGGRTPSQRAALHLSVPRPAARVALVLSGCGVYDGTEIHEASAILVHLSRGGAEVQIFAPDVPQMHVIDHTKGQPSEGESRNVLTESARIARGKITDLANLSAANHDAAIFPGGFGAAKNLLCCIAPVLAAKVLRGVEVTVGHEQEEGGKWPYAGTAEAIKALGAKHCVKEVVEAHVDQKNKVVTTPAFMCETALHYIHDGIGAMVRKVLELTGK

SEQ ID NO: 259126 - DNA, 714 bp, Artificial Sequence
  derived and/or modified sequence
atggcggctgtgcgagttctggtcgcctctagactcgccgctgccagcgcgttcacctccctgtcgccagggggtcggacaccatcccagcgcgccgcactccatctgagtgttcccaggccagctgccagagtcgctctggtgctcagcggatgtggcgtctacgatggcactgaaatccatgaggctagcgctatactggtccacctttcccgtgggggagccgaagtgcaaatctttgcccccgatgtgccacagatgcacgtcatcgatcacaccaaggggcaaccatcagaaggggagtccagaaacgttttgaccgagtctgctcggatcgcccgggggaagattacggatcttgccaatcttagcgcggccaaccatgacgcggcaatattccccggcgggttcggtgccgcaaagaaccttctgtgttgcatcgcaccagtgcttgcagctaaggtattgcggggcgttgaagtgacagtgggacacgaacaggaggagggaggaaaatggccgtatgcaggcaccgccgaggctattaaagcactgggcgccaagcactgcgttaaggaggtagtagaggcccacgtggaccagaagaataaagtggtcactactcctgcgttcatgtgcgagactgctctgcattacatccacgacggtatcggcgccatggtccgcaaggtactggagctcacgggtaagtag

SEQ ID NO: 259127 - DNA, 714 bp, Artificial Sequence
  derived and/or modified sequence
atggctgctgtgcgggtgctggtggccagccggctggccgccgccagcgccttcaccagcctgagccctgggggccgcacccccagccagagagctgccctgcacctgtctgtgcccaggcctgctgcccgggtggccctggtgctgagcggctgcggcgtgtatgatggaacagagatccacgaggccagcgccatcctggtgcacctgagcagaggaggagctgaggtgcagatctttgccccagatgtgccccagatgcacgtgattgaccacaccaagggccagcccagcgagggggagagcagaaatgtgctgacagaaagtgcccgcatcgcccggggcaagatcacagacctggccaacctgtctgctgccaaccatgatgctgccatcttccctgggggctttggagctgccaagaacctgctgtgctgcatcgcccctgtgctggccgccaaggtgctgcggggcgtggaggtgacagtgggccacgagcaggaggagggcggcaagtggccctatgccggcacagctgaggccatcaaggccctgggcgccaagcactgtgtgaaggaggtggtggaggcccacgtggaccagaagaacaaggtggtgaccaccccagccttcatgtgtgaaacagccctgcactacatccatgatggcatcggggccatggtgaggaaggtgctggagctgaccgggaagtag

SEQ ID NO: 259128 - DNA, 714 bp, Artificial Sequence
  derived and/or modified sequence
atggccgccgtgcgggtgctggtggccagccggctggccgccgccagcgcattcacctctctctctccgggtgggaggacgccatcccagcgcgcagccctgcatctgagcgtccctcgccctgcagctagagtggcccttgtgctcagcggctgtggagtgtatgacggaaccgagatacacgaagcctccgcgatacttgttcacctatctcgggggggcgccgaggtgcagatttttgctcccgacgttccgcaaatgcacgtcatagatcataccaaagggcagccttcagagggagagtcgcggaatgttcttaccgagtccgctcgaattgcccggggtaaaattaccgacctggccaacctcagcgctgctaaccacgatgctgccattttccctggcggattcggtgccgccaagaatctgttatgctgcatcgctcccgtgctcgccgcgaaagtgctgagaggggtagaggtgaccgttggtcacgaacaagaggagggcggcaagtggccatatgcgggtaccgccgaggctattaaagcccttggcgcaaaacattgtgtgaaggaggtagttgaggcacatgttgaccagaagaacaaagtcgttacaacacccgcctttatgtgtgagacggctctccattacattcacgatggaataggggcgatggtgcgcaaagtgctggagctgaccggcaaatag

SEQ ID NO: 259129 - DNA, 714 bp, Artificial Sequence
  derived and/or modified sequence
atggcggctgtaagagtactggtggcctcccgcctggcggctgcgagcgcctttacgtcactgtcaccagggggaaggactccctcccagcgtgccgctttgcatctgagtgtgcctcgtccggctgcgagagttgccctggttttatctggttgcggagtttatgacggtactgagattcacgaagctagcgccattttggtgcacctatccaggggcggtgcggaggttcaaatattcgccccagacgtaccacagatgcatgtcatagaccacacaaaaggacagccttcagagggcgaatcgcgaaatgtcttgaccgaaagtgcgaggattgccaggggaaagatcacagacctcgcaaacttaagcgcagcaaaccatgatgccgctatctttcccggaggcttcggggcagccaagaatctcctgtgctgcatagctccagtattggctgccaaggtcctgaggggagtcgaggtcaccgttggtcatgaacaggaagaggggggtaaatggccgtacgctgggaccgcagaagccattaaggctctcggcgctaaacattgcgtcaaagaagtcgtcgaggctcatgtagatcagaagaacaaagtcgtgacaacacccgcttttatgtgtgaaaccgccctgcattacattcatgatggaatcggtgctatggtccgaaaggttctggaactgacgggaaagtag

SEQ ID NO: 259130 - DNA, 1506 bp, Artificial Sequence
  derived and/or modified sequence
cccgctgtcctcaccgcaatggcggctgtgagggtcctggtggcctcgaggctcgctgcggcatctgcattcacgtccctgtcccccggcggtcggacgccttcccagcgcgcagcccttcacctctccgtgccgcgccccgcggccagggtcgcgctggtgctgtctggatgcggagtctacgatgggaccgagatccacgaggcctcggcgatcctggtgcacctgagccgtggaggggctgaagtccagatctttgctcctgacgtccctcagatgcacgtgattgaccacaccaaggggcagccgtccgaaggcgagagcaggaatgttttgaccgagtctgcgaggatcgcccgtggcaaaatcacagacctggccaacctcagtgcagccaaccatgatgctgccatctttccaggaggctttggagcggctaaaaacctcttgtgctgcattgcacctgtcctcgcggccaaggtgctcagaggcgtcgaggtgactgtgggccacgagcaggaggaaggtggcaagtggccttatgccgggaccgcagaggccatcaaggccctgggtgccaagcactgcgtgaaggaagtggtcgaagctcacgtggaccagaaaaacaaggtggtcacgaccccagccttcatgtgcgagacggcactccactacatccatgatgggatcggagccatggtgaggaaggtgctggaactcactggaaagtgacgcgcatggacggggcccagctaggcgccaggacttggcctcaccctctggctgaggagctgtcggctgctttccatccagctgggagtctggcaggcccttttttttttttctttgccgaaacctgcaggcgttctctctctaaggaggatgtgctgcagtgcatgggggatgtttcttcctgggtgtggctgggctgctctcacatacagaggccgaggggccaattcgttctctgccacagggacttgcctcactgtgtcccaaaaacaaatcgcagccagcttttccagaaatagaaaattctgccgtctgaggttttatacttcaggttagttagtttttggaaggaagaacatttttaggtttgcaagcctcctgatcaggaaaccagaaataccacatttatggaccatgaaaggttggttcttgactctgaagggacttttgagttaatcagcgtaaggggatttctaaagcaggcaatccctgtagccgcagagaataaacgccttcccaaaatggcaacttcccacagccacatttcagacctgctgagactgctgagtgaggaatggcagtgaggtttcttcaattagtctcagttctcttaattttcaggaagaaagggaaattgcagcccctcagcccccaggattgacctctggggagtgatggtagcgttggtgccaggccgtgggttcaggtgtggcagaagcttgcagatgcgtccgaagggaaataaagtgtgttggcgttagactttgtgctgca

SEQ ID NO: 259131 - DNA, 714 bp, Artificial Sequence
  derived and/or modified sequence
atggccgccgtgagagtgctggtggccagcagactggccgccgccagcgccttcaccagcctgagccccggcggcagaacccccagccagagagccgccctgcacctgagcgtgcccagacccgccgccagagtggccctggtgctgagcggctgcggcgtgtacgacggcaccgagatccacgaggccagcgccatcctggtgcacctgagcagaggcggcgccgaggtgcagatcttcgcccccgacgtgccccagatgcacgtgatcgaccacaccaagggccagcccagcgagggcgagagcagaaacgtgctgaccgagagcgccagaatcgccagaggcaagatcaccgacctggccaacctgagcgccgccaaccacgacgccgccatcttccccggcggcttcggcgccgccaagaacctgctgtgctgcatcgcccccgtgctggccgccaaggtgctgagaggcgtggaggtgaccgtgggccacgagcaggaggagggcggcaagtggccctacgccggcaccgccgaggccatcaaggccctgggcgccaagcactgcgtgaaggaggtggtggaggcccacgtggaccagaagaacaaggtggtgaccacccccgccttcatgtgcgagaccgccctgcactacatccacgacggcatcggcgccatggtgagaaaggtgctggagctgaccggcaagtag

SEQ ID NO: 259132 - protein, 172 aa, Artificial Sequence
  derived and/or modified sequence
MPRRAENWDEAEVGAEEAGVEEYGPEEDGGEESGAEESGPEESGPEELGAEEEMEAGRPRPVLRSVNSREPSQVIFCNRSPRVVLPVWLNFDGEPQPYPTLPPGTGRRIHSYRVYTLKERCLQVVRSLVKPENYRRLDIVRSLYEDLEDHPNVQKDLERLTQERIAHQRMGD

SEQ ID NO: 259133 - DNA, 519 bp, Artificial Sequence
  derived and/or modified sequence
atgcccagaagagccgagaactgggacgaggccgaggtgggcgccgaggaggccggcgtggaggagtacggccccgaggaggacggcggcgaggagagcggcgccgaggagagcggccccgaggagagcggccccgaggagctgggcgccgaggaggagatggaggccggcagacccagacccgtgctgagaagcgtgaacagcagagagcccagccaggtgatcttctgcaacagaagccccagagtggtgctgcccgtgtggctgaacttcgacggcgagccccagccctaccccaccctgccccccggcaccggcagaagaatccacagctacagagtgtacaccctgaaggagagatgcctgcaggtggtgagaagcctggtgaagcccgagaactacagaagactggacatcgtgagaagcctgtacgaggacctggaggaccaccccaacgtgcagaaggacctggagagactgacccaggagagaatcgcccaccagagaatgggcgactag

SEQ ID NO: 259134 - DNA, 519 bp, Artificial Sequence
  derived and/or modified sequence
atgcctcgacgcgccgaaaactgggacgaggctgaggtcggggcagaagaggccggagtggaagagtatggccctgaggaggacggcggcgaggagagcggagccgaggaatctggccccgaagaatcaggccctgaagagctaggcgctgaggaagaaatggaagccggcaggccccggccggttttgcggagtgtgaactcccgggaaccatcccaggttattttctgtaataggtctcctcgagtggtactccccgtgtggctgaactttgatggagagcctcagccttaccctaccctgccgcccggtacaggtcgtcgaatccactcctaccgcgtgtacaccctgaaggagaggtgcttgcaagtagttagaagcctggtcaagcccgaaaactatagaagattagacattgtgaggtcgctatacgaggatctggaagaccatcctaacgttcagaaagacctcgagagattgactcaagagcgcatcgctcatcagaggatgggtgattag

SEQ ID NO: 259135 - DNA, 519 bp, Artificial Sequence
  derived and/or modified sequence
atgcccaggagagctgagaactgggatgaagctgaggtgggcgctgaggaggccggcgtggaggagtatggcccagaagaagatggaggagaggagagcggggctgaggagagcggccctgaggagagcggccctgaggagctgggcgctgaggaggagatggaggccggccggcccaggcctgtgctgcggtctgtgaacagccgggagcccagccaggtgatcttctgcaacagaagcccccgggtggtgctgcctgtgtggctgaactttgatggagagccccagccctaccccaccctgcccccaggcactggaagacgcatccacagctacagagtgtacaccctgaaggagcgctgcctgcaggtggtgcgcagcctggtgaagccagagaactacagaaggctggacatcgtgcgcagcctgtatgaggacctggaggaccaccccaacgtgcagaaggacctggagcggctgacccaggagagaattgcccaccagaggatgggagactag

SEQ ID NO: 259136 - DNA, 519 bp, Artificial Sequence
  derived and/or modified sequence
atgccccggcgggccgagaactgggacgaggccgaggtgggcgccgaagaggctggagtggaggagtacggccctgaagaggacggcggagaagagagtggtgccgaggagtctggacccgaggaatcaggccccgaggagctgggcgcagaagaagagatggaagccggccggccccggcccgtactgagatctgtgaactctcgagaaccctcgcaggtcatattttgtaacaggtcaccccgggtcgttttgcccgtatggttgaactttgatggcgaaccacagccttatccaacgctcccccctggaacagggagacggatccactcctaccgcgtctatactctcaaggaaaggtgtctgcaggttgttaggagtctggtgaaaccggagaattaccgtcgcctggacatagttaggtcactgtacgaggatctcgaagaccaccccaacgtccaaaaggacttggagcgtctcactcaggaacggatagctcaccagcggatgggtgactag

SEQ ID NO: 259137 - DNA, 519 bp, Artificial Sequence
  derived and/or modified sequence
atgccacgcagggccgaaaactgggatgaagctgaagttggcgcagaggaggccggagtcgaggaatacgggcctgaagaggacggtggagaggagtcaggagcagaagaaagcggccctgaggagtccggcccagaggaattgggcgctgaagaggagatggaggccggaaggccacgacccgtcctccgcagcgtgaatagccgcgagccatcacaagttatcttttgcaacaggtccccaagagttgttctgcctgtttggctgaactttgacggggagccacagccctatccgactctgccacccggaacggggagaagaattcactcctatcgcgtttatacactaaaggaacgctgtcttcaggtggttagaagcctcgtaaagcctgaaaactacagaaggctggacatagtccggagcttatatgaggatctggaagaccatccaaacgtgcagaaggacctggagcgtctcactcaggagcggattgcccaccagagaatgggggattag

SEQ ID NO: 259138 - DNA, 2696 bp, Artificial Sequence
  derived and/or modified sequence
cccgcgtccgacccgcggatcccgcggcgtccggcccgggtggtctggatcgcggagggaatgccccggagggcggagaactgggacgaggccgaggtaggcgcggaggaggcaggcgtcgaagagtacggccctgaagaagacggcggggaggagtcgggcgccgaggagtccggcccggaagagtccggcccggaggaactgggcgccgaggaggagatggaggccgggcggccgcggcccgtgctgcgctcggtgaactcgcgcgagccctcccaggtcatcttctgcaatcgcagtccgcgcgtcgtgctgcccgtatggctcaacttcgacggcgagccgcagccctacccaacgctgccgcctggcacgggccgccgcatccacagctaccgagtgtatactctgaaagagcgatgcctccaggttgtccggagcctagtcaagcctgagaattacaggagactggacatcgtcaggtcgctctacgaagatctggaagaccacccaaatgtgcagaaagacctggagcggctgacacaggagcgcattgcacatcaacggatgggagattgaagatttctgttgaaacttacactgtttcatctcagcttttgatggtactgatgagtcttgatctagatacaggactggttccttccttagtttcaaagtgtctcattctcagagtaaaataggcaccattgcttaaaagaaagttaactgacttcactaggcattgtgatgtttaggggcaaacatcacaaaatgtaatttaatgcctgcccattagagaagtatttatcaggagaaggtggtggcatttttgcttcctagtaagtcaggacagcttgtatgtaaggaggtttgtataagtaattcagtgggaattgcagcatatcgtttaattttaagaaggcattggcatctgcttttaatggatgtataatacatccattctacatccgtagcggttggtgacttgtctgcctcctgctttgggaagactgaggcatccgtgaggcagggacaagtctttctcctctttgagaccccagtgcctgcacatcatgagccttcagtcagggtttgtcagaggaacaaaccaggggacactttgttagaaagtgcttagaggttctgcctctatttttgttggggggtgggagaggggaccttaaaatgtgtacagtgaacaaatgtcttaaagggaatcatttttgtaggaagcattttttataattttctaagtcgtgcactttctcggtccactcttgttgaagtgctgttttattactgtttctaaactaggattgacattctacagttgtgataatagcatttttgtaacttgccatccgcacagaaaatacgagaaaatctgcatgtttgattatagtattaatggacaaataagtttttgctaaatgtgagtatttctgttcctttttgtaaatatgtgacattcctgattgatttgggtttttttgttgttgttgttttgttttgttttgtttttttgagatggagtctcactcttgtcacccaggctggagtgcagtggcgccatctcggctcactgcaacctctgcctcctgggttcacgtaatcctcctgagtagctgggattacaggcgcctgccaccacgctggccaatttttgtacttttagtagagacagtgtttcgtcatgttggccaggctggtttcaaactcctgacctcaggtgatccgcccacctcagcctcccaaaatggtgggattacaggtgtgtgggccaccgtgcctggctgattcagcattttttatcaggcaggaccaggtggcacttccacctccagcctctggtcctaccaatggattcatggagtagcctggactgtttcatagttttctaaatgtacaaattcttataggctagacttagattcattaactcaaattcaatgcttctatcagactcagttttttgtaactaatagatttttttttccacttttgttctactccttccctaatagctttttaaaaaaatctccccagtagagaaacatttggaaaagacagaaaactaaaaaggaagaaaaaagatccctattagatacacttcttaaatacaatcacattaacattttgagctatttccttccagcctttttagggcagattttggttggtttttacatagttgagattgtactgttcatacagttttataccctttttcatttaactttataacttaaatattgctctatgttagtataagcttttcacaaacattagtatagtctcccttttataattaatgtttgtgggtatttcttggcatgcatctttaattccttatcctagcctttgggcacaattcctgtgctcaaaaatgagagtgacggctggcatggtggctcccgcctgtaatcccagtactttggaaagccaaggtaagaggattgcttgagcccagaacttcaagatgagcctgggctcatagtgagaacccatctatacaaaaaatttttaaaaattagcatggcggcacacatctgtaatcctagctacttggcaggctgaggtgagaagatcattggagtttaggaattggaggctgcagtgagccatgagtatgccactgcactccagcctgggggacagagcaagaccctgcctcaaaaaaaaaaaaaaaaaaaaaa

SEQ ID NO: 259139 - protein, 413 aa, Artificial Sequence
  derived and/or modified sequence
MLEMLEYNHYQVQTHLENPTKYHIQQAQRQQVKQYLSTTLANKHANQVLSLPCPNQPGDHVMPPVPGSSAPNSPMAMLTLNSNCEKEGFYKFEEQNRAESECPGMNTHSRASCMQMDDVIDDIISLESSYNEEILGLMDPALQMANTLPVSGNLIDLYGNQGLPPPGLTISNSCPANLPNIKRELTESEARALAKERQKKDNHNLIERRRRFNINDRIKELGTLIPKSNDPDMRWNKGTILKASVDYIRKLQREQQRAKELENRQKKLEHANRHLLLRIQELEMQARAHGLSLIPSTGLCSPDLVNRIIKQEPVLENCSQDLLQHHADLTCTTTLDLTDGTITFNNNLGTGTEANQAYSVPTKMGSKLEDILMDDTLSPVGVTDPLLSSVSPGASKTSSRRSSMSMEETEHTC

SEQ ID NO: 259140 - DNA, 1242 bp, Artificial Sequence
  derived and/or modified sequence
atgctggagatgctggagtacaaccactaccaggtgcagacccacctggagaaccccaccaagtaccacatccagcaggcccagagacagcaggtgaagcagtacctgagcaccaccctggccaacaagcacgccaaccaggtgctgagcctgccctgccccaaccagcccggcgaccacgtgatgccccccgtgcccggcagcagcgcccccaacagccccatggccatgctgaccctgaacagcaactgcgagaaggagggcttctacaagttcgaggagcagaacagagccgagagcgagtgccccggcatgaacacccacagcagagccagctgcatgcagatggacgacgtgatcgacgacatcatcagcctggagagcagctacaacgaggagatcctgggcctgatggaccccgccctgcagatggccaacaccctgcccgtgagcggcaacctgatcgacctgtacggcaaccagggcctgcccccccccggcctgaccatcagcaacagctgccccgccaacctgcccaacatcaagagagagctgaccgagagcgaggccagagccctggccaaggagagacagaagaaggacaaccacaacctgatcgagagaagaagaagattcaacatcaacgacagaatcaaggagctgggcaccctgatccccaagagcaacgaccccgacatgagatggaacaagggcaccatcctgaaggccagcgtggactacatcagaaagctgcagagagagcagcagagagccaaggagctggagaacagacagaagaagctggagcacgccaacagacacctgctgctgagaatccaggagctggagatgcaggccagagcccacggcctgagcctgatccccagcaccggcctgtgcagccccgacctggtgaacagaatcatcaagcaggagcccgtgctggagaactgcagccaggacctgctgcagcaccacgccgacctgacctgcaccaccaccctggacctgaccgacggcaccatcaccttcaacaacaacctgggcaccggcaccgaggccaaccaggcctacagcgtgcccaccaagatgggcagcaagctggaggacatcctgatggacgacaccctgagccccgtgggcgtgaccgaccccctgctgagcagcgtgagccccggcgccagcaagaccagcagcagaagaagcagcatgagcatggaggagaccgagcacacctgctag

SEQ ID NO: 259141 - DNA, 1242 bp, Artificial Sequence
  derived and/or modified sequence
atgctggaaatgctggagtacaaccactaccaagttcaaacccatcttgagaacccaactaaatatcacatccagcaagctcagcgccagcaggtgaaacagtacctttccacaaccctggccaacaagcacgccaaccaggtactgagcctgccatgcccgaatcagcctggggaccacgttatgcctccagtccccgggagctcagcccctaattctcccatggcaatgcttacactgaattctaactgtgaaaaggaaggcttctataagttcgaagaacagaatcgggctgaatcagagtgtccggggatgaatacccattcccgcgccagttgcatgcaaatggatgacgtcatcgacgacatcatcagcctggagtctagctataacgaagagatattggggctgatggatccagctctgcaaatggccaacaccctgcctgtgagtgggaatcttatcgacctctacggtaaccaaggactacccccacccgggcttacaatctctaatagttgtcccgcaaatctgcccaatataaagagggaactcacagaatccgaggcacgggccctcgcaaaggaacgccaaaaaaaggacaatcacaacctcatcgagaggaggcgacgtttcaatataaatgaccgtatcaaggagcttggtacacttattcctaaatccaacgacccagacatgcgttggaataagggaacaattttaaaagcttctgtcgactatatcagaaagttacagcgggaacagcagcgcgcaaaggaactcgaaaataggcagaagaagctagagcacgccaatagacatttgctgctgaggatacaggaactggagatgcaggcacgagctcacggattatcactaatacctagcactggcctttgctctcccgaccttgtcaacagaattatcaaacaggaaccagtgctggaaaactgcagccaggacctactgcagcaccacgccgacctgacatgtacgaccacactcgatttgacagacggcaccattacctttaataacaacctaggaactggcaccgaggccaaccaggcctattcagtccctactaaaatggggtctaagctggaggatatcctcatggatgacacccttagccctgtgggcgtcaccgaccccttgctgagctctgtgagtccaggggcttccaaaacatcatcgcgcagatcttctatgtcaatggaggagaccgagcacacctgctag

SEQ ID NO: 259142 - DNA, 1242 bp, Artificial Sequence
  derived and/or modified sequence
atgctggagatgctggagtacaaccactaccaggtgcagacccacctggagaaccccaccaagtaccacatccagcaggcccagaggcagcaggtgaagcagtacctgagcaccaccctggccaacaagcacgccaaccaggtgctgagcctgccctgccccaaccagcccggggaccacgtgatgcctcctgtgcccggcagcagcgcccccaacagccccatggccatgctgaccctgaacagcaactgtgagaaggagggcttctacaagtttgaggagcagaacagagctgagagtgaatgtcctggcatgaacacccacagccgggccagctgcatgcagatggatgatgtgattgatgacatcatcagcctggagagcagctacaatgaggagatcctgggcctgatggaccctgccctgcagatggccaacaccctgcctgtgtctggcaacctgattgacctgtatggcaaccagggcctgcccccacctggcctgaccatcagcaacagctgcccagccaacctgcccaacatcaagcgggagctgacagagagcgaggcccgggccctggccaaggagcggcagaagaaggacaaccacaacctgattgaaagaagaagacgcttcaacatcaatgaccgcatcaaggagctgggcaccctcatccccaagagcaatgaccctgacatgcgctggaacaagggcaccatcctgaaggcctctgtggactacatcaggaagctgcagcgggagcagcagagggccaaggagctggagaaccggcagaagaagctggagcacgccaacagacacctgctgctgcgcatccaggagctggagatgcaggcccgggcccacggcctgagcctcatccccagcacaggcctgtgcagcccagacctggtgaaccgcatcatcaagcaggagcctgtgctggagaactgcagccaggacctgctgcagcaccacgccgacctgacctgcaccaccaccctggacctgacagatggcaccatcaccttcaacaacaacctgggcaccggcacagaggccaaccaggcctacagcgtgcccaccaagatgggcagcaagctggaggacatcctgatggatgacaccctgagccctgtgggcgtgacagaccccctgctgagctctgtgtcccctggggccagcaagaccagcagccgccgcagctccatgtccatggaggagacagagcacacctgctag

SEQ ID NO: 259143 - DNA, 1242 bp, Artificial Sequence
  derived and/or modified sequence
atgctggagatgctggagtacaaccactaccaggtgcagacccacttggagaatccaacaaagtatcacattcagcaggcccagcgccaacaagtgaagcagtacctgagtactactctagcaaataaacatgccaatcaggtcctaagcttgccctgtccaaatcagcccggtgaccacgtcatgcctcccgtgccagggagtagtgcacctaatagtccaatggccatgctgacgctcaactccaattgtgaaaaggaggggttctacaaatttgaggaacagaatcgagctgaaagcgagtgcccaggaatgaatacccactccagggcgagttgtatgcagatggatgacgtgatagacgacattatatcactggagtcctcctacaacgaagaaatacttggcttgatggatccggcactgcagatggctaacacattgcccgtctctgggaatctaattgacctatatggaaatcagggcctgccaccaccaggcctgaccatatccaattcctgcccggcaaatctgccaaatatcaaaagagagcttacagaatccgaggctcgagcgctggccaaggaacgccagaagaaagataaccataaccttatcgagagacgccgacgctttaatatcaacgacagaataaaggagctgggcacgctgatccccaagtctaacgacccagacatgaggtggaacaagggtaccatactgaaagcgtccgtagattatatcagaaagttgcagcgggaacagcaaagggcaaaagagttggagaatcggcagaagaagctagaacatgctaaccgccatctgctacttcgtatccaggagttagaaatgcaggcaagggctcacggcctctccttgattccttctacaggattatgctctcctgatctggttaaccggattattaagcaggagcccgttctggaaaattgcagccaagacttactgcagcaccacgccgacttgacatgcacaacaacccttgacttgactgatgggactattactttcaataacaacctgggcaccggaactgaggcgaaccaagcgtactcggtgccaactaagatgggatccaaactggaggatattttgatggacgacacacttagcccagtcggggtaacagaccccctgctgtcaagtgtgtctccaggagcaagcaaaacctctagcagacgctcctcaatgtcgatggaagaaactgagcatacatgttag

SEQ ID NO: 259144 - DNA, 1242 bp, Artificial Sequence
  derived and/or modified sequence
atgcttgaaatgttggagtacaatcactatcaagtgcagacacatctggagaatcccacaaaataccatatccaacaggcgcagagacagcaagttaagcagtacctgtctacaacgctggccaataagcacgccaatcaagttcttagcctaccctgccccaaccagccaggggatcacgttatgcctcccgtaccaggctcctcagcgcctaatagccctatggcaatgctcacattgaacagcaattgcgaaaaggaaggcttctacaaatttgaggagcaaaaccgggctgagagtgaatgtccgggaatgaacacccacagccgcgcttcatgtatgcagatggatgatgtgattgacgatattatcagcctggagagtagttataacgaagaaattttgggcttgatggacccggctctgcaaatggcgaatacactgccagtaagcgggaacctcatagacctgtacggcaaccagggattgccccctcctggactgaccatcagcaacagctgcccagccaaccttcctaacatcaaacgggaattaaccgaatccgaggcgagagcactggctaaagaaagacagaaaaaggacaaccacaacctgattgagcgacgcagacggtttaacatcaacgacagaatcaaggaactggggaccctgatacctaagtccaacgatcctgacatgagatggaataagggaacaatcttgaaggcttcagtggattatatccgaaaactgcagcgagagcaacaacgcgctaaggaattagaaaatcgtcagaagaagttggagcatgccaaccggcacctcctcctcaggatccaagaattagagatgcaggcaagagcgcacggtctatccctaattccaagcactgggttgtgttccccggatttggtcaatcgtattatcaaacaagagcccgttcttgaaaactgcagccaagatttgctccaacatcatgccgatctcacctgtaccactactttggatttgaccgacggtacaatcacatttaacaataaccttggtaccgggaccgaagccaaccaggcatacagtgttccgacgaaaatggggtccaagctcgaggacatacttatggatgacaccctttcacctgtcggcgtgactgatccgctacttagctccgtgagcccaggggcttcaaaaacaagttctaggagatcctctatgtctatggaggagaccgagcacacatgctag

SEQ ID NO: 259145 - DNA, 1798 bp, Artificial Sequence
  derived and/or modified sequence
tttccggtggtgtctcgggataccttgtttatagtaccttctctttgccagtccatcttcaaattggaattatagaaagtagagggagggatagtctaccgtctctcactggattggtgccacctaaaacattgttatgctggaaatgctagaatataatcactatcaggtgcagacccacctcgaaaaccccaccaagtaccacatacagcaagcccaacggcagcaggtaaagcagtacctttctaccactttagcaaataaacatgccaaccaagtcctgagcttgccatgtccaaaccagcctggcgatcatgtcatgccaccggtgccggggagcagcgcacccaacagccccatggctatgcttacgcttaactccaactgtgaaaaagagggattttataagtttgaagagcaaaacagggcagagagcgagtgcccaggcatgaacacacattcacgagcgtcctgtatgcagatggatgatgtaatcgatgacatcattagcctagaatcaagttataatgaggaaatcttgggcttgatggatcctgctttgcaaatggcaaatacgttgcctgtctcgggaaacttgattgatctttatggaaaccaaggtctgcccccaccaggcctcaccatcagcaactcctgtccagccaaccttcccaacataaaaagggagctcacagagtctgaagcaagagcactggccaaagagaggcagaaaaaggacaatcacaacctgattgaacgaagaagaagatttaacataaatgaccgcattaaagaactaggtactttgattcccaagtcaaatgatccagacatgcgctggaacaagggaaccatcttaaaagcatccgtggactatatccgaaagttgcaacgagaacagcaacgcgcaaaagaacttgaaaaccgacagaagaaactggagcacgccaaccggcatttgttgctcagaatacaggaacttgaaatgcaggctcgagctcatggactttcccttattccatccacgggtctctgctctccagatttggtgaatcggatcatcaagcaagaacccgttcttgagaactgcagccaagacctccttcagcatcatgcagacctaacctgtacaacaactctcgatctcacggatggcaccatcaccttcaacaacaacctcggaactgggactgaggccaaccaagcctatagtgtccccacaaaaatgggatccaaactggaagacatcctgatggacgacaccctttctcccgtcggtgtcactgatccactcctttcctcagtgtcccccggagcttccaaaacaagcagccggaggagcagtatgagcatggaagagacggagcacacttgttagcgaatcctccctgcactgcattcgcacaaactgcttcctttcttgattcgtagatttaataacttacctgaaggggttttcttgataattttcctttaatatgaaattttttttcatgctttatcaatagcccaggatatattttatttttagaattttgtgaaacagacttgtatattctattttacaactacaaatgcctccaaagtattgtacaaataagtgtgcagtatctgtgaactgaattcaccacagactttagctttctgagcaagaggattttgcgtcagagaaatgtctgtccatttttattcaggggaaacttgatttgagatttttatgcctgtgacttccttggaaatcaaatgtaaagtttaattgaaagaatgtaaagcaaccaaaaagaaaaaaaaaaagaaa

SEQ ID NO: 259146 - protein, 520 aa, Artificial Sequence
  derived and/or modified sequence
MQSESGIVPDFEVGEEFHEEPKTYYELKSQPLKSSSSAEHPGASKPPISSSSMTSRILLRQQLMREQMQEQERREQQQKLQAAQFMQQRVPVSQTPAINVSVPTTLPSATQVPMEVLKVQTHLENPTKYHIQQAQRQQVKQYLSTTLANKHANQVLSLPCPNQPGDHVMPPVPGSSAPNSPMAMLTLNSNCEKEGFYKFEEQNRAESECPGMNTHSRASCMQMDDVIDDIISLESSYNEEILGLMDPALQMANTLPVSGNLIDLYGNQGLPPPGLTISNSCPANLPNIKRELTESEARALAKERQKKDNHNLIERRRRFNINDRIKELGTLIPKSNDPDMRWNKGTILKASVDYIRKLQREQQRAKELENRQKKLEHANRHLLLRIQELEMQARAHGLSLIPSTGLCSPDLVNRIIKQEPVLENCSQDLLQHHADLTCTTTLDLTDGTITFNNNLGTGTEANQAYSVPTKMGSKLEDILMDDTLSPVGVTDPLLSSVSPGASKTSSRRSSMSMEETEHTC

SEQ ID NO: 259147 - protein, 468 aa, Artificial Sequence
  derived and/or modified sequence
MTSRILLRQQLMREQMQEQERREQQQKLQAAQFMQQRVPVSQTPAINVSVPTTLPSATQVPMEVLKVQTHLENPTKYHIQQAQRQQVKQYLSTTLANKHANQVLSLPCPNQPGDHVMPPVPGSSAPNSPMAMLTLNSNCEKEGFYKFEEQNRAESECPGMNTHSRASCMQMDDVIDDIISLESSYNEEILGLMDPALQMANTLPVSGNLIDLYGNQGLPPPGLTISNSCPANLPNIKRELTESEARALAKERQKKDNHNLIERRRRFNINDRIKELGTLIPKSNDPDMRWNKGTILKASVDYIRKLQREQQRAKELENRQKKLEHANRHLLLRIQELEMQARAHGLSLIPSTGLCSPDLVNRIIKQEPVLENCSQDLLQHHADLTCTTTLDLTDGTITFNNNLGTGTEANQAYSVPTKMGSKLEDILMDDTLSPVGVTDPLLSSVSPGASKTSSRRSSMSMEETEHTC

SEQ ID NO: 259148 - DNA, 1563 bp, Artificial Sequence
  derived and/or modified sequence
atgcagagcgagagcggcatcgtgcccgacttcgaggtgggcgaggagttccacgaggagcccaagacctactacgagctgaagagccagcccctgaagagcagcagcagcgccgagcaccccggcgccagcaagccccccatcagcagcagcagcatgaccagcagaatcctgctgagacagcagctgatgagagagcagatgcaggagcaggagagaagagagcagcagcagaagctgcaggccgcccagttcatgcagcagagagtgcccgtgagccagacccccgccatcaacgtgagcgtgcccaccaccctgcccagcgccacccaggtgcccatggaggtgctgaaggtgcagacccacctggagaaccccaccaagtaccacatccagcaggcccagagacagcaggtgaagcagtacctgagcaccaccctggccaacaagcacgccaaccaggtgctgagcctgccctgccccaaccagcccggcgaccacgtgatgccccccgtgcccggcagcagcgcccccaacagccccatggccatgctgaccctgaacagcaactgcgagaaggagggcttctacaagttcgaggagcagaacagagccgagagcgagtgccccggcatgaacacccacagcagagccagctgcatgcagatggacgacgtgatcgacgacatcatcagcctggagagcagctacaacgaggagatcctgggcctgatggaccccgccctgcagatggccaacaccctgcccgtgagcggcaacctgatcgacctgtacggcaaccagggcctgcccccccccggcctgaccatcagcaacagctgccccgccaacctgcccaacatcaagagagagctgaccgagagcgaggccagagccctggccaaggagagacagaagaaggacaaccacaacctgatcgagagaagaagaagattcaacatcaacgacagaatcaaggagctgggcaccctgatccccaagagcaacgaccccgacatgagatggaacaagggcaccatcctgaaggccagcgtggactacatcagaaagctgcagagagagcagcagagagccaaggagctggagaacagacagaagaagctggagcacgccaacagacacctgctgctgagaatccaggagctggagatgcaggccagagcccacggcctgagcctgatccccagcaccggcctgtgcagccccgacctggtgaacagaatcatcaagcaggagcccgtgctggagaactgcagccaggacctgctgcagcaccacgccgacctgacctgcaccaccaccctggacctgaccgacggcaccatcaccttcaacaacaacctgggcaccggcaccgaggccaaccaggcctacagcgtgcccaccaagatgggcagcaagctggaggacatcctgatggacgacaccctgagccccgtgggcgtgaccgaccccctgctgagcagcgtgagccccggcgccagcaagaccagcagcagaagaagcagcatgagcatggaggagaccgagcacacctgctag

SEQ ID NO: 259149 - DNA, 1563 bp, Artificial Sequence
  derived and/or modified sequence
atgcagagtgaaagtggtatagtgcctgatttcgaagtaggcgaagagttccatgaggaaccaaaaacatattatgagctcaagagccaaccactgaagtctagctcatccgctgaacaccccggagcgagcaagccgccgatctcttccagctcaatgacatccagaatcctcctgagacagcagctgatgagagagcaaatgcaggagcaggagagacgggagcaacagcaaaaactgcaagccgcacagttcatgcagcagcgggtgccagtttcccaaacacccgctattaacgtgtccgttcccaccacattaccctcagcgacccaggtccccatggaggtcctgaaggttcagacacatcttgagaaccctaccaagtatcacatacagcaggcccaacgtcaacaagttaaacagtacctgtccacaaccttggctaataagcacgctaaccaggtgctctccctgccatgcccgaatcaaccgggggaccacgtgatgcctcctgtgccagggagctcggctcctaacagtcccatggccatgttgactctcaatagcaactgcgaaaaggagggcttttacaaattcgaggaacagaaccgcgccgagtccgagtgccccgggatgaatacccattcccgtgcttcatgcatgcagatggatgatgtaattgatgacataattagtctggaatcttcttacaacgaggagattctgggcttgatggacccggctctccaaatggcgaataccctgcctgtgtccgggaacctgatcgacctgtacggcaaccagggcctgccaccacctgggctcacaatctccaattcatgtccggcgaacctgcccaacatcaagcgcgaactgacagagagtgaagcccgcgccctagcaaaagaacgacagaagaaggacaaccacaatctaatcgaaagacgtcgtcgattcaatatcaacgatagaatcaaagaactgggtacacttatccccaaaagcaacgacccagacatgcggtggaataagggaacaatactcaaggcaagtgtcgactacattcgcaagcttcagcgcgagcagcaaagggctaaagagctcgaaaataggcagaagaaactggagcacgccaatcgccacttgctgttgcggatccaggagctggaaatgcaggctcgtgctcacggactgtccctaatcccctctactggcctatgtagtccagacctggtgaaccgcatcattaagcaggaaccggtgcttgagaactgttctcaggatctcctccagcaccacgccgatctcacatgcactacgacattagacctgacagatggaacaattaccttcaacaacaacctcgggacagggacagaagccaatcaagcctacagcgtgcccactaagatgggaagtaaactagaggatattctgatggacgatactctttccccagtaggcgtgactgacccattactgtcaagcgtgtctccgggggcctcaaagaccagttctaggagatcttccatgagtatggaagagacagagcatacatgttag

SEQ ID NO: 259150 - DNA, 1563 bp, Artificial Sequence
  derived and/or modified sequence
atgcagagcgagagcggcatcgtgcctgactttgaggtgggggaggagttccacgaggagcccaagacctactatgagctgaagagccagcccctgaagagcagcagcagcgctgagcaccctggggccagcaagccacccatcagcagcagctccatgaccagccgcatcctgctgcggcagcagctgatgagggagcagatgcaggagcaggagcggcgggagcagcagcagaagctgcaggccgcccagttcatgcagcagagggtgcctgtgtcccagaccccagccatcaacgtgtctgtgcccaccaccctgcccagcgccacccaggtgcccatggaggtgctgaaggtgcagacccacctggagaaccccaccaagtaccacatccagcaggcccagaggcagcaggtgaagcagtacctgagcaccaccctggccaacaagcacgccaaccaggtgctgagcctgccctgccccaaccagcccggggaccacgtgatgcctcctgtgcccggcagcagcgcccccaacagccccatggccatgctgaccctgaacagcaactgtgagaaggagggcttctacaagtttgaggagcagaacagagctgagagcgagtgccccggcatgaacacccacagccgggccagctgcatgcagatggatgatgtgattgatgacatcatcagcctggagagcagctacaatgaggagatcctgggcctgatggaccctgccctgcagatggccaacaccctgcctgtgtctggcaacctgattgacctgtatggcaaccagggcctgcccccacctggcctgaccatcagcaacagctgcccagccaacctgcccaacatcaagcgggagctgacagaaagtgaggcccgggccctggccaaggagcggcagaagaaggacaaccacaacctgattgaaagaagaagacgcttcaacatcaatgaccgcatcaaggagctgggcaccctcatccccaagagcaatgaccctgacatgcgctggaacaagggcaccatcctgaaggcctctgtggactacatcaggaagctgcagcgggagcagcagagggccaaggagctggagaaccggcagaagaagctggagcacgccaacagacacctgctgctgcgcatccaggagctggagatgcaggcccgggcccacggcctgagcctcatccccagcacaggcctgtgcagcccagacctggtgaaccgcatcatcaagcaggagcctgtgctggagaactgcagccaggacctgctgcagcaccacgccgacctgacctgcaccaccaccctggacctgacagatggcaccatcaccttcaacaacaacctgggcactggaacagaggccaaccaggcctacagcgtgcccaccaagatgggcagcaagctggaggacatcctgatggatgacaccctgagccctgtgggcgtgacagaccccctgctgagctctgtgtcccctggggccagcaagaccagcagcagaagaagctccatgtccatggaggagacagagcacacctgctag

SEQ ID NO: 259151 - DNA, 1563 bp, Artificial Sequence
  derived and/or modified sequence
atgcagagcgagagcggcatcgtgcccgacttcgaggtgggcgaggagtttcatgaggagcctaagacctattatgagctgaaatcacagcccctgaagtcttcgtcctcagcagaacatcctggtgccagcaagcccccgatttccagtagctccatgaccagtaggattctgttgagacaacaactgatgagggagcaaatgcaggaacaagagcggcgggaacagcaacagaaactgcaggccgcacaatttatgcagcagcgggtccccgtgagccaaacacccgctatcaatgttagcgtgcccacaactcttccttccgctacacaggtccctatggaagtgctaaaggtccagacacatctggaaaatccaaccaaatatcacatccagcaggcacagaggcagcaagtaaagcagtacctgtcaaccaccctggctaataaacacgcaaatcaggtactgtcgctgccatgcccaaatcagcccggcgaccatgtgatgcccccagtgcccggctcttccgcccccaactctcccatggcgatgctcaccttaaattcaaattgtgagaaagagggcttttataaatttgaggagcaaaacagggcggagagcgaatgtccgggtatgaatacccactccagggcttcatgcatgcaaatggacgatgtaattgacgacattatcagcctggaaagcagctacaacgaagagatcctaggcctcatggaccctgctctgcagatggccaatacgctgcccgtgtccggcaacctgattgacctgtatgggaaccagggcctgccacctcccggcctcactattagcaattcatgtccagctaaccttcctaacatcaaaagagaactgaccgagtcagaagcccgggcactggctaaggaaagacaaaagaaggataatcataatctgatcgagagaagacgtcggttcaacattaatgataggatcaaagagctggggacattaatccctaagtccaatgacccggacatgaggtggaataaaggaacaatcctcaaagcatccgtggactatatccgcaagctgcaaagagaacagcagagagctaaagaactggaaaaccggcagaaaaagctggagcatgcaaacagacacctgttattgagaatacaggaacttgaaatgcaggctagagcccacggcctgtccttaataccatctaccgggctgtgttccccagacctggtgaacagaatcatcaaacaggagccagtgttggaaaactgcagccaagacttactgcagcaccatgccgacctgacttgtacaaccacgctggatctgacagatggcacaattacatttaacaataacctgggaaccggcactgaagccaaccaggcatactcagtgcctacaaaaatgggttccaagttggaagatatattgatggatgacactctgtccccagtgggagttaccgacccgttgctgagttctgtgtcaccgggtgcttccaagacaagcagcaggaggagctcaatgtccatggaagaaaccgagcacacatgttag

SEQ ID NO: 259152 - DNA, 1563 bp, Artificial Sequence
  derived and/or modified sequence
atgcaatccgaaagtggaatcgtgcccgacttcgaggtaggcgaggaattccatgaagaaccaaaaacttactatgaactcaaatcacagcctctgaagagcagttcttccgccgaacaccccggtgcaagcaaaccacccattagttcctccagcatgaccagcagaatcctactgaggcagcaactcatgagggaacagatgcaggaacaagagcgtagagaacagcagcaaaagttgcaggctgcccagttcatgcagcaaagggtccccgtcagccagacccccgctataaatgtgagcgtccccacaaccctgccaagcgccacccaggtgccaatggaggtgttgaaggtccaaacccacctcgagaatcctaccaaatatcatatccagcaagcccagaggcagcaagtgaaacaatacctcagcacaacgctcgccaacaagcatgcaaaccaagtactatcactgccttgtccgaatcaaccaggcgaccacgtgatgccgccagtgcccggaagcagcgccccaaattcccccatggcaatgttgaccctcaatagcaactgcgaaaaagaggggttctacaagttcgaggaacagaatcgcgcagagtccgaatgcccgggaatgaacacacattctagagcatcctgcatgcaaatggacgacgtcatcgacgatataatatcgctggagagtagctataatgaggagatattaggactcatggatccggctttacaaatggccaacactctacctgtttctggtaacctcatcgatctgtacggtaatcagggactgccgccacccggtctcactatctccaactcttgccccgctaacttgcctaatattaaacgcgaacttaccgagagtgaagcacgcgcactagccaaagagagacagaaaaaagataaccacaatctgatagagcggaggagaagatttaacatcaacgaccgcatcaaggaactggggacccttatcccgaagagcaatgatcccgatatgcggtggaataaaggcacaatcctgaaggcctctgtagactatatcagaaaactccaaagggagcagcaacgggctaaagaactggagaacagacagaaaaaactcgagcatgctaaccggcatctgctgcttaggatccaggagctcgaaatgcaagctcgggctcatggcctgtcacttatcccctcaactgggctgtgctcacctgatctggttaacaggatcattaagcaagagccagtgctcgagaactgctcacaggacctgctgcagcatcatgccgacttaacatgtaccacaaccctcgacctgacggatggaaccattaccttcaataacaatctgggaactggaaccgaagcgaaccaagcatatagcgtacccactaagatgggctccaaacttgaggatatcttgatggacgatactctgtcacccgtgggtgtgaccgacccattgctgtctagcgtgagtcccggtgcatcgaaaacgagctctaggcgcagctcaatgtctatggaggaaactgagcacacttgctag

SEQ ID NO: 259153 - DNA, 4814 bp, Artificial Sequence
  derived and/or modified sequence
gtaaactccccgcgctggggcgggcggccgcgagccggcgagcgggcagagctcggcactgcgccggggcgcacggctcgggggacccaggcccagctaccttccctccgcccccgggctctgttctcactttccagcagtggaaggacgggaagcgggagccatgcagtccgaatcggggatcgtgccggatttcgaagtcggggaggagtttcatgaagagcccaaaacctattacgaactcaaaagtcaaccgctgaagagcagcagttccgccgagcatcctggggcctccaagcctccgataagctcctccagtatgacatcacgcatcttgctacgccagcaactcatgcgtgagcagatgcaggagcaggagcgcagggagcagcagcagaagctgcaggcggcccagttcatgcaacagagagtgcccgtgagtcagacaccagccataaacgtcagtgtgcccaccacccttccctctgccacgcaggtgccgatggaagtccttaaggtgcagacccacctcgaaaaccccaccaagtaccacatacagcaagcccaacggcagcaggtaaagcagtacctttctaccactttagcaaataaacatgccaaccaagtcctgagcttgccatgtccaaaccagcctggcgatcatgtcatgccaccggtgccggggagcagcgcacccaacagccccatggctatgcttacgcttaactccaactgtgaaaaagagggattttataagtttgaagagcaaaacagggcagagagcgagtgcccaggcatgaacacacattcacgagcgtcctgtatgcagatggatgatgtaatcgatgacatcattagcctagaatcaagttataatgaggaaatcttgggcttgatggatcctgctttgcaaatggcaaatacgttgcctgtctcgggaaacttgattgatctttatggaaaccaaggtctgcccccaccaggcctcaccatcagcaactcctgtccagccaaccttcccaacataaaaagggagctcacagagtctgaagcaagagcactggccaaagagaggcagaaaaaggacaatcacaacctgattgaacgaagaagaagatttaacataaatgaccgcattaaagaactaggtactttgattcccaagtcaaatgatccagacatgcgctggaacaagggaaccatcttaaaagcatccgtggactatatccgaaagttgcaacgagaacagcaacgcgcaaaagaacttgaaaaccgacagaagaaactggagcacgccaaccggcatttgttgctcagaatacaggaacttgaaatgcaggctcgagctcatggactttcccttattccatccacgggtctctgctctccagatttggtgaatcggatcatcaagcaagaacccgttcttgagaactgcagccaagacctccttcagcatcatgcagacctaacctgtacaacaactctcgatctcacggatggcaccatcaccttcaacaacaacctcggaactgggactgaggccaaccaagcctatagtgtccccacaaaaatgggatccaaactggaagacatcctgatggacgacaccctttctcccgtcggtgtcactgatccactcctttcctcagtgtcccccggagcttccaaaacaagcagccggaggagcagtatgagcatggaagagacggagcacacttgttagcgaatcctccctgcactgcattcgcacaaactgcttcctttcttgattcgtagatttaataacttacctgaaggggttttcttgataattttcctttaatatgaaattttttttcatgctttatcaatagcccaggatatattttatttttagaattttgtgaaacagacttgtatattctattttacaactacaaatgcctccaaagtattgtacaaataagtgtgcagtatctgtgaactgaattcaccacagactttagctttctgagcaagaggattttgcgtcagagaaatgtctgtccatttttattcaggggaaacttgatttgagatttttatgcctgtgacttccttggaaatcaaatgtaaagtttaattgaaagaatgtaaagcaaccaaaaagaaaaaaaaaaagaaagaaagaggaaaagaaatccatactaacccttttccattttataaatgtattgattcattggtactgccttaaagatacagtacccctctagctttgtttagtctttatactgcaaactatttaaagaaatatgtattctgtaaaagaaaaaaaaaatgcggccttttcatgaggatcgtctggttagaaaacataactgataccaaccgaaactgaagggagttagaccaaggctctgaaatataaagtctaatcttgctctcttttattctgtgctgttacagttttcttcatcaatgagtgtgatccagtttttcataagatattttattttgaaatggaaattaatgtcctctcaaagtaaaatattgaggagcactgaaagtatgttttactttttttttattttatttttgcttttgataagaaaaccgaactgggcatatttctaattggctttactatttttatttttaaattatgttttactgttcatttgatttgtacagattctttattatcattgttcttttcaatatatttgtattaatttgtaagaatatgcatcttaaaatggcaagttttccatatttttacaactcactggtggttttccgcattctttgtacacccatgaaagaaaacttttatgcaaggtcttgcatttaaaagacagctttgcgaatattttgtaaattacagtctcactcagaactgtttttggacacatttaaggtgtagtattaataggttaaaaccaggctttctagaaagaataaacttacatatttatttttaggacatgaaaatagcaatattcttggagattgataaccatagcattaatacgcccattatggtcatttaaattggggtttatttcagcaaacttgttgaatttatttttaagaaagaaatactgtattgggaagttactgttacttgataacaatgttttaacaagaagcaatgttataaagttagtttcagtgcattatctacttgtgtagtcctatgcaataacagtagtgttacatgtatcaagcctagatgttttatacagatgccatatagtgttatgagccaggctgttgaatggaatttctcagtagcagcctacaactgaatagcaagtggcataaagcatatccattcagaatgaagtgccttaaatatagcagtagtcttttttggactagcactgactgaactgtaatgtaggggaaagtttcatgatggtatctatagtcaagacgaacatgtagcatggtgcctatgtagacaatataagagcttccaattttccttcagatatttttaatattaaatatattttagtgacagagtgccaacttctttcatcaggaaaccttattcaggagggtttttaaaaagtgtttaaatgtcaaatgtgaattggtgatgggtgatggagggttcagagaggagtgatcgtcagatgtgtgaatggacggtttaggtgaaaataatcaactgcatagttcccatgcacgctgggcaatgagaatccttggaaacattggtgatgctatcagttttatagctttatttcttaagggggtagggaaaattagttcccattctttcaacccccttaactgtatagctcttttcctagaatagtgacgcaaatctgcatgaacagctaattgtaccatagtgttcattgatacaatcatagcattgtctatttttctcttcatatttatatgggggggagggcgctggatgcaaaagttgaagatcgtgatgctatgatgttagttttccttagctgattttgagggtttttaaaaataaagcaaggttgactaacctacggccacgggaacaggaccatggttaagcaaccatatagaaagctttgttgaaagaaagtatggcatcttgtaccactgccctgactgtcacaactcctaaccttgccattgcctgcctccccctccccttctccttaagagacaatttctgcaggtggcaggtgagcaagcccaggagaatgctgcaatcttgggggtggttttatttatttcttttttgccaaatagagtgtggattcatttcaggggctagctaagccaagaggcagtggtttgggcttgttgtttgtaacaagaaaatgatccacaccactcccccgattcccgggtgcagaattgtaactcggggttgggcctctatatggagtgaccaaaatgccaaaattgtccatctgcctctgagtagggcaatggaaataccaaaccttctgactttgccaaaaagcatacaagcaacctggtcatacataggatgacaaaattctttctggttgtttttaaacaataaagcaataagaacaaatacaatacataggaagttaaaagcacaaaggaatgaacttattaatatttttgaaaaatgcactgggaaaaagttgatgtcaataacagtataaaacagccctatttcttgataaaaaatgacaaatgactgtctcttgcggatgcttggtactgtaatgttaataatagtcacctgctgttggatgcagcaataatttctgtatggtccatagcactgtatattatggatcgatattaatgtatccaatgaaataatcgacttgttcttgatagcctcattaaagcatttggtttttcacata

SEQ ID NO: 259154 - protein, 177 aa, Artificial Sequence
  derived and/or modified sequence
MVLLSTLGIVFQGEGPPISSCDTGTMANCERTFIAIKPDGVQRGLVGEIIKRFEQKGFRLVGLKFMQASEDLLKEHYVDLKDRPFFAGLVKYMHSGPVVAMVWEGLNVVKTGRVMLGETNPADSKPGTIRGDFCIQVGRNIIHGSDSVESAEKEIGLWFHPEELVDYTSCAQNWIYE

SEQ ID NO: 259155 - protein, 152 aa, Artificial Sequence
  derived and/or modified sequence
MANCERTFIAIKPDGVQRGLVGEIIKRFEQKGFRLVGLKFMQASEDLLKEHYVDLKDRPFFAGLVKYMHSGPVVAMVWEGLNVVKTGRVMLGETNPADSKPGTIRGDFCIQVGRNIIHGSDSVESAEKEIGLWFHPEELVDYTSCAQNWIYE

SEQ ID NO: 259156 - protein, 60 aa, Artificial Sequence
  derived and/or modified sequence
MVLLSTLGIVFQGEGPPISSCDTGTMANCERTFIAIKPDGVQRGLVGEIIKRFEQKGFRL

SEQ ID NO: 259157 - DNA, 534 bp, Artificial Sequence
  derived and/or modified sequence
atggtgctgctgagcaccctgggcatcgtgttccagggcgagggcccccccatcagcagctgcgacaccggcaccatggccaactgcgagagaaccttcatcgccatcaagcccgacggcgtgcagagaggcctggtgggcgagatcatcaagagattcgagcagaagggcttcagactggtgggcctgaagttcatgcaggccagcgaggacctgctgaaggagcactacgtggacctgaaggacagacccttcttcgccggcctggtgaagtacatgcacagcggccccgtggtggccatggtgtgggagggcctgaacgtggtgaagaccggcagagtgatgctgggcgagaccaaccccgccgacagcaagcccggcaccatcagaggcgacttctgcatccaggtgggcagaaacatcatccacggcagcgacagcgtggagagcgccgagaaggagatcggcctgtggttccaccccgaggagctggtggactacaccagctgcgcccagaactggatctacgagtag

SEQ ID NO: 259158 - DNA, 183 bp, Artificial Sequence
  derived and/or modified sequence
atggtgctgctgagcaccctgggcatcgtgttccagggcgagggcccccccatcagcagctgcgacaccggcaccatggccaactgcgagagaaccttcatcgccatcaagcccgacggcgtgcagagaggcctggtgggcgagatcatcaagagattcgagcagaagggcttcagactgtag

SEQ ID NO: 259159 - DNA, 534 bp, Artificial Sequence
  derived and/or modified sequence
atggttcttttaagtacactgggcattgtctttcagggagaggggcctcccatttcctcatgcgatactggcactatggcaaactgcgaacgtacctttatcgcgattaagccggacggcgtgcagagaggcctcgtgggggagatcatcaagcgctttgagcagaaggggtttcggctggttggtctcaaatttatgcaagcctccgaagatcttctgaaggagcactatgttgatcttaaggatcgccccttttttgcagggctggtgaaatatatgcacagcggtcccgtggtggcaatggtttgggagggattgaacgtggtgaaaaccggacgcgttatgctcggggagaccaacccagccgatagcaaacccggaacaatcagaggcgacttttgcattcaagtcgggagaaatattatccacggaagcgactctgtcgaatccgcagaaaaagagattggactatggttccacccagaagaattggttgattatactagctgtgcccagaactggatttatgagtag

SEQ ID NO: 259160 - DNA, 534 bp, Artificial Sequence
  derived and/or modified sequence
atggttctcctgtccacgctcggaatagtgtttcagggagaggggccgcctatttcctcctgcgacactggaacaatggcaaactgtgagaggacatttattgctatcaagccagatggtgtacagcgcgggttggtgggagaaattatcaagcgcttcgagcagaagggatttagactcgtgggtttgaagttcatgcaagcctctgaagacctgttaaaggagcattacgtcgatctgaaagacaggcctttctttgcgggactggtgaaatacatgcattcggggcccgtggtggctatggtgtgggaggggctcaacgttgtgaaaactggtagggtgatgttaggagaaactaatcccgccgactctaagcctggcaccattagaggtgatttctgtatacaggtcgggcgaaatattatccacggaagcgacagcgtcgagtcagccgaaaaggagattggtctttggtttcacccggaagagttggtcgattatacatcatgcgcccagaactggatttacgagtag

SEQ ID NO: 259161 - DNA, 183 bp, Artificial Sequence
  derived and/or modified sequence
atggtgctgctgagcactcttggcattgtttttcagggcgagggtcccccaattagttcctgcgatacagggacgatggcaaattgtgagagaacattcatagctatcaaacctgatggagtccagagagggctcgttggggagattatcaaaaggtttgaacaaaagggattccgcctatag

SEQ ID NO: 259162 - DNA, 534 bp, Artificial Sequence
  derived and/or modified sequence
atggtgctgctgagcaccctgggcatcgtgttccagggcgagggcccccccatcagcagctgtgacaccggcaccatggccaactgtgagaggaccttcatcgccatcaagccagatggagtgcagaggggcctggtgggggagatcatcaagagatttgagcagaagggcttccggctggtgggcctgaagttcatgcaggccagcgaggacctgctgaaggagcactacgtggacctgaaggaccggcccttctttgctggcctggtgaagtacatgcacagcggccctgtggtggccatggtgtgggagggcctgaatgtggtgaagacaggccgggtgatgctgggggagaccaacccagctgacagcaagccaggcaccatccggggggacttctgcatccaggtgggcaggaacatcatccacggcagtgacagcgtggagagcgctgagaaggagatcggcctgtggttccaccctgaggagctggtggactacaccagctgtgcccagaactggatctatgaatag

SEQ ID NO: 259163 - DNA, 183 bp, Artificial Sequence
  derived and/or modified sequence
atggtgctgctgagcaccctgggcatcgtgttccagggcgagggcccccccatcagcagctgtgacaccggcaccatggccaactgtgagaggaccttcatcgccatcaagccagatggagtgcagaggggcctggtgggggagatcatcaagagatttgagcagaagggcttccggctgtag

SEQ ID NO: 259164 - DNA, 534 bp, Artificial Sequence
  derived and/or modified sequence
atggtgctgctgagcaccctgggcatcgtgttccagggcgagggccctcctattagttcatgtgataccggcaccatggctaactgcgagagaacttttatcgctatcaaacctgatggtgttcaacgcggcttagtaggcgaaatcattaagaggttcgagcagaaaggcttccgattggtaggtctcaaatttatgcaggcgagtgaggatttattaaaagaacattatgtggatttgaaggataggcctttcttcgcaggtctggtcaaatatatgcactccggtcccgtcgtcgctatggtctgggaaggcctgaacgtcgtaaaaactggtagggtgatgctgggtgaaactaaccctgcagactccaagcctggaacaatcagaggagacttttgcattcaggtgggcaggaacatcattcatggatcagacagtgtcgaatccgctgagaaagagattgggctgtggttccatcccgaggagttagtggattatactagttgcgcccaaaattggatttacgaatag

SEQ ID NO: 259165 - DNA, 534 bp, Artificial Sequence
  derived and/or modified sequence
atggtgctgctgagcaccctgggcatcgtgttccagggcgagggccctcctatatctagttgtgatacaggaacaatggctaactgcgaacggacctttatcgccataaagcccgatggtgtccagagagggcttgttggagaaattatcaagcgattcgaacaaaaaggattcagactcgtcggactgaaattcatgcaagctagtgaagatcttcttaaagagcattacgtcgacttgaaagacagaccattttttgccggccttgtgaaatacatgcattccgggccagtggttgccatggtttgggagggactcaacgtggtgaaaacgggcagggtaatgctcggagaaacgaatccagcggactcaaagcccggtaccattaggggagatttttgcatccaggtcgggagaaacatcatccacgggagtgattccgtggagtctgcagagaaagagattggactctggtttcaccccgaagaactggtggattacactagttgtgctcagaactggatctatgagtag

SEQ ID NO: 259166 - DNA, 183 bp, Artificial Sequence
  derived and/or modified sequence
atggtgctgctgagcaccctgggcatcgtgttccagggcgagggcccgcctattagtagttgcgatactggcacaatggctaattgcgaacggacctttatagccatcaagcctgacggcgtgcagcgaggcttggtaggagaaatcataaaacgatttgagcagaaaggcttccggttatag

SEQ ID NO: 259167 - DNA, 796 bp, Artificial Sequence
  derived and/or modified sequence
aagaggtgttcgggatcctgagaggaaaaagaaaggagtgtagtcgcgggagtgggttaggccctgtggctaggtaccatagagtctctacacaggactaagtcagcctggtgtgcaggggaggcagacacacaaacagaaaattggactacagtgctaagatgctgtaagaagaggttaactaaaggacaggaagatggggccaagagatggtgctactgtctactttagggatcgtctttcaaggcgaggggcctcctatctcaagctgtgatacaggaaccatggccaactgtgagcgtaccttcattgcgatcaaaccagatggggtccagcggggtcttgtgggagagattatcaagcgttttgagcagaaaggattccgccttgttggtctgaaattcatgcaagcttccgaagatcttctcaaggaacactacgttgacctgaaggaccgtccattctttgccggcctggtgaaatacatgcactcagggccggtagttgccatggtctgggaggggctgaatgtggtgaagacgggccgagtcatgctcggggagaccaaccctgcagactccaagcctgggaccatccgtggagacttctgcatacaagttggcaggaacattatacatggcagtgattctgtggagagtgcagagaaggagatcggcttgtggtttcaccctgaggaactggtagattacacgagctgtgctcagaactggatctatgaatgacaggagggcagaccacattgcttttcacatccatttcccctccttcccatggg

SEQ ID NO: 259168 - DNA, 986 bp, Artificial Sequence
  derived and/or modified sequence
gtgcaagtgctgcgaaccacgtgggtcccgggcgcgtttcgggtgctggcggctgcagccggagttcaaacctaagcagctggaagggccctgtggctaggtaccatagagtctctacacaggactaagtcagcctggtgtgcaggggaggcagacacacaaacagaaaattggactacagtgctaagatgctgtaagaagaggttaactaaaggacaggaagatggggccaagagatggtgctactgtctactttagggatcgtctttcaaggcgaggggcctcctatctcaagctgtgatacaggaaccatggccaactgtgagcgtaccttcattgcgatcaaaccagatggggtccagcggggtcttgtgggagagattatcaagcgttttgagcagaaaggattccgccttgttggtctgaaattcatgcaagcttccgaagatcttctcaaggaacactacgttgacctgaaggaccgtccattctttgccggcctggtgaaatacatgcactcagggccggtagttgccatggtctgggaggggctgaatgtggtgaagacgggccgagtcatgctcggggagaccaaccctgcagactccaagcctgggaccatccgtggagacttctgcatacaagttggcaggaacattatacatggcagtgattctgtggagagtgcagagaaggagatcggcttgtggtttcaccctgaggaactggtagattacacgagctgtgctcagaactggatctatgaatgacaggagggcagaccacattgcttttcacatccatttcccctccttcccatgggcagaggaccaggctgtaggaaatctagttatttacaggaacttcatcataatttggagggaagctcttggagctgtgagttctccctgtacagtgttaccatccccgaccatctgattaaaatgcttcctcccagcataggattcattgagttggttacttca

SEQ ID NO: 259169 - DNA, 940 bp, Artificial Sequence
  derived and/or modified sequence
gggctctccggcagcggatctgcgcagaagcgttccgtgcgtgcaagtgctgcgaaccacgtgggtcccgggcgcgtttcgggtgctggcggctgcagccggagttcaaacctaagcagctggaaggaaccatggccaactgtgagcgtaccttcattgcgatcaaaccagatggggtccagcggggtcttgtgggagagattatcaagcgttttgagcagaaaggattccgccttgttggtctgaaattcatgcaagcttccgaagatcttctcaaggaacactacgttgacctgaaggaccgtccattctttgccggcctggtgaaatacatgcactcagggccggtagttgccatggtctgggaggggctgaatgtggtgaagacgggccgagtcatgctcggggagaccaaccctgcagactccaagcctgggaccatccgtggagacttctgcatacaagttggcaggaacattatacatggcagtgattctgtggagagtgcagagaaggagatcggcttgtggtttcaccctgaggaactggtagattacacgagctgtgctcagaactggatctatgaatgacaggagggcagaccacattgcttttcacatccatttcccctccttcccatgggcagaggaccaggctgtaggaaatctagttatttacaggaacttcatcataatttggagggaagctcttggagctgtgagttctccctgtacagtgttaccatccccgaccatctgattaaaatgcttcctcccagcataggattcattgagttggttacttcatattgttgcattgcttttttttccttcttttcatgtacactgaataacctgacctaatagagagtgtaaatactataaaaatgatttattttgaggtctcacatacacacaggcattctttgcctgcccttctt

SEQ ID NO: 259170 - DNA, 510 bp, Artificial Sequence
  derived and/or modified sequence
ggacatttttagggtgtatttctggcgctttagtcctgttttctcctggacaatttatgcttgccccgcaccccatcgtgcgattctccgcagtctttgggctttgtctctctctctttttttttttttggaagttgcagaatggtgataaatgattttctttgctcctattgactgctaggccctgtggctaggtaccatagagtctctacacaggactaagtcagcctggtgtgcaggggaggcagacacacaaacagaaaattggactacagtgctaagatgctgtaagaagaggttaactaaaggacaggaagatggggccaagagatggtgctactgtctactttagggatcgtctttcaaggcgaggggcctcctatctcaagctgtgatacaggaaccatggccaactgtgagcgtaccttcattgcgatcaaaccagatggggtccagcggggtcttgtgggagagattatcaagcgttttgagcagaaaggattccgcctt

SEQ ID NO: 259171 - DNA, 534 bp, Artificial Sequence
  derived and/or modified sequence
atggtgctgctgtctaccctgggaattgtgtttcaaggcgaaggacctcctatctcatcctgtgacacaggcacgatggccaactgtgagcgcacttttatcgcaattaagccagacggggtacagcgcggactagtgggggagattattaaacgctttgagcaaaaagggttcagacttgtcggcctgaaatttatgcaggcttcggaggacctacttaaggagcactacgtcgacttgaaagatcggccttttttcgcaggactggttaagtacatgcactctggccctgtcgtcgcgatggtatgggaaggccttaacgtggtcaagacagggagggtgatgctgggagaaacaaacccagctgactccaaaccaggaactatcaggggcgatttctgtatccaggtgggcaggaacattattcatggatcggattccgttgaatccgctgaaaaagagatcggcctatggttccaccctgaagagttggtagactataccagttgcgcccagaactggatctacgagtag

SEQ ID NO: 259172 - DNA, 534 bp, Artificial Sequence
  derived and/or modified sequence
atggtgctactttctactctcggcatagtcttccagggagaaggacctccgatttccagctgcgatactgggacaatggccaattgcgaaagaacgtttatcgccataaaacccgatggcgtgcagaggggcttggttggcgagatcattaagcgcttcgaacagaagggcttcaggcttgttggcctcaagtttatgcaggcaagtgaggatctgctgaaggagcactacgtcgaccttaaagatagacccttctttgctggcctggtaaaatatatgcactccggccctgtggtagctatggtgtgggagggtctaaacgtcgtaaagaccgggcgtgttatgctgggcgaaacaaatccagctgattcaaagcctggaacaatacgaggcgatttttgtattcaggtaggccgtaatatcatccatgggagcgactccgtggagtcggcggaaaaagagataggactgtggtttcatccagaggagctggtcgactacacttcgtgcgcccaaaactggatttatgaatag

SEQ ID NO: 259173 - DNA, 183 bp, Artificial Sequence
  derived and/or modified sequence
atggtcttgctcagcaccctcggaatcgtgttccagggcgagggcccacctatctcttcctgcgacacagggaccatggcgaactgtgaaaggacattcatcgctatcaaacccgacggagtccagagagggctggttggcgagatcattaagcggttcgaacagaaaggatttaggctgtag

SEQ ID NO: 259174 - DNA, 534 bp, Artificial Sequence
  derived and/or modified sequence
atggtgcttttgtcaacattgggcattgtctttcagggagagggcccaccaattagttcttgcgacacaggtactatggcgaattgtgaacgcactttcatcgcaataaagcctgatggcgtgcaacgcggcttagtgggagagataattaagcggttcgaacaaaagggatttcgtctagttgggctgaagtttatgcaggcctctgaagaccttctgaaggagcactacgttgatctgaaagatcggccattctttgcaggcctggtcaaatacatgcatagcggtcccgtcgtggcaatggtgtgggagggactcaatgtcgtaaaaaccgggagggtgatgttgggcgaaacaaaccccgcagatagtaagcccgggactatccgcggagacttttgcatccaagtggggagaaacataattcatggcagcgactcagtggaatccgccgagaaggaaattggcctttggtttcaccccgaagagcttgtggactacacgtcatgcgctcagaattggatctatgaatag

SEQ ID NO: 259175 - DNA, 534 bp, Artificial Sequence
  derived and/or modified sequence
atggttctgctgagtacactggggattgtatttcaaggcgagggtccccccatctcttcatgcgacacaggaacaatggcaaattgtgaacggaccttcatagcaatcaagcctgatggcgtgcagcgcggactggtaggggaaattatcaagcggtttgagcagaaagggttcagactagtgggactgaagttcatgcaagcttctgaggatttgttaaaggagcactatgttgaccttaaagaccggcccttcttcgccggcttggtaaaatacatgcattccggcccggtggtggcgatggtgtgggagggtttaaatgtggtaaaaaccgggagagtcatgttaggcgaaacaaatcccgccgatagcaaaccaggaactatcagaggagatttctgcattcaagtgggtagaaacattatccatggtagcgatagcgtggaaagtgccgagaaggagatcggtctatggttccaccctgaagagcttgtcgactatacgagttgcgcgcaaaattggatctatgaatag

SEQ ID NO: 259176 - RNA, 534 nt, Artificial Sequence
  derived and/or modified sequence
auggugcuuuugucaacauugggcauugucuuucagggagagggcccaccaauuaguucuugcgacacagguacuauggcgaauugugaacgcacuuucaucgcaauaaagccugauggcgugcaacgcggcuuagugggagagauaauuaagcgguucgaacaaaagggauuucgucuaguugggcugaaguuuaugcaggccucugaagaccuucugaaggagcacuacguugaucugaaagaucggccauucuuugcaggccuggucaaauacaugcauagcggucccgucguggcaauggugugggagggacucaaugucguaaaaaccgggagggugauguugggcgaaacaaaccccgcagauaguaagcccgggacuauccgcggagacuuuugcauccaaguggggagaaacauaauucauggcagcgacucaguggaauccgccgagaaggaaauuggccuuugguuucaccccgaagagcuuguggacuacacgucaugcgcucagaauuggaucuaugaauag

SEQ ID NO: 259177 - RNA, 534 nt, Artificial Sequence
  derived and/or modified sequence
augguucugcugaguacacuggggauuguauuucaaggcgaggguccccccaucucuucaugcgacacaggaacaauggcaaauugugaacggaccuucauagcaaucaagccugauggcgugcagcgcggacugguaggggaaauuaucaagcgguuugagcagaaaggguucagacuagugggacugaaguucaugcaagcuucugaggauuuguuaaaggagcacuauguugaccuuaaagaccggcccuucuucgccggcuugguaaaauacaugcauuccggcccggugguggcgauggugugggaggguuuaaaugugguaaaaaccgggagagucauguuaggcgaaacaaaucccgccgauagcaaaccaggaacuaucagaggagauuucugcauucaaguggguagaaacauuauccaugguagcgauagcguggaaagugccgagaaggagaucggucuaugguuccacccugaagagcuugucgacuauacgaguugcgcgcaaaauuggaucuaugaauag

SEQ ID NO: 259178 - protein, 504 aa, Artificial Sequence
  derived and/or modified sequence
MEALRVQMFMPCSFESLYLSSAEHPGASKPPISSSSMTSRILLRQQLMREQMQEQERREQQQKLQAAQFMQQRVPVSQTPAINVSVPTTLPSATQVPMEVLKVQTHLENPTKYHIQQAQRQQVKQYLSTTLANKHANQVLSLPCPNQPGDHVMPPVPGSSAPNSPMAMLTLNSNCEKEGFYKFEEQNRAESECPGMNTHSRASCMQMDDVIDDIISLESSYNEEILGLMDPALQMANTLPVSGNLIDLYGNQGLPPPGLTISNSCPANLPNIKRELTESEARALAKERQKKDNHNLIERRRRFNINDRIKELGTLIPKSNDPDMRWNKGTILKASVDYIRKLQREQQRAKELENRQKKLEHANRHLLLRIQELEMQARAHGLSLIPSTGLCSPDLVNRIIKQEPVLENCSQDLLQHHADLTCTTTLDLTDGTITFNNNLGTGTEANQAYSVPTKMGSKLEDILMDDTLSPVGVTDPLLSSVSPGASKTSSRRSSMSMEETEHTC

SEQ ID NO: 259179 - DNA, 1515 bp, Artificial Sequence
  derived and/or modified sequence
atggaggccctgagagtgcagatgttcatgccctgcagcttcgagagcctgtacctgagcagcgccgagcaccccggcgccagcaagccccccatcagcagcagcagcatgaccagcagaatcctgctgagacagcagctgatgagagagcagatgcaggagcaggagagaagagagcagcagcagaagctgcaggccgcccagttcatgcagcagagagtgcccgtgagccagacccccgccatcaacgtgagcgtgcccaccaccctgcccagcgccacccaggtgcccatggaggtgctgaaggtgcagacccacctggagaaccccaccaagtaccacatccagcaggcccagagacagcaggtgaagcagtacctgagcaccaccctggccaacaagcacgccaaccaggtgctgagcctgccctgccccaaccagcccggcgaccacgtgatgccccccgtgcccggcagcagcgcccccaacagccccatggccatgctgaccctgaacagcaactgcgagaaggagggcttctacaagttcgaggagcagaacagagccgagagcgagtgccccggcatgaacacccacagcagagccagctgcatgcagatggacgacgtgatcgacgacatcatcagcctggagagcagctacaacgaggagatcctgggcctgatggaccccgccctgcagatggccaacaccctgcccgtgagcggcaacctgatcgacctgtacggcaaccagggcctgcccccccccggcctgaccatcagcaacagctgccccgccaacctgcccaacatcaagagagagctgaccgagagcgaggccagagccctggccaaggagagacagaagaaggacaaccacaacctgatcgagagaagaagaagattcaacatcaacgacagaatcaaggagctgggcaccctgatccccaagagcaacgaccccgacatgagatggaacaagggcaccatcctgaaggccagcgtggactacatcagaaagctgcagagagagcagcagagagccaaggagctggagaacagacagaagaagctggagcacgccaacagacacctgctgctgagaatccaggagctggagatgcaggccagagcccacggcctgagcctgatccccagcaccggcctgtgcagccccgacctggtgaacagaatcatcaagcaggagcccgtgctggagaactgcagccaggacctgctgcagcaccacgccgacctgacctgcaccaccaccctggacctgaccgacggcaccatcaccttcaacaacaacctgggcaccggcaccgaggccaaccaggcctacagcgtgcccaccaagatgggcagcaagctggaggacatcctgatggacgacaccctgagccccgtgggcgtgaccgaccccctgctgagcagcgtgagccccggcgccagcaagaccagcagcagaagaagcagcatgagcatggaggagaccgagcacacctgctag

SEQ ID NO: 259180 - DNA, 1515 bp, Artificial Sequence
  derived and/or modified sequence
atggaagcgctacgcgtgcagatgttcatgccttgcagctttgagtctttgtatttgtcatcagcagagcatcctggagcaagtaagccccctatctcttcttcctcaatgacttcaaggatcttgctgcggcagcaattgatgcgcgaacagatgcaggagcaggagcggcgggagcagcaacagaaacttcaggccgcgcagtttatgcaacaaagagtacccgtgagccagactccggctatcaatgtctccgtgcccacaactctgccatcggccacacaggtacctatggaagttttgaaagtgcaaactcacctcgagaatccaacgaaataccacatccaacaagctcaaaggcagcaggttaaacagtatcttagtactaccttagcgaataaacatgctaaccaggtcctgagcctcccgtgcccgaatcagccaggggaccacgtcatgcctcccgttcccggatcatcagcccccaactcccctatggcgatgctgaccttaaactctaactgtgaaaaagagggcttctacaagttcgaagagcagaaccgagcagagtccgaatgccctggcatgaatacccactccagagccagttgtatgcagatggatgatgtgatcgacgacattataagcttagagtcatcctacaacgaggaaatattgggcctgatggacccagcccttcagatggcaaataccctccctgtgagcgggaacctcattgatctctacggtaatcagggactgccccctcccggactcactatttccaacagctgccccgctaatctgccaaacattaagcgggagctcacggagagcgaggcacgtgccctcgctaaggaaaggcagaagaaggataaccataacctcatcgaacgccgaagacgctttaacataaacgatcgcatcaaggaactcggcaccctgattcccaaatcgaacgatccagacatgaggtggaacaagggtacaattctcaaggcgagcgtcgattacatccggaagctccagcgggaacagcagagagcaaaggagctcgaaaacagacagaaaaaactcgaacacgctaacagacacctgcttctgcgcatccaggagctggagatgcaggcccgggctcacgggctctctctcataccatcaacaggcctgtgcagtcctgacctcgtcaatcggattattaagcaagagcccgtgctggaaaactgctcccaggacctgctgcagcatcatgccgacctgacgtgcactactacacttgacctgaccgatggaacgataacattcaataacaatctcggaactggtacagaggcaaatcaggcctactccgtgcccactaaaatggggagcaaactggaggatatcctgatggacgacacactcagccctgtgggggtaactgaccctttgctctcatccgtgtctcccggtgccagcaagactagctcaaggcggagcagcatgtccatggaggaaacagagcatacatgttag

SEQ ID NO: 259181 - DNA, 1515 bp, Artificial Sequence
  derived and/or modified sequence
atggaggccctgcgggtgcagatgttcatgccctgcagctttgagagcctgtacctgagcagcgctgagcaccctggggccagcaagccacccatcagcagcagctccatgaccagccgcatcctgctgcggcagcagctgatgagggagcagatgcaggagcaggagcggcgggagcagcagcagaagctgcaggccgcccagttcatgcagcagagggtgcctgtgtcccagaccccagccatcaacgtgtctgtgcccaccaccctgcccagcgccacccaggtgcccatggaggtgctgaaggtgcagacccacctggagaaccccaccaagtaccacatccagcaggcccagaggcagcaggtgaagcagtacctgagcaccaccctggccaacaagcacgccaaccaggtgctgagcctgccctgccccaaccagcccggggaccacgtgatgcctcctgtgcccggcagcagcgcccccaacagccccatggccatgctgaccctgaacagcaactgtgagaaggagggcttctacaagtttgaggagcagaacagagctgagagcgagtgccccggcatgaacacccacagccgggccagctgcatgcagatggatgatgtgattgatgacatcatcagcctggagagcagctacaatgaggagatcctgggcctgatggaccctgccctgcagatggccaacaccctgcctgtgtctggcaacctgattgacctgtatggcaaccagggcctgcccccacctggcctgaccatcagcaacagctgcccagccaacctgcccaacatcaagcgggagctgacagaaagtgaggcccgggccctggccaaggagcggcagaagaaggacaaccacaacctgattgaaagaagaagacgcttcaacatcaatgaccgcatcaaggagctgggcaccctcatccccaagagcaatgaccctgacatgcgctggaacaagggcaccatcctgaaggcctctgtggactacatcaggaagctgcagcgggagcagcagagggccaaggagctggagaaccggcagaagaagctggagcacgccaacagacacctgctgctgcgcatccaggagctggagatgcaggcccgggcccacggcctgagcctcatccccagcacaggcctgtgcagcccagacctggtgaaccgcatcatcaagcaggagcctgtgctggagaactgcagccaggacctgctgcagcaccacgccgacctgacctgcaccaccaccctggacctgacagatggcaccatcaccttcaacaacaacctgggcactggaacagaggccaaccaggcctacagcgtgcccaccaagatgggcagcaagctggaggacatcctgatggatgacaccctgagccctgtgggcgtgacagaccccctgctgagctctgtgtcccctggggccagcaagaccagcagcagaagaagctccatgtccatggaggagacagagcacacctgctag

SEQ ID NO: 259182 - DNA, 1515 bp, Artificial Sequence
  derived and/or modified sequence
atggaggccctgcgggtgcagatgttcatgccctgcagcttcgagtctctctacctatcgtctgcagaacatccaggcgcctccaagcccccaatcagtagctcttcgatgacatctaggatcttactcagacagcagcttatgcgcgaacagatgcaggagcaagaacggcgcgagcagcagcagaaattgcaggctgcccaatttatgcaacagagagtgccggtgtcccagacacccgctattaatgtgtctgtgcccaccactctgcctagtgccacacaggtccctatggaggttctaaaagtgcagacccacttggaaaaccctactaaatatcacatccagcaggcacagcgacagcaggtgaagcagtacttgtcgactacattagccaacaagcatgccaaccaggtgctgtccttgccctgtcccaaccagccgggagatcacgttatgccaccggtcccagggtcctcagcccccaactctccaatggccatgctgaccctgaactctaattgcgagaaagagggcttttataagttcgaagagcaaaatcgagctgaatccgaatgtccaggaatgaacacccattcgcgtgcttcttgcatgcagatggatgatgtgatcgacgatatcattagtctggaaagttcctacaacgaggagatcctgggcctaatggatccagccctgcagatggcaaacactctccccgtctcaggaaacctcatagacttgtacggcaaccagggcctcccccctcccggtctgaccatctctaattcttgccccgccaacctgcccaacattaagagggaacttaccgagtccgaggctagggcgctggcgaaggaacgccagaaaaaggacaaccataatctgattgaaaggagaagacggttcaacattaatgacagaatcaaagagctgggcactctcattcctaaaagcaacgaccccgacatgagatggaacaagggcaccatcctcaaggccagcgtcgactatatccggaagctgcagcgcgaacagcagagggccaaggaactggagaatcgccagaagaagctcgagcacgcaaaccgacatctgctgctcagaatccaagaactggaaatgcaggcccgggcgcacggattgtcactaatcccttccaccggcttgtgttcccctgacctggtcaataggatcatcaaacaagagcccgtcctcgagaattgcagccaggatctgctgcagcaccacgctgacttaacctgcaccaccactctcgacttaaccgacggtacaattaccttcaacaataacttgggcaccggtactgaggccaatcaagcgtacagtgtgcccacgaagatgggctccaaactggaggacattctcatggacgatacccttagtccggttggggttaccgatccactcctatcctcggtgtcccccggggcttccaagaccagttctagaagatcgtcaatgtccatggaggaaacagagcatacctgttag

SEQ ID NO: 259183 - DNA, 1515 bp, Artificial Sequence
  derived and/or modified sequence
atggaagcacttagagttcagatgtttatgccctgcagcttcgaaagtctgtacctttcatcagccgaacaccccggagcaagtaagccccctatctcttcctcaagcatgacttcccggattctgctgcggcagcagctgatgagagagcagatgcaagaacaggagagaagagaacaacagcagaagctacaggctgcgcagtttatgcagcagcgagtgccagtctcccaaaccccagccatcaatgtgtctgtgcccacaacattgccaagtgcaacccaggttcctatggaggtcctcaaggtccagacccacctggaaaaccctacaaagtatcacatccagcaggctcagaggcaacaggtgaagcagtacttgagcacaaccctggcaaacaaacacgcaaatcaggtgctctccttgccttgcccaaaccaacctggcgaccatgtgatgcctccagtacccggaagttctgctccaaacagtcccatggcgatgcttactctgaattccaactgtgaaaaagagggattctacaaatttgaagagcagaacagggccgaaagtgagtgtcctggcatgaacactcacagtcgggcaagttgtatgcagatggatgatgtcattgatgacattatcagtctggagtcatcttataacgaggagatcctgggactgatggatcccgcactccaaatggccaatacactgccagtaagtggcaatctcattgacttatacggcaaccaagggcttccccctcccggtttgaccatctctaacagttgtcctgcaaacctaccaaatatcaagcgcgagctcacagagtccgaagcccgagcactagcaaaggagcgtcagaagaaggacaaccataaccttatagaaaggcgtaggcggttcaatataaacgacaggatcaaggaactgggtacgcttatcccaaagtctaacgaccccgacatgagatggaacaagggaacgattctgaaggctagtgtggattatataaggaagcttcagagggagcagcagcgggcaaaggagctcgaaaacaggcaaaaaaagcttgaacacgccaatagacacttgctcttgcgcatacaggagttggagatgcaagcacgcgcacacgggttgagcctgattcccagcactgggttgtgttctcccgatcttgttaatagaatcatcaagcaagaacccgtgctcgagaactgttcacaggatctcttgcagcatcacgcggatctaacttgcacaaccacactggacctcactgatggcaccattacattcaacaataacctgggcactggcaccgaggctaaccaagcgtacagcgtgcctacaaagatgggttctaagctagaagacatccttatggatgatactctatcgcccgttggagttacggacccgttgctgtccagcgtttccccaggggcatctaaaacgtcctcgaggcgttcctccatgagcatggaggagaccgagcacacgtgttag

SEQ ID NO: 259184 - DNA, 1926 bp, Artificial Sequence
  derived and/or modified sequence
aaaggaaaaaagatggaggcgcttagagttcagatgttcatgccatgctcctttgaaagcttgtatctcagttccgccgagcatcctggggcctccaagcctccgataagctcctccagtatgacatcacgcatcttgctacgccagcaactcatgcgtgagcagatgcaggagcaggagcgcagggagcagcagcagaagctgcaggcggcccagttcatgcaacagagagtgcccgtgagtcagacaccagccataaacgtcagtgtgcccaccacccttccctctgccacgcaggtgccgatggaagtccttaaggtgcagacccacctcgaaaaccccaccaagtaccacatacagcaagcccaacggcagcaggtaaagcagtacctttctaccactttagcaaataaacatgccaaccaagtcctgagcttgccatgtccaaaccagcctggcgatcatgtcatgccaccggtgccggggagcagcgcacccaacagccccatggctatgcttacgcttaactccaactgtgaaaaagagggattttataagtttgaagagcaaaacagggcagagagcgagtgcccaggcatgaacacacattcacgagcgtcctgtatgcagatggatgatgtaatcgatgacatcattagcctagaatcaagttataatgaggaaatcttgggcttgatggatcctgctttgcaaatggcaaatacgttgcctgtctcgggaaacttgattgatctttatggaaaccaaggtctgcccccaccaggcctcaccatcagcaactcctgtccagccaaccttcccaacataaaaagggagctcacagagtctgaagcaagagcactggccaaagagaggcagaaaaaggacaatcacaacctgattgaacgaagaagaagatttaacataaatgaccgcattaaagaactaggtactttgattcccaagtcaaatgatccagacatgcgctggaacaagggaaccatcttaaaagcatccgtggactatatccgaaagttgcaacgagaacagcaacgcgcaaaagaacttgaaaaccgacagaagaaactggagcacgccaaccggcatttgttgctcagaatacaggaacttgaaatgcaggctcgagctcatggactttcccttattccatccacgggtctctgctctccagatttggtgaatcggatcatcaagcaagaacccgttcttgagaactgcagccaagacctccttcagcatcatgcagacctaacctgtacaacaactctcgatctcacggatggcaccatcaccttcaacaacaacctcggaactgggactgaggccaaccaagcctatagtgtccccacaaaaatgggatccaaactggaagacatcctgatggacgacaccctttctcccgtcggtgtcactgatccactcctttcctcagtgtcccccggagcttccaaaacaagcagccggaggagcagtatgagcatggaagagacggagcacacttgttagcgaatcctccctgcactgcattcgcacaaactgcttcctttcttgattcgtagatttaataacttacctgaaggggttttcttgataattttcctttaatatgaaattttttttcatgctttatcaatagcccaggatatattttatttttagaattttgtgaaacagacttgtatattctattttacaactacaaatgcctccaaagtattgtacaaataagtgtgcagtatctgtgaactgaattcaccacagactttagctttctgagcaagaggattttgcgtcagagaaatgtctgtccatttttattcaggggaaacttgatttgagatttttatgcctgtgacttccttggaaatcaaatgtaaagtttaattgaaagaatgtaaagcaacc

SEQ ID NO: 259185 - protein, 357 aa, Artificial Sequence
  derived and/or modified sequence
MLEMLEYNHYQVQTHLENPTKYHIQQAQRQQGFYKFEEQNRAESECPGMNTHSRASCMQMDDVIDDIISLESSYNEEILGLMDPALQMANTLPVSGNLIDLYGNQGLPPPGLTISNSCPANLPNIKRELTESEARALAKERQKKDNHNLIERRRRFNINDRIKELGTLIPKSNDPDMRWNKGTILKASVDYIRKLQREQQRAKELENRQKKLEHANRHLLLRIQELEMQARAHGLSLIPSTGLCSPDLVNRIIKQEPVLENCSQDLLQHHADLTCTTTLDLTDGTITFNNNLGTGTEANQAYSVPTKMGSKLEDILMDDTLSPVGVTDPLLSSVSPGASKTSSRRSSMSMEETEHTC

SEQ ID NO: 259186 - DNA, 1074 bp, Artificial Sequence
  derived and/or modified sequence
atgctggagatgctggagtacaaccactaccaggtgcagacccacctggagaaccccaccaagtaccacatccagcaggcccagagacagcagggcttctacaagttcgaggagcagaacagagccgagagcgagtgccccggcatgaacacccacagcagagccagctgcatgcagatggacgacgtgatcgacgacatcatcagcctggagagcagctacaacgaggagatcctgggcctgatggaccccgccctgcagatggccaacaccctgcccgtgagcggcaacctgatcgacctgtacggcaaccagggcctgcccccccccggcctgaccatcagcaacagctgccccgccaacctgcccaacatcaagagagagctgaccgagagcgaggccagagccctggccaaggagagacagaagaaggacaaccacaacctgatcgagagaagaagaagattcaacatcaacgacagaatcaaggagctgggcaccctgatccccaagagcaacgaccccgacatgagatggaacaagggcaccatcctgaaggccagcgtggactacatcagaaagctgcagagagagcagcagagagccaaggagctggagaacagacagaagaagctggagcacgccaacagacacctgctgctgagaatccaggagctggagatgcaggccagagcccacggcctgagcctgatccccagcaccggcctgtgcagccccgacctggtgaacagaatcatcaagcaggagcccgtgctggagaactgcagccaggacctgctgcagcaccacgccgacctgacctgcaccaccaccctggacctgaccgacggcaccatcaccttcaacaacaacctgggcaccggcaccgaggccaaccaggcctacagcgtgcccaccaagatgggcagcaagctggaggacatcctgatggacgacaccctgagccccgtgggcgtgaccgaccccctgctgagcagcgtgagccccggcgccagcaagaccagcagcagaagaagcagcatgagcatggaggagaccgagcacacctgctag

SEQ ID NO: 259187 - DNA, 1074 bp, Artificial Sequence
  derived and/or modified sequence
atgctagaaatgctcgaatacaaccactaccaggtacagacacacctggagaacccgacaaagtaccatattcagcaggcccagaggcagcaggggttctataaattcgaagagcagaaccgcgcagagtccgaatgcccgggtatgaacacccatagtagagcctcttgtatgcagatggatgacgtaatagatgatataatttccctggagagtagttataatgaggaaatcctgggcctgatggatccagccttgcagatggcgaacacgctgcccgtgtcagggaatcttattgatttatacggaaaccagggtctccctccccctggccttaccatttccaactcatgcccagccaatttaccaaacatcaaacgggagctgactgaatcggaagccagggcacttgccaaggagcgccagaagaaagataaccataatctcatcgagcgacgaaggaggtttaacatcaacgatagaatcaaggagctggggacacttatcccaaagtctaatgaccctgatatgagatggaacaagggaactattctgaaggcctcagtggattacataagaaaactgcagcgagaacaacaaagggctaaagagctggaaaacagacagaagaagctggagcatgccaatcgacacctcctgctgcgtatccaggaacttgagatgcaggcacgggctcacggactgtccctcatccccagtaccggcctgtgctccccagacctggttaacagaattatcaaacaagagcccgtgttagagaattgtagccaagacttacttcagcatcacgccgacctgacctgcaccacaactctggacctgacagatggaacgataacttttaacaataacttgggtactggtaccgaagccaaccaggcgtattccgtgcctaccaaaatgggctcaaagttagaagacattctaatggatgatacgctttcacccgtcggcgttaccgatccactcctgtcaagcgtgtcccccggcgcctccaagacctcttcccgccgcagctccatgagtatggaagaaaccgagcatacgtgctag

SEQ ID NO: 259188 - DNA, 1074 bp, Artificial Sequence
  derived and/or modified sequence
atgctggagatgctggagtacaaccactaccaggtgcagacccacctggagaaccccaccaagtaccacatccagcaggcccagaggcagcagggcttctacaagtttgaggagcagaacagagctgagagtgaatgtcctggcatgaacacccacagccgggccagctgcatgcagatggatgatgtgattgatgacatcatcagcctggagagcagctacaatgaggagatcctgggcctgatggaccctgccctgcagatggccaacaccctgcctgtgtctggcaacctgattgacctgtatggcaaccagggcctgcccccacctggcctgaccatcagcaacagctgcccagccaacctgcccaacatcaagcgggagctgacagagagcgaggcccgggccctggccaaggagcggcagaagaaggacaaccacaacctgattgaaagaagaagacgcttcaacatcaatgaccgcatcaaggagctgggcaccctcatccccaagagcaatgaccctgacatgcgctggaacaagggcaccatcctgaaggcctctgtggactacatcaggaagctgcagcgggagcagcagagggccaaggagctggagaaccggcagaagaagctggagcacgccaacagacacctgctgctgcgcatccaggagctggagatgcaggcccgggcccacggcctgagcctcatccccagcacaggcctgtgcagcccagacctggtgaaccgcatcatcaagcaggagcctgtgctggagaactgcagccaggacctgctgcagcaccacgccgacctgacctgcaccaccaccctggacctgacagatggcaccatcaccttcaacaacaacctgggcaccggcacagaggccaaccaggcctacagcgtgcccaccaagatgggcagcaagctggaggacatcctgatggatgacaccctgagccctgtgggcgtgacagaccccctgctgagctctgtgtcccctggggccagcaagaccagcagccgccgcagctccatgtccatggaggagacagagcacacctgctag

SEQ ID NO: 259189 - DNA, 1074 bp, Artificial Sequence
  derived and/or modified sequence
atgctggagatgctggagtacaaccactaccaggtgcagacccacctggaaaaccctacaaaataccatatccagcaggctcagcgccagcaaggtttctacaaatttgaagaacagaacagggccgaatcggagtgcccgggaatgaacacccattccagagcgtcctgtatgcagatggatgacgtaatcgacgacatcatatctctggaatcttcctacaatgaagagatccttggactgatggatccagccttgcagatggctaatactcttccagtgtccggaaatttgatcgacctgtatggaaaccaggggttgccacctcctgggctgacgatcagcaactcctgtcctgcgaacctgcccaacatcaaacgcgagctgactgaatcggaagcccgcgctctggccaaggaaagacagaagaaggacaatcataacctgatcgaaagaaggagacggttcaacatcaacgaccggattaaggaacttggaaccctgattccaaagagcaacgatcctgacatgcggtggaacaagggcaccatcttaaaagccagtgttgactatattcgtaagcttcaacgggagcaacagcgtgcaaaggaactggagaaccgccagaaaaaactcgaacacgctaatcgccacctgctactgaggatccaagagcttgagatgcaagctcgagcccatggtttatccttaattccctccacggggctatgctcgcctgacctggtgaaccggatcatcaaacaggagcccgttctagaaaattgctcccaggacctgctgcagcaccatgccgaccttacatgtactaccacacttgatctgaccgatggaaccatcaccttcaataacaacctgggaacagggacggaggctaaccaggcttattcggttcccaccaaaatgggttccaagctggaggacatccttatggatgataccctgtcccccgtgggagtgacagaccccttgttgagttccgtttcgccgggggccagcaagacaagcagtcgccggtcctctatgagcatggaagaaactgaacatacttgctag

SEQ ID NO: 259190 - DNA, 1074 bp, Artificial Sequence
  derived and/or modified sequence
atgctcgagatgctagaatataatcattatcaggtgcagacacatctagaaaaccctacgaagtatcacatccagcaggcccagcggcagcaaggcttttacaaattcgaagagcaaaatagggcagaatccgaatgcccaggaatgaatacacactctcgggctagctgcatgcagatggacgacgtgattgacgatataatcagtctcgagagttcttacaacgaggagatcctgggacttatggaccctgccctgcagatggcaaataccctgcccgtgtccgggaacctgattgatctgtacggtaaccaagggctgcctcctcccggattgacaatatccaactcctgccctgctaacctgcccaacatcaagagggagctgacagaatccgaggctagagccttagcaaaggaaaggcagaaaaaagacaatcacaatctcatcgaacggagacgacgtttcaacatcaacgaccgaattaaagagctgggtaccctgattcctaaatcgaacgatcccgatatgcgctggaacaagggtacaatacttaaagcctcagtggactacattcgcaagcttcagagggagcagcaaagggcaaaggaattggaaaatagacagaagaagctggaacacgcaaatcggcacctccttctgagaattcaagaactggaaatgcaggcgagggcccatggactatctttgattcctagcaccgggctatgctctccagacctagtgaatcggatcatcaaacaggagccagtcctggaaaactgtagtcaggacctgcttcaacaccatgccgacctgacctgcacgactaccctcgacctgaccgatggaacaatcacgtttaataacaacttgggcacgggaactgaagcgaatcaagcttacagtgtcccgacaaaaatgggcagcaaattagaagatatcttgatggatgacacactgtcaccggtgggagtcacggacccactattatcctcagtatcaccaggcgcatctaagacaagtagccgccgaagctcgatgagtatggaggaaactgaacacacatgctag

SEQ ID NO: 259191 - DNA, 1074 bp, Artificial Sequence
  derived and/or modified sequence
atgctggaaatgctagaatataatcactatcaggtgcagacccacctcgaaaaccccaccaagtaccacatacagcaagcccaacggcagcagggattttataagtttgaagagcaaaacagggcagagagcgagtgcccaggcatgaacacacattcacgagcgtcctgtatgcagatggatgatgtaatcgatgacatcattagcctagaatcaagttataatgaggaaatcttgggcttgatggatcctgctttgcaaatggcaaatacgttgcctgtctcgggaaacttgattgatctttatggaaaccaaggtctgcccccaccaggcctcaccatcagcaactcctgtccagccaaccttcccaacataaaaagggagctcacagagtctgaagcaagagcactggccaaagagaggcagaaaaaggacaatcacaacctgattgaacgaagaagaagatttaacataaatgaccgcattaaagaactaggtactttgattcccaagtcaaatgatccagacatgcgctggaacaagggaaccatcttaaaagcatccgtggactatatccgaaagttgcaacgagaacagcaacgcgcaaaagaacttgaaaaccgacagaagaaactggagcacgccaaccggcatttgttgctcagaatacaggaacttgaaatgcaggctcgagctcatggactttcccttattccatccacgggtctctgctctccagatttggtgaatcggatcatcaagcaagaacccgttcttgagaactgcagccaagacctccttcagcatcatgcagacctaacctgtacaacaactctcgatctcacggatggcaccatcaccttcaacaacaacctcggaactgggactgaggccaaccaagcctatagtgtccccacaaaaatgggatccaaactggaagacatcctgatggacgacaccctttctcccgtcggtgtcactgatccactcctttcctcagtgtcccccggagcttccaaaacaagcagccggaggagcagtatgagcatggaagagacggagcacacttgttag

SEQ ID NO: 259192 - protein, 431 aa, Artificial Sequence
  derived and/or modified sequence
MQALNITPEQFSRLLRDHNLTREQFIALYRLRPLVYTPELPGRAKLALVLTGVLIFALALFGNALVFYVVTRSKAMRTVTNIFICSLALSDLLITFFCIPVTMLQNISDNWLGGAFICKMVPFVQSTAVVTEILTMTCIAVERHQGLVHPFKMKWQYTNRRAFTMLGVVWLVAVIVGSPMWHVQQLEIKYDFLYEKEHICCLEEWTSPVHQKIYTTFILVILFLLPLMVMLILYSKIGYELWIKKRVGDGSVLRTIHGKEMSKIARKKKRAVIMMVTVVALFAVCWAPFHVVHMMIEYSNFEKEYDDVTIKMIFAIVQIIGFSNSICNPIVYAFMNENFKKNVLSAVCYCIVNKTFSPAQRHGNSGITMMRKKAKFSLRENPVEETKGEAFSDGNIEVKLCEQTEEKKKLKRHLALFRSELAENSPLDSGH

SEQ ID NO: 259193 - DNA, 1296 bp, Artificial Sequence
  derived and/or modified sequence
atgcaggccctgaacatcacccccgagcagttcagcagactgctgagagaccacaacctgaccagagagcagttcatcgccctgtacagactgagacccctggtgtacacccccgagctgcccggcagagccaagctggccctggtgctgaccggcgtgctgatcttcgccctggccctgttcggcaacgccctggtgttctacgtggtgaccagaagcaaggccatgagaaccgtgaccaacatcttcatctgcagcctggccctgagcgacctgctgatcaccttcttctgcatccccgtgaccatgctgcagaacatcagcgacaactggctgggcggcgccttcatctgcaagatggtgcccttcgtgcagagcaccgccgtggtgaccgagatcctgaccatgacctgcatcgccgtggagagacaccagggcctggtgcaccccttcaagatgaagtggcagtacaccaacagaagagccttcaccatgctgggcgtggtgtggctggtggccgtgatcgtgggcagccccatgtggcacgtgcagcagctggagatcaagtacgacttcctgtacgagaaggagcacatctgctgcctggaggagtggaccagccccgtgcaccagaagatctacaccaccttcatcctggtgatcctgttcctgctgcccctgatggtgatgctgatcctgtacagcaagatcggctacgagctgtggatcaagaagagagtgggcgacggcagcgtgctgagaaccatccacggcaaggagatgagcaagatcgccagaaagaagaagagagccgtgatcatgatggtgaccgtggtggccctgttcgccgtgtgctgggcccccttccacgtggtgcacatgatgatcgagtacagcaacttcgagaaggagtacgacgacgtgaccatcaagatgatcttcgccatcgtgcagatcatcggcttcagcaacagcatctgcaaccccatcgtgtacgccttcatgaacgagaacttcaagaagaacgtgctgagcgccgtgtgctactgcatcgtgaacaagaccttcagccccgcccagagacacggcaacagcggcatcaccatgatgagaaagaaggccaagttcagcctgagagagaaccccgtggaggagaccaagggcgaggccttcagcgacggcaacatcgaggtgaagctgtgcgagcagaccgaggagaagaagaagctgaagagacacctggccctgttcagaagcgagctggccgagaacagccccctggacagcggccactag

SEQ ID NO: 259194 - DNA, 1296 bp, Artificial Sequence
  derived and/or modified sequence
atgcaggctctgaacatcacacctgaacagttttcaagactgctgagagatcacaacctaacgcgagagcagttcattgctctgtatcgcctgcgccctctcgtttacacacctgagctaccaggtcgggccaagctggcattggtgctgaccggagtgctgatcttcgccctcgcactgttcggcaatgctctagtcttttatgtggtgacaagatcgaaggctatgagaactgtcactaatatcttcatttgttcactggcactatcagatctgctgatcacttttttctgcatcccggtgaccatgctgcagaacatctctgataactggctggggggagctttcatctgtaagatggttccttttgttcaatccacagctgtggtgaccgagatcctgacaatgacctgtattgctgtcgagagacaccaagggcttgtccatccttttaagatgaagtggcagtatacaaatcggcgagcattcacgatgttaggggtggtttggcttgtggccgttatcgttgggagcccaatgtggcacgtgcagcagcttgaaattaaatacgacttcctctacgaaaaagagcatatttgttgcctggaggagtggacaagcccagtccatcagaaaatttacacaacgttcatccttgttatcttgtttctactgccgctaatggtcatgctcatcctttattccaaaattggttatgagttatggataaaaaagcgggtgggagatggctccgtcttacgaaccatccacggcaaagagatgtccaagatcgcccgcaaaaagaaaagagcggtgatcatgatggtgaccgtcgtggccttattcgccgtgtgctgggctcctttccacgttgtacacatgatgattgagtactcaaatttcgagaaggaatacgacgatgtgacgatcaaaatgatcttcgctatcgtgcagattatcggttttagcaatagcatctgcaatcctatcgtatatgcctttatgaatgaaaacttcaaaaaaaatgttctcagcgctgtctgctactgcatcgttaataagactttctctccagcccaaaggcatggtaatagcggtataacaatgatgcgcaagaaggcaaaattttcactgagagaaaacccagtagaggaaactaagggggaagcttttagtgacggcaacattgaggtgaagctgtgcgaacagaccgaagagaaaaagaagctgaaacgacatttggctctctttcggtctgagcttgccgagaacagtcctctagattctggccactag

SEQ ID NO: 259195 - DNA, 1296 bp, Artificial Sequence
  derived and/or modified sequence
atgcaggccctgaacatcaccccagagcagttcagccggctgctgcgggaccacaacctgacccgggagcagttcatcgccctgtaccgcctgcggcccctggtgtacaccccagagctgcccggccgggccaagctggccctggtgctgactggagtgctgatctttgccctggccctgtttggaaatgccctggtgttctacgtggtgaccaggagcaaggccatgaggacagtgaccaacatcttcatctgcagcctggccctgagtgacctgctgatcaccttcttctgcatccctgtgaccatgctgcagaacatcagtgacaactggctgggcggggccttcatctgcaagatggtgccctttgtgcagagcacagctgtggtgacagagatcctgaccatgacctgcatcgctgtggagcggcaccagggcctggtgcaccccttcaagatgaagtggcagtacaccaacagaagagccttcaccatgctgggcgtggtgtggctggtggccgtgattgtgggcagccccatgtggcacgtgcagcagctggagatcaagtatgacttcctgtatgagaaggagcacatctgctgcctggaggagtggaccagccctgtgcaccagaagatctacaccaccttcatcctggtgatcctcttcctgctgcccctgatggtgatgctgatcctgtacagcaagattggctatgagctgtggatcaagaagagggtgggagatggctctgtgctgcggaccatccacggcaaggagatgagcaagatcgccaggaagaagaagagagctgtgatcatgatggtgacagtggtggccctgtttgctgtgtgctgggcccccttccacgtggtgcacatgatgattgagtacagcaactttgagaaggagtatgatgatgtgaccatcaagatgatctttgccatcgtgcagatcatcggcttcagcaacagcatctgcaaccccatcgtgtatgccttcatgaatgaaaacttcaagaagaatgtgctgtctgctgtgtgctactgcatcgtgaacaagaccttcagccctgcccagagacatggcaacagcggcatcaccatgatgaggaagaaggccaagttcagcctgcgggagaaccctgtggaggagaccaagggggaggccttcagtgatggcaacatcgaggtgaagctgtgtgagcagacagaggagaagaagaagctgaagaggcacctggccctcttccgctctgagctggccgagaacagccccctggacagcggccactag

SEQ ID NO: 259196 - DNA, 1296 bp, Artificial Sequence
  derived and/or modified sequence
atgcaggccctgaacatcacccccgagcagttcagccggctgctgcgggaccataatttaactagggaacaattcatagccctgtaccgcttaagaccactagtgtatacacccgaactgcccgggcgcgccaagctggcgttagtgttgactggagtgttgattttcgccctggcattattcggaaacgcactcgtcttctacgtcgttacacgtagcaaagccatgaggaccgtgaccaatatctttatctgtagccttgccctaagcgatttgctgattacttttttttgcatccccgtgacaatgctccagaatatctctgataattggcttggcggtgctttcatctgtaagatggtgccgttcgtgcaatcaacggccgtggtgacggagattctgaccatgacctgcattgccgtcgaaaggcaccagggcctggtgcatccttttaagatgaaatggcaatataccaaccggcgggctttcaccatgctgggcgtggtatggttggtggccgtgatcgtaggctcaccaatgtggcatgtgcagcaactggagattaagtatgacttcttgtatgagaaggagcatatttgctgcttggaggaatggacatccccagtgcatcagaaaatttataccacattcatccttgtcatcctgttcctgcttccccttatggtgatgctcatcttgtactctaagatcgggtacgaactttggataaagaagagggtgggtgatggttctgtattgcgcactatccacggtaaggaaatgtcaaaaatcgctcggaagaaaaagagggccgttattatgatggtgacggtggtggcgctctttgccgtttgctgggcccccttccatgtagtacacatgatgatcgaatattctaatttcgagaaggagtatgacgacgtcaccataaagatgatattcgccatcgtccagattatcggattttcaaacagcatatgtaaccccattgtgtacgccttcatgaacgagaacttcaagaaaaatgtgttaagcgctgtctgctattgcatcgtgaataagacattttcccccgcacaacgccacggcaattccggtatcacaatgatgcggaaaaaggctaagttctcacttcgcgagaacccggtggaggagacaaagggcgaagcattctcagacggtaacatagaggtgaagttgtgtgagcagaccgaagaaaaaaaaaagctgaagaggcacctggctctgtttcgcagtgagctggctgagaattccccactggattctggccactag

SEQ ID NO: 259197 - DNA, 1296 bp, Artificial Sequence
  derived and/or modified sequence
atgcaggctctgaacatcacgcctgaacaatttagtcgccttctgagagatcacaatctcacccgcgagcagtttatcgcgctgtacaggcttcggccactggtgtacactcccgagctgcctggtcgggctaaactcgccctcgtcctgacgggcgtactgatttttgcactggccctcttcgggaatgccctggtgttttacgtagtcactaggtctaaggccatgcggacagtgactaatatttttatttgctcattagccttaagcgacctgcttatcacttttttttgcatccctgtcaccatgctacaaaatattagcgacaactggctgggaggtgccttcatctgcaagatggtacctttcgtgcagtccaccgcagtcgtcactgagatcttaaccatgacgtgcattgccgtggagcgccaccaaggattagtgcatccgttcaagatgaaatggcaatacaccaaccgcagagcttttaccatgctgggagtcgtatggctagtcgccgtgatcgtcggctctcctatgtggcatgtgcaacagctagagattaagtacgatttcctgtacgaaaaagagcacatctgttgtttggaggagtggacctctccggtccaccaaaagatttacacgactttcatcctggtgattctgttccttctgccgcttatggtgatgctgattctttacagtaaaattggctatgaactgtggattaagaagcgggtcggagatggcagcgttctgaggactatccatggtaaagaaatgagcaagatagccagaaaaaaaaagagggcagtcatcatgatggtgacggtggtcgccttgtttgcggtttgctgggccccttttcacgtggtgcacatgatgattgaatattccaatttcgaaaaagaatacgatgacgtgactatcaaaatgatctttgcaatcgtgcaaatcatcggctttagcaacagtatctgtaatcctattgtgtacgccttcatgaacgaaaattttaagaagaatgtgctgagcgctgtctgttattgtattgtcaacaagacattcagcccagcgcagaggcacggtaactccggaattaccatgatgcgtaagaaggccaagttctctcttagagaaaatcccgtggaggagactaagggtgaggcttttagcgatggcaacatcgaagtcaagctgtgcgagcagaccgaggagaaaaagaagctgaaaaggcatttagcactgttcagatcagagctggcagagaactctccccttgattcgggccactag

SEQ ID NO: 259198 - DNA, 1708 bp, Artificial Sequence
  derived and/or modified sequence
accctccaccgctccccaagcgggtccggcgtccgcatcgcatggccagaaggcggggagccagaggcgccaggaccctcgcgtggcgctccagcaccccagaccgtggcggcgcctcgccttagggaagagcaagggaagaactttatttgaaccgcgaacattttttggtcactgagatcgagtctcccagtgctttggcttcccgcctctttatcgtgggtttgatccctgagctgctctcctttcccgaacctcccggggtgcagcctagagccctcccgcgcggctgactccagagtagaggaagggaggcggcctccggctggtcccccgaagccctcgctgccccgcagatgcggatggccagccagtagcgggcggtggccccgcgtcccgggagcgcacagcaatgcaggcgcttaacattaccccggagcagttctctcggctgctgcgggaccacaacctgacgcgggagcagttcatcgctctgtaccggctgcgaccgctcgtctacaccccagagctgccgggacgcgccaagctggccctcgtgctcaccggcgtgctcatcttcgccctggcgctctttggcaatgctctggtgttctacgtggtgacccgcagcaaggccatgcgcaccgtcaccaacatctttatctgctccttggcgctcagtgacctgctcatcaccttcttctgcattcccgtcaccatgctccagaacatttccgacaactggctggggggtgctttcatttgcaagatggtgccatttgtccagtctaccgctgttgtgacagaaatcctcactatgacctgcattgctgtggaaaggcaccagggacttgtgcatccttttaaaatgaagtggcaatacaccaaccgaagggctttcacaatgctaggtgtggtctggctggtggcagtcatcgtaggatcacccatgtggcacgtgcaacaacttgagatcaaatatgacttcctatatgaaaaggaacacatctgctgcttagaagagtggaccagccctgtgcaccagaagatctacaccaccttcatccttgtcatcctcttcctcctgcctcttatggtgatgcttattctgtacagtaaaattggttatgaactttggataaagaaaagagttggggatggttcagtgcttcgaactattcatggaaaagaaatgtccaaaatagccaggaagaagaaacgagctgtcattatgatggtgacagtggtggctctctttgctgtgtgctgggcaccattccatgttgtccatatgatgattgaatacagtaattttgaaaaggaatatgatgatgtcacaatcaagatgatttttgctatcgtgcaaattattggattttccaactccatctgtaatcccattgtctatgcatttatgaatgaaaacttcaaaaaaaatgttttgtctgcagtttgttattgcatagtaaataaaaccttctctccagcacaaaggcatggaaattcaggaattacaatgatgcggaagaaagcaaagttttccctcagagagaatccagtggaggaaaccaaaggagaagcattcagtgatggcaacattgaagtcaaattgtgtgaacagacagaggagaagaaaaagctcaaacgacatcttgctctctttaggtctgaactggctgagaattctcctttagacagtgggcattaa

SEQ ID NO: 259199 - protein, 136 aa, Artificial Sequence
  derived and/or modified sequence
MVRPYPLIYFLFLPLGACFPLLDRREPTDAMGGLGAGERWADLAMGPRPHSVWGSSRWLRASQPQALLVIARGLQTSGREHAGCRFRFGRQDEGSEATGFLPAAGEKTSGPLGNLAEELNGYSRKKGGFSFRFGRR

SEQ ID NO: 259200 - DNA, 411 bp, Artificial Sequence
  derived and/or modified sequence
atggtgcgtccctaccctcttatctactttttgttccttccactcggcgcttgcttccctctgctcgatcggagggagcctaccgacgcaatgggaggtctgggagctggggagagatgggcagacctcgccatgggacctaggccgcactccgtgtggggcagctcccgctggttgagggcgagccagcctcaagcactgcttgtgatcgctcgcggactgcagacgtctggccgtgaacatgcaggctgtcgctttagattcggtagacaagatgagggatcagaggcaactggcttcctgcccgctgctggagagaaaacatctggccctcttggtaacctggcagaagagctgaacgggtactcaagaaagaaaggagggttcagtttccgctttggccgaagatag

SEQ ID NO: 259201 - DNA, 411 bp, Artificial Sequence
  derived and/or modified sequence
atggtgcggccataccctctgatctattttctgttcctacccctcggggcctgtttccccttgttggatagaagagagcctaccgatgcgatgggcggtctgggagcaggcgaaagatgggcggacctggccatgggcccgcgacctcactcagtctgggggagctccagatggttgagggcctcccaaccccaggctttattggtgatagctagaggactgcaaacttccggtagggaacatgctggctgtagattcaggtttggtagacaggatgagggatccgaggctactggttttctaccagccgctggggagaagacctccggacctctgggcaacctggccgaagaacttaacggttactcccgcaagaagggtggatttagcttcaggtttgggagaagatag

SEQ ID NO: 259202 - DNA, 411 bp, Artificial Sequence
  derived and/or modified sequence
atggtgcgcccttatcctttgatttattttttgttccttcccttaggcgcttgttttcccctccttgacagacgcgaacccactgatgcaatgggcggtttgggcgcaggcgaacgctgggctgacttggccatggggcccagaccgcacagtgtgtggggatctagccgatggctgcgcgctagccagccccaagctctgctggttatcgccaggggattgcagacttctggacgggaacacgctggctgtaggttccgctttggccgccaagacgaaggcagcgaagcaacaggctttcttcctgccgcaggagagaagacctcgggaccactcgggaatctggctgaagaacttaatggctattcacgcaaaaagggcggatttagtttcagatttggtcgaagatag

SEQ ID NO: 259203 - DNA, 411 bp, Artificial Sequence
  derived and/or modified sequence
atggtgagaccctaccccctgatctacttcctgttcctgcccctgggcgcctgcttccccctgctggacagaagagagcccaccgacgccatgggcggcctgggcgccggcgagagatgggccgacctggccatgggccccagaccccacagcgtgtggggcagcagcagatggctgagagccagccagccccaggccctgctggtgatcgccagaggcctgcagaccagcggcagagagcacgccggctgcagattcagattcggcagacaggacgagggcagcgaggccaccggcttcctgcccgccgccggcgagaagaccagcggccccctgggcaacctggccgaggagctgaacggctacagcagaaagaagggcggcttcagcttcagattcggcagaagatag

SEQ ID NO: 259204 - DNA, 411 bp, Artificial Sequence
  derived and/or modified sequence
atggttcggccatacccactcatatacttcctgtttctgcctctaggggcttgttttcctctactcgataggagggagcctacagacgctatgggcggtctgggcgccggtgagagatgggccgacctggccatggggccccggccccattccgtatggggtagctctagatggctgagggcatcacagccacaggcccttctcgttatcgcccgcggcctccagaccagtggccgcgaacatgccggatgtaggttcaggttcggaaggcaggacgaaggttctgaagcaacagggtttctgcctgccgccggggagaagacatctggcccactcggcaacttggcagaagagctgaacggttattccagaaagaaaggcggcttctcgtttcggtttggccgtcgttag

SEQ ID NO: 259205 - DNA, 411 bp, Artificial Sequence
  derived and/or modified sequence
atggtaaggccttaccccctgatctacttcctcttcctgccgctgggcgcctgcttccctctactggacagaagagagcccacagacgccatgggtggcctcggagctggagaacgctgggccgacctggccatggggccccgaccccactccgtgtggggttcctctcggtggctgagagcttcacagccacaggccctgcttgtcatagccagggggctgcagacatcgggcagagagcatgctggctgcagattccgcttcgggaggcaggacgaaggcagtgaggccaccggcttcctccctgctgcgggggagaagaccagcggcccgttagggaacctggctgaggagctcaatggctacagcaggaagaaaggcggcttcagcttccgcttcggtcggcggtga

SEQ ID NO: 259206 - DNA, 411 bp, Artificial Sequence
  derived and/or modified sequence
atggtgcggccctaccccctcatctacttcctgttcctgcccctgggcgcctgcttccccctgctggaccggcgggagcccacagatgccatgggcggcctgggcgctggggagcgctgggccgacctggccatgggcccccggccccacagcgtgtggggcagcagccgctggctgcgggccagccagccccaggccctgctggtgattgcccggggcctgcagaccagcggccgggagcacgccggctgccgcttccgcttcggccggcaggatgagggcagcgaggccaccggcttcctgcctgctgctggggagaagaccagcggccccctgggcaacctggccgaggagctgaatggctacagcaggaagaagggcggcttctccttccgctttggaagaagatag

SEQ ID NO: 259207 - DNA, 411 bp, Artificial Sequence
  derived and/or modified sequence
atggtgcggccctaccccctgatctacttcctgttcctgcccctgggcgcgtgctttccactcctcgacagaagagaaccaacagatgctatgggcggcctaggggcaggcgagcggtgggcagatctggccatgggcccccggccgcattccgtgtggggaagctctaggtggctgcgcgcatcccagccacaagccctactcgtcatcgcgaggggcctccagaccagtggtagagaacacgcaggttgccgtttcagatttggacggcaggacgagggtagtgaggccaccggattccttccagccgccggggagaagacctctggaccactgggaaatctggctgaggaactgaacgggtactctaggaaaaaggggggcttcagtttcaggttcgggaggcggtag

SEQ ID NO: 259208 - RNA, 411 nt, Artificial Sequence
  derived and/or modified sequence
auggugcggccauacccucugaucuauuuucuguuccuaccccucggggccuguuuccccuuguuggauagaagagagccuaccgaugcgaugggcggucugggagcaggcgaaagaugggcggaccuggccaugggcccgcgaccucacucagucugggggagcuccagaugguugagggccucccaaccccaggcuuuauuggugauagcuagaggacugcaaacuuccgguagggaacaugcuggcuguagauucagguuugguagacaggaugagggauccgaggcuacugguuuucuaccagccgcuggggagaagaccuccggaccucugggcaaccuggccgaagaacuuaacgguuacucccgcaagaaggguggauuuagcuucagguuugggagaagauag

SEQ ID NO: 259209 - RNA, 411 nt, Artificial Sequence
  derived and/or modified sequence
auggugcgcccuuauccuuugauuuauuuuuuguuccuucccuuaggcgcuuguuuuccccuccuugacagacgcgaacccacugaugcaaugggcgguuugggcgcaggcgaacgcugggcugacuuggccauggggcccagaccgcacaguguguggggaucuagccgauggcugcgcgcuagccagccccaagcucugcugguuaucgccaggggauugcagacuucuggacgggaacacgcuggcuguagguuccgcuuuggccgccaagacgaaggcagcgaagcaacaggcuuucuuccugccgcaggagagaagaccucgggaccacucgggaaucuggcugaagaacuuaauggcuauucacgcaaaaagggcggauuuaguuucagauuuggucgaagauag

SEQ ID NO: 259210 - protein, 618 aa, Artificial Sequence
  derived and/or modified sequence
MTQEYDNKRPVLVLQNEALYPQRRSYTSEDEAWKSFLENPLTAATKAMMSINGDEDSAAALGLLYDYYKVPRERRSSTAKPEVEHPEPDHSKRNSIPIVTEQPLISAGENRVQVLKNVPFNIVLPHGNQLGIDKRGHLTAPDTTVTVSIATMPTHSIKTETQPHGFAVGIPPAVYHPEPTERVVVFDRNLNTDQFSSGAQAPNAQRRTPDSTFSETFKEGVQEVFFPSDLSLRMPGMNSEDYVFDSVSGNNFEYTLEASKSLRQKPGDSTMTYLNKGQFYPITLKEVSSSEGIHHPISKVRSVIMVVFAEDKSREDQLRHWKYWHSRQHTAKQRCIDIADYKESFNTISNIEEIAYNAISFTWDINDEAKVFISVNCLSTDFSSQKGVKGLPLNIQVDTYSYNNRSNKPVHRAYCQIKVFCDKGAERKIRDEERKQSKRKVSDVKVPLLPSHKRMDITVFKPFIDLDTQPVLFIPDVHFANLQRGTHVLPIASEELEGEGSVLKRGPYGTEDDFAVPPSTKLARIEEPKRVLLYVRKESEEVFDALMLKTPSLKGLMEAISDKYDVPHDKIGKIFKKCKKGILVNMDDNIVKHYSNEDTFQLQIEEAGGSYKLTLTEI

SEQ ID NO: 259211 - protein, 618 aa, Artificial Sequence
  derived and/or modified sequence
LPKEVENKRPVLVLQNEALYPQRRSYTSEDEAWKSFLENPLTAATKAMMSINGDEDSAAALGLLYDYYKVPRERRSSTAKPEVEHPEPDHSKRNSIPIVTEQPLISAGENRVQVLKNVPFNIVLPHGNQLGIDKRGHLTAPDTTVTVSIATMPTHSIKTETQPHGFAVGIPPAVYHPEPTERVVVFDRNLNTDQFSSGAQAPNAQRRTPDSTFSETFKEGVQEVFFPSDLSLRMPGMNSEDYVFDSVSGNNFEYTLEASKSLRQKPGDSTMTYLNKGQFYPITLKEVSSSEGIHHPISKVRSVIMVVFAEDKSREDQLRHWKYWHSRQHTAKQRCIDIADYKESFNTISNIEEIAYNAISFTWDINDEAKVFISVNCLSTDFSSQKGVKGLPLNIQVDTYSYNNRSNKPVHRAYCQIKVFCDKGAERKIRDEERKQSKRKVSDVKVPLLPSHKRMDITVFKPFIDLDTQPVLFIPDVHFANLQRGTHVLPIASEELEGEGSVLKRGPYGTEDDFAVPPSTKLARIEEPKRVLLYVRKESEEVFDALMLKTPSLKGLMEAISDKYDVPHDKIGKIFKKCKKGILVNMDDNIVKHYSNEDTFQLQIEEAGGSYKLTLTEI

SEQ ID NO: 259212 - DNA, 1857 bp, Artificial Sequence
  derived and/or modified sequence
atgacgcaggagtacgacaacaaacggcctgtgctggttttacaaaacgaggcgttgtaccctcagcgtcgaagctatacctccgaggatgaagcttggaaatcttttctcgaaaacccgctgaccgccgccacgaaagctatgatgtctatcaacggggatgaggactcagccgccgctctcggattgctctacgactactataaagtgcccagagaacggcgctcttctacagccaaacccgaagtggagcatccagagcctgatcatagcaagcgcaatagcatccctatcgtcaccgagcagcctctcatcagtgccggcgagaaccgcgttcaagtcctgaagaatgtcccattcaacattgtgcttccccatgggaatcagcttgggatcgacaagagaggacacctgacagcccccgacacgaccgtcacggtttcgatagctaccatgcccacccattcaattaagactgaaacccagccacacggcttcgcagtcggaattccccccgcagtgtatcacccagagccaacggaacgcgtagtggtgttcgatagaaatttgaatacggatcagtttagttctggcgcccaagcccctaacgctcagagacgcacacccgattcaacgttttccgagacctttaaggagggcgtgcaggaagtgttcttcccaagtgatctgagcctgagaatgcctggcatgaatagcgaggactatgtgttcgactcagtgtccggaaataactttgagtataccttagaggcctctaagtccctacgacaaaagcctggggacagtaccatgacatacctgaataagggtcagttttatcccataacacttaaagaggtgtcctcctccgagggtatccaccatcctatatctaaagtgcgctccgtcatcatggtcgtgttcgcggaagataagagccgggaggaccagctcagacactggaagtattggcactcgagacagcacaccgccaagcagcgatgtatagacattgccgattacaaggaatccttcaacaccatatccaacatcgaggaaattgcgtacaatgcaatttctttcacatgggacattaacgacgaggccaaggtgtttatctcagtgaactgcctttctactgatttctcttcccagaagggcgtgaaaggtctgccactgaatatacaggtggacacttatagttataacaatcgcagtaacaagcctgttcaccgtgcatattgtcagattaaagtattctgcgataagggggccgagaggaagatcagggacgaggagaggaaacagtctaagcggaaagttagtgatgtgaaagtacccctgttgccttcacataaacgtatggatataactgtgttcaagccgttcatagatctggatactcaacctgtgttgtttatcccagatgtgcactttgctaatctgcagcgggggacccacgtgctgcctatcgcaagcgaggagcttgaaggcgagggatcggtgctgaaaagagggccatacggcacggaggacgacttcgccgtccctccgtcaacaaagctagcacgtatcgaggagcccaagcgtgtgcttctgtatgtgcggaaggagtcagaggaggtatttgatgccctgatgctgaaaaccccttcactgaagggacttatggaggcaatctcggacaagtacgacgtccctcacgacaaaatcggaaaaatcttcaaaaagtgtaaaaaggggatcttggttaatatggatgacaacatcgtgaaacattacagcaacgaggacaccttccagttgcagattgaggaggccgggggctcatacaagctgactctgacggaaatctag

SEQ ID NO: 259213 - DNA, 1857 bp, Artificial Sequence
  derived and/or modified sequence
ttgccgaaggaggtcgagaacaagaggccggtactggtcctacagaacgaggcattatatccacaacggcgaagttatacatctgaagacgaggcatggaagtcatttcttgaaaatcctctgacagctgctacaaaggctatgatgtccatcaatggggatgaggactccgcagcagcgctcggactgctgtatgattattacaaagtccctagagagcgcagatcaagcactgccaagcccgaagtcgaacatccggaacctgaccacagcaagcgcaatagcattcccatcgttaccgaacagcctctgatttccgccggggaaaacagagtgcaggtgcttaaaaatgtgcctttcaacatcgtcctaccccatggaaatcagctgggcatcgataagcgaggacatttgacggccccggacactactgtgacggtctccattgcaaccatgcctactcattctatcaaaacagaaactcagccacacgggttcgccgtcggcattccccctgccgtgtaccatcccgagccaacggagagggtggtagtcttcgaccggaatctaaataccgaccagttttcctccggtgcccaggcgcctaatgcccagcgccggacgcctgatagtactttctccgaaacttttaaagagggcgttcaagaggtattttttccctctgatctgtccctacgaatgccaggaatgaattctgaagactatgtttttgactcggtctccggcaataactttgagtatacactggaagcatctaagtccttaagacaaaagcctggcgactccactatgacttacctgaacaaaggtcagttttatcctattacgttgaaggaggtgtcaagctccgaaggcatccaccaccccataagtaaggtgcggtctgttatcatggtggtgttcgcggaggataaatctcgggaagatcagctacgacattggaaatactggcacagccggcagcacacagctaagcagcggtgcatagatatcgctgattacaaggagtcattcaacacgatttccaatattgaagagatcgcgtataacgccattagcttcacctgggatataaatgacgaggctaaggttttcatctctgtgaattgcctgagcactgatttttcctctcagaaaggggtgaaagggctccccttaaacattcaggtcgacacttattcatacaacaatagatctaataaaccagtgcaccgtgcctattgccaaattaaggtcttttgcgataaaggggccgagaggaagatcagggacgaagaacggaagcagtctaagcgaaaagtgtctgatgtaaaagtgcccctgctccccagccacaagagaatggacatcaccgtgttcaagcctttcatagaccttgacacccagccagtgctcttcatccctgacgtacacttcgccaacctgcagaggggcacacacgtgctaccaatcgcctctgaagagcttgagggggaagggtccgtcctgaaacgaggtccttacggcaccgaggacgattttgccgtgcctcctagcacgaagctggcacggatcgaggagcctaaaagagtgctgctctacgtgagaaaggagtctgaagaggtattcgacgccctcatgttgaagacaccctccctgaaggggctgatggaagccatatccgataagtacgacgtcccccacgacaaaataggcaagatcttcaagaaatgtaaaaaggggattctagtcaatatggatgataacatcgtgaagcactattcgaacgaggacacattccagttgcaaatagaggaggccggtggctcttacaaactgacgctgaccgagatctag

SEQ ID NO: 259214 - DNA, 3527 bp, Artificial Sequence
  derived and/or modified sequence
cagtgcgcgcagcccgcgcggagccggctcagagcgagaaaagcaaacccaacccgtcggggccgccgctccggacccgcagccgccgccgccgcctcctccccccggatcgggtgtactgtcccaacccgaaagtccagttctgcggcccggcagcggcgagcgggcgcgatgacacaggagtacgacaacaaacggccagtgttggttcttcagaatgaagcactttatccacagcggcggtcctacactagtgaggatgaggcctggaaatccttcctggaaaaccctctcactgcagcgaccaaagcgatgatgagcatcaatggagatgaagacagcgccgctgcgctgggcctgctctatgactactacaaggttccaagagagagaaggtcatcaacagcaaagccagaggtggagcaccctgagccagatcacagcaaaagaaacagcataccaattgtgacagagcagcccctcatctctgctggagaaaacagagtgcaagtactgaaaaatgtgccatttaacattgtccttccccatggcaaccagctgggcattgataagagaggccatctgacagctccagatacgacagtcactgtctccatagcaacgatgcctacccactccatcaagacagaaacccagccacatggcttcgctgtgggaatccccccagcagtgtatcatcctgagcccactgagcgggtggtggttttcgatcggaatctcaatactgaccagttcagctctggtgctcaagccccaaatgctcaaaggcgaactccagactcgaccttctcagagaccttcaaggaaggcgttcaggaggaacaactttgaatataccctagaagcttcaaaatcacttcgacagaagccaggagacagtaccatgacgtacctgaacaaaggccagttctatcccatcaccttgaaggaggtgagcagcagtgaaggaatccatcatcccatcagcaaagttcgaagtgtgatcatggtggtttttgctgaagacaaaagcagagaagatcagttaaggcattggaagtactggcactcccggcagcacaccgctaaacaaagatgcattgacatagctgactataaagaaagcttcaacactatcagtaacatcgaggagattgcgtataacgccatttccttcacatgggacatcaacgatgaagcaaaggttttcatctctgtgaactgcttaagcacagatttctcttcccagaagggagtgaaggggttgcctcttaacattcaagttgatacctatagttacaacaaccgcagcaacaagcctgtgcaccgggcctactgccagatcaaggtcttctgtgacaagggagctgagcggaaaatcagggatgaagaacgaaagcaaagcaaaagaaaagtttctgatgttaaagtgccactgcttccctctcacaagcgaatggatatcacagttttcaaacccttcattgatctcgatactcagcctgtcctcttcattcctgacgtgcactttgccaacttgcagcggggcactcatgtccttcccattgcctctgaagaattggagggtgaaggctctgtcttgaaaagggggccgtacggcacagaagatgactttgctgtccctccttctaccaagctggcccggatagaagaaccaaagagagtgctgctctacgttcgaaaggagtcagaagaagtctttgatgccctgatgctcaaaaccccatctttgaagggcttgatggaagctatctcagacaaatacgatgttccccatgacaagattgggaaaatattcaagaagtgtaaaaaggggatcctggtgaacatggacgacaacattgtgaagcattactccaatgaggacaccttccagctgcagattgaagaagccggggggtcttacaagctcaccctgacggagatctaaaggcctgcgggccacagctccccaggagttcagtgcaggtgtttctagatcttacggtttggcaactgcaggtaaccccagtcagccatgtcgccagcacaggtctatgtcgagggaatgggttccttgcaggttggaggcggggctgcatctggcttggtggtagcatttaatctattgcattggtgtttttcagatgaaagagaaatccatataccattatgtttgaatttcctgatatatacaggatttaaagtgaaaactttattccaagagttaacagagtctctgggaagctttaggacatctgctacgttatttatcaaaatattgggatctctgccttgtgcctacagtgtcgtgggcctgctcgctagcagaagtcagaaaaggcgataggcttggctttaaggatttcgtgcccttgcctgaattcagtacaactccactgcctcacgttagcgggagcgcacctgaagagtacggggggagccctctctcccttaccctctcactctccaccagatgtttactaaacagggcatgttactgaaatcttcctttgcgactttctcggacatatcaactgcctttctcatgaagaattttaatgggttacagtatgaaatcagttaagataaagctgcattgtatataagtgcaatatatttttgaaggtctgtaaatgtgtacatacatgtcttatataaatatataatatataaatatggtgtctgtgtacatatagtgaagatatgcagtaagagctaccttaaagactttccctagacaaaggttaagttattttttgatcgtgtataccaagcagatagaatactgtgcttagtggaacccgctaaaaacctttttctctgtttttccaaacacaggcattctgtagcatagcaaaaccttctcaaatgacagagattctgtttgctgttgagaatgttgttatttggatttctgcactgtttaacaaatgaagtaaaagaaaaacactactgcaatcacgtcttttgttatgctagtatcagtcagatgcacttagagtgaagaaacactgtaattacagcacacagattgcaagtattgcgtaccaagtgatacaactcgaaatgcagttctcatcttcctgttttgagaaatgattattttatcacgcatcagagccttcgtgctttgattatcttgtatgttaacaattctagaaaacattcatgaattcacaaaaatatgttactatggcaggggaacattttgtacacatttaagtatataaaaatactaaaatatgtaattttataacaaagtcacgggtatctttaggttcagggaactagactaggtcattcgtgtaaatggactggtagttacagtcttaggttaaagtattctaatgaagtatgggaactaaattgctggttttctaagataagatatgggatatgggtcatataacttttgtattttttatgaagttgattttgtcttgcgtgttatttttaattgtatcattgaagatgtattttaaaccaaaggaattaaattttatatgtctatttcgtaatatgtc

SEQ ID NO: 259215 - DNA, 3563 bp, Artificial Sequence
  derived and/or modified sequence
gagaaaagcaaacccaacccgtcggggccgccgctccggacccgcagccgccgccgccgcctcctccccccggatcgggtgtactgtcccaacccgaaagtccagttctgcggcccggcagcggcgagcgggcgcgatgacacaggagtacgacaacaaacggccagtgttggttcttcagaatgaagcactttatccacagcggcggtcctacactagtgaggatgaggcctggaaatccttcctggaaaaccctctcactgcagcgaccaaagcgatgatgagcatcaatggagatgaagacagcgccgctgcgctgggcctgctctatgactactacaaggttccaagagagagaaggtcatcaacagcaaagccagaggtggagcaccctgagccagatcacagcaaaagaaacagcataccaattgtgacagagcagcccctcatctctgctggagaaaacagagtgcaagtactgaaaaatgtgccatttaacattgtccttccccatggcaaccagctgggcattgataagagaggccatctgacagctccagatacgacagtcactgtctccatagcaacgatgcctacccactccatcaagacagaaacccagccacatggcttcgctgtgggaatccccccagcagtgtatcatcctgagcccactgagcgggtggtggttttcgatcggaatctcaatactgaccagttcagctctggtgctcaagccccaaatgctcaaaggcgaactccagactcgaccttctcagagaccttcaaggaaggcgttcaggaggttttcttcccctcggatctcagtctgcggatgcctggcatgaattcagaggactatgtttttgacagtgtttctgggaacaactttgaatataccctagaagcttcaaaatcacttcgacagaagccaggagacagtaccatgacgtacctgaacaaaggccagttctatcccatcaccttgaaggaggtgagcagcagtgaaggaatccatcatcccatcagcaaagttcgaagtgtgatcatggtggtttttgctgaagacaaaagcagagaagatcagttaaggcattggaagtactggcactcccggcagcacaccgctaaacaaagatgcattgacatagctgactataaagaaagcttcaacactatcagtaacatcgaggagattgcgtataacgccatttccttcacatgggacatcaacgatgaagcaaaggttttcatctctgtgaactgcttaagcacagatttctcttcccagaagggagtgaaggggttgcctcttaacattcaagttgatacctatagttacaacaaccgcagcaacaagcctgtgcaccgggcctactgccagatcaaggtcttctgtgacaagggagctgagcggaaaatcagggatgaagaacgaaagcaaagcaaaagaaaagtttctgatgttaaagtgccactgcttccctctcacaagcgaatggatatcacagttttcaaacccttcattgatctcgatactcagcctgtcctcttcattcctgacgtgcactttgccaacttgcagcggggcactcatgtccttcccattgcctctgaagaattggagggtgaaggctctgtcttgaaaagggggccgtacggcacagaagatgactttgctgtccctccttctaccaagctggcccggatagaagaaccaaagagagtgctgctctacgttcgaaaggagtcagaagaagtctttgatgccctgatgctcaaaaccccatctttgaagggcttgatggaagctatctcagacaaatacgatgttccccatgacaagattgggaaaatattcaagaagtgtaaaaaggggatcctggtgaacatggacgacaacattgtgaagcattactccaatgaggacaccttccagctgcagattgaagaagccggggggtcttacaagctcaccctgacggagatctaaaggcctgcgggccacagctccccaggagttcagtgcaggtgtttctagatcttacggtttggcaactgcaggtaaccccagtcagccatgtcgccagcacaggtctatgtcgagggaatgggttccttgcaggttggaggcggggctgcatctggcttggtggtagcatttaatctattgcattggtgtttttcagatgaaagagaaatccatataccattatgtttgaatttcctgatatatacaggatttaaagtgaaaactttattccaagagttaacagagtctctgggaagctttaggacatctgctacgttatttatcaaaatattgggatctctgccttgtgcctacagtgtcgtgggcctgctcgctagcagaagtcagaaaaggcgataggcttggctttaaggatttcgtgcccttgcctgaattcagtacaactccactgcctcacgttagcgggagcgcacctgaagagtacggggggagccctctctcccttaccctctcactctccaccagatgtttactaaacagggcatgttactgaaatcttcctttgcgactttctcggacatatcaactgcctttctcatgaagaattttaatgggttacagtatgaaatcagttaagataaagctgcattgtatataagtgcaatatatttttgaaggtctgtaaatgtgtacatacatgtcttatataaatatataatatataaatatggtgtctgtgtacatatagtgaagatatgcagtaagagctaccttaaagactttccctagacaaaggttaagttattttttgatcgtgtataccaagcagatagaatactgtgcttagtggaacccgctaaaaacctttttctctgtttttccaaacacaggcattctgtagcatagcaaaaccttctcaaatgacagagattctgtttgctgttgagaatgttgttatttggatttctgcactgtttaacaaatgaagtaaaagaaaaacactactgcaatcacgtcttttgttatgctagtatcagtcagatgcacttagagtgaagaaacactgtaattacagcacacagattgcaagtattgcgtaccaagtgatacaactcgaaatgcagttctcatcttcctgttttgagaaatgattattttatcacgcatcagagccttcgtgctttgattatcttgtatgttaacaattctagaaaacattcatgaattcacaaaaatatgttactatggcaggggaacattttgtacacatttaagtatataaaaatactaaaatatgtaattttataacaaagtcacgggtatctttaggttcagggaactagactaggtcattcgtgtaaatggactggtagttacagtcttaggttaaagtattctaatgaagtatgggaactaaattgctggttttctaagataagatatgggatatgggtcatataacttttgtattttttatgaagttgattttgtcttgcgtgttatttttaattgtatcattgaagatgtattttaaaccaaaggaattaaattttatatgtctatttcgtaa

SEQ ID NO: 259216 - DNA, 3433 bp, Artificial Sequence
  derived and/or modified sequence
ctgccaaaagaagtagaaaacaaacggccagtgttggttcttcagaatgaagcactttatccacagcggcggtcctacactagtgaggatgaggcctggaaatccttcctggaaaaccctctcactgcagcgaccaaagcgatgatgagcatcaatggagatgaagacagcgccgctgcgctgggcctgctctatgactactacaaggttccaagagagagaaggtcatcaacagcaaagccagaggtggagcaccctgagccagatcacagcaaaagaaacagcataccaattgtgacagagcagcccctcatctctgctggagaaaacagagtgcaagtactgaaaaatgtgccatttaacattgtccttccccatggcaaccagctgggcattgataagagaggccatctgacagctccagatacgacagtcactgtctccatagcaacgatgcctacccactccatcaagacagaaacccagccacatggcttcgctgtgggaatccccccagcagtgtatcatcctgagcccactgagcgggtggtggttttcgatcggaatctcaatactgaccagttcagctctggtgctcaagccccaaatgctcaaaggcgaactccagactcgaccttctcagagaccttcaaggaaggcgttcaggaggttttcttcccctcggatctcagtctgcggatgcctggcatgaattcagaggactatgtttttgacagtgtttctgggaacaactttgaatataccctagaagcttcaaaatcacttcgacagaagccaggagacagtaccatgacgtacctgaacaaaggccagttctatcccatcaccttgaaggaggtgagcagcagtgaaggaatccatcatcccatcagcaaagttcgaagtgtgatcatggtggtttttgctgaagacaaaagcagagaagatcagttaaggcattggaagtactggcactcccggcagcacaccgctaaacaaagatgcattgacatagctgactataaagaaagcttcaacactatcagtaacatcgaggagattgcgtataacgccatttccttcacatgggacatcaacgatgaagcaaaggttttcatctctgtgaactgcttaagcacagatttctcttcccagaagggagtgaaggggttgcctcttaacattcaagttgatacctatagttacaacaaccgcagcaacaagcctgtgcaccgggcctactgccagatcaaggtcttctgtgacaagggagctgagcggaaaatcagggatgaagaacgaaagcaaagcaaaagaaaagtttctgatgttaaagtgccactgcttccctctcacaagcgaatggatatcacagttttcaaacccttcattgatctcgatactcagcctgtcctcttcattcctgacgtgcactttgccaacttgcagcggggcactcatgtccttcccattgcctctgaagaattggagggtgaaggctctgtcttgaaaagggggccgtacggcacagaagatgactttgctgtccctccttctaccaagctggcccggatagaagaaccaaagagagtgctgctctacgttcgaaaggagtcagaagaagtctttgatgccctgatgctcaaaaccccatctttgaagggcttgatggaagctatctcagacaaatacgatgttccccatgacaagattgggaaaatattcaagaagtgtaaaaaggggatcctggtgaacatggacgacaacattgtgaagcattactccaatgaggacaccttccagctgcagattgaagaagccggggggtcttacaagctcaccctgacggagatctaaaggcctgcgggccacagctccccaggagttcagtgcaggtgtttctagatcttacggtttggcaactgcaggtaaccccagtcagccatgtcgccagcacaggtctatgtcgagggaatgggttccttgcaggttggaggcggggctgcatctggcttggtggtagcatttaatctattgcattggtgtttttcagatgaaagagaaatccatataccattatgtttgaatttcctgatatatacaggatttaaagtgaaaactttattccaagagttaacagagtctctgggaagctttaggacatctgctacgttatttatcaaaatattgggatctctgccttgtgcctacagtgtcgtgggcctgctcgctagcagaagtcagaaaaggcgataggcttggctttaaggatttcgtgcccttgcctgaattcagtacaactccactgcctcacgttagcgggagcgcacctgaagagtacggggggagccctctctcccttaccctctcactctccaccagatgtttactaaacagggcatgttactgaaatcttcctttgcgactttctcggacatatcaactgcctttctcatgaagaattttaatgggttacagtatgaaatcagttaagataaagctgcattgtatataagtgcaatatatttttgaaggtctgtaaatgtgtacatacatgtcttatataaatatataatatataaatatggtgtctgtgtacatatagtgaagatatgcagtaagagctaccttaaagactttccctagacaaaggttaagttattttttgatcgtgtataccaagcagatagaatactgtgcttagtggaacccgctaaaaacctttttctctgtttttccaaacacaggcattctgtagcatagcaaaaccttctcaaatgacagagattctgtttgctgttgagaatgttgttatttggatttctgcactgtttaacaaatgaagtaaaagaaaaacactactgcaatcacgtcttttgttatgctagtatcagtcagatgcacttagagtgaagaaacactgtaattacagcacacagattgcaagtattgcgtaccaagtgatacaactcgaaatgcagttctcatcttcctgttttgagaaatgattattttatcacgcatcagagccttcgtgctttgattatcttgtatgttaacaattctagaaaacattcatgaattcacaaaaatatgttactatggcaggggaacattttgtacacatttaagtatataaaaatactaaaatatgtaattttataacaaagtcacgggtatctttaggttcagggaactagactaggtcattcgtgtaaatggactggtagttacagtcttaggttaaagtattctaatgaagtatgggaactaaattgctggttttctaagataagatatgggatatgggtcatataacttttgtattttttatgaagttgattttgtcttgcgtgttatttttaattgtatcattgaagatgtattttaaaccaaaggaattaaattttatatgtctatttcgtaatatgtc

SEQ ID NO: 259217 - DNA, 1857 bp, Artificial Sequence
  derived and/or modified sequence
atgacccaggagtatgacaacaagaggcctgtgctggtgctgcagaatgaggccctgtacccccagaggaggagctacaccagtgaagatgaggcctggaagagcttcctggagaaccccctgacagctgccaccaaggccatgatgagcatcaatggagatgaagattctgctgctgccctgggcctgctgtatgactactacaaggtgccccgggagcggcgcagcagcacagccaagccagaggtggagcaccctgagccagaccacagcaagagaaattccatccccatcgtgacagagcagcccctcatctctgctggagaaaatagagtgcaggtgctgaagaatgtgcccttcaacatcgtgctgccccacggcaaccagctgggcatcgacaagaggggccacctgacagccccagacaccaccgtgacagtgtccatcgccaccatgcccacccacagcatcaagacagagacccagccccacggctttgctgtgggcatccccccagctgtgtaccaccctgagcccacagagcgggtggtggtgtttgacaggaacctgaacacagaccagttcagcagcggggcccaggccccaaatgcccagaggaggaccccagacagcaccttcagcgagaccttcaaggagggcgtgcaggaggtgttcttccccagcgacctgagcctgaggatgcctggcatgaacagcgaggactatgtgtttgacagcgtgtctggcaacaactttgagtacaccctggaggccagcaagagcctgcggcagaagccaggggacagcaccatgacctacctgaacaagggccagttctaccccatcaccctgaaggaggtgagcagcagcgagggcatccaccaccccatcagcaaggtgcgcagcgtcatcatggtggtgtttgctgaggacaagagccgggaggaccagctgcggcactggaagtactggcacagccggcagcacacagccaagcagcgctgcatcgacattgctgactacaaggagagcttcaacaccatcagcaacatcgaggagatcgcctacaatgccatctccttcacctgggacatcaatgatgaggccaaggtgttcatctctgtgaactgcctgagcacagacttcagcagccagaagggcgtgaagggcctgcccctgaacatccaggtggacacctacagctacaacaacagaagcaacaagcctgtgcaccgggcctactgccagatcaaggtgttctgtgacaagggagctgagaggaagatcagagatgaggagaggaagcagagcaagaggaaggtgtctgatgtgaaggtgcccctgctgcccagccacaagaggatggacatcaccgtcttcaagcccttcatcgacctggacacccagcctgtgctcttcatcccagatgtgcactttgccaacctgcagaggggcacccacgtgctgcccatcgccagcgaggagctggagggggagggctctgtgctgaagaggggcccctacggcacagaagatgactttgctgtgccccccagcaccaagctggccagaattgaggagcccaagagggtgctgctgtatgtgaggaaggagagcgaggaggtgtttgatgccctgatgctgaagacccccagcctgaagggcctgatggaggccatcagtgacaagtatgatgtgccccatgacaagattggcaagatcttcaagaagtgcaagaagggcatcctggtgaacatggatgacaacatcgtgaagcactacagcaatgaagacaccttccagctgcagatcgaggaggccggcggcagctacaagctgaccctgacagagatctag

SEQ ID NO: 259218 - DNA, 1857 bp, Artificial Sequence
  derived and/or modified sequence
ctgcccaaggaggtggagaacaagaggcctgtgctggtgctgcagaatgaggccctgtacccccagaggaggagctacaccagtgaagatgaggcctggaagagcttcctggagaaccccctgacagctgccaccaaggccatgatgagcatcaatggagatgaagattctgctgctgccctgggcctgctgtatgactactacaaggtgccccgggagcggcgcagcagcacagccaagccagaggtggagcaccctgagccagaccacagcaagagaaattccatccccatcgtgacagagcagcccctcatctctgctggagaaaatagagtgcaggtgctgaagaatgtgcccttcaacatcgtgctgccccacggcaaccagctgggcatcgacaagaggggccacctgacagccccagacaccaccgtgacagtgtccatcgccaccatgcccacccacagcatcaagacagagacccagccccacggctttgctgtgggcatccccccagctgtgtaccaccctgagcccacagagcgggtggtggtgtttgacaggaacctgaacacagaccagttcagcagcggggcccaggccccaaatgcccagaggaggaccccagacagcaccttcagcgagaccttcaaggagggcgtgcaggaggtgttcttccccagcgacctgagcctgaggatgcctggcatgaacagcgaggactatgtgtttgacagcgtgtctggcaacaactttgagtacaccctggaggccagcaagagcctgcggcagaagccaggggacagcaccatgacctacctgaacaagggccagttctaccccatcaccctgaaggaggtgagcagcagcgagggcatccaccaccccatcagcaaggtgcgcagcgtcatcatggtggtgtttgctgaggacaagagccgggaggaccagctgcggcactggaagtactggcacagccggcagcacacagccaagcagcgctgcatcgacattgctgactacaaggagagcttcaacaccatcagcaacatcgaggagatcgcctacaatgccatctccttcacctgggacatcaatgatgaggccaaggtgttcatctctgtgaactgcctgagcacagacttcagcagccagaagggcgtgaagggcctgcccctgaacatccaggtggacacctacagctacaacaacagaagcaacaagcctgtgcaccgggcctactgccagatcaaggtgttctgtgacaagggagctgagaggaagatcagagatgaggagaggaagcagagcaagaggaaggtgtctgatgtgaaggtgcccctgctgcccagccacaagaggatggacatcaccgtcttcaagcccttcatcgacctggacacccagcctgtgctcttcatcccagatgtgcactttgccaacctgcagaggggcacccacgtgctgcccatcgccagcgaggagctggagggggagggctctgtgctgaagaggggcccctacggcacagaagatgactttgctgtgccccccagcaccaagctggccagaattgaggagcccaagagggtgctgctgtatgtgaggaaggagagcgaggaggtgtttgatgccctgatgctgaagacccccagcctgaagggcctgatggaggccatcagtgacaagtatgatgtgccccatgacaagattggcaagatcttcaagaagtgcaagaagggcatcctggtgaacatggatgacaacatcgtgaagcactacagcaatgaagacaccttccagctgcagatcgaggaggccggcggcagctacaagctgaccctgacagagatctag

SEQ ID NO: 259219 - DNA, 1857 bp, Artificial Sequence
  derived and/or modified sequence
atgacccaggagtacgacaacaagcggcccgtgctggtgctgcagaatgaagctctgtacccccagcgacgtagctacacaagtgaagatgaagcatggaaaagtttcctggagaatccgctcaccgctgcaaccaaagccatgatgagcatcaatggcgatgaagatagcgccgctgccttgggccttctgtacgactactataaagtgccgagggagcgtcgctcttctacggccaagccagaggtagagcaccctgaaccggaccacagcaaaagaaactccatcccaatagttaccgagcagcccctaatttcggctggagagaatcgggtacaagtcctgaaaaacgttccctttaacatcgtacttccccatgggaaccagctcgggatagacaaacgcggtcacctgacagctccagatacgaccgtaaccgtgtccatagccacaatgcccacacactcaatcaagaccgagactcagcctcacgggttcgctgtcggtatcccaccagccgtctatcacccagaacccaccgagagggtggtcgtgttcgataggaatctcaatactgatcagttttccagcggcgcccaagcaccaaacgcacagcgacggaccccagatagcacattctcagaaacattcaaggagggagttcaggaagtgttctttcctagcgacttgtcgttgagaatgccaggtatgaatagtgaggactatgtgttcgatagcgtttcaggtaacaatttcgaatatacccttgaggcctccaaatcgctccgtcagaaacccggggattccacgatgacctacttgaataaagggcagttctaccccatcaccctgaaagaggtgtcctcttcagagggaattcaccatccaatcagcaaagtccgcagcgttatcatggtcgtgttcgccgaggataaaagcagagaagatcaactgcgtcactggaaatactggcacagtaggcagcataccgccaagcagagatgcatagatatagccgactacaaggagtcttttaacaccattagtaacattgaagagatcgcttataatgcaatcagcttcacatgggatattaacgacgaggccaaggtcttcatctctgtgaactgtctgagtacggatttttcctctcagaaaggggtgaaagggctaccactaaacatccaggtagatacgtatagctacaataatcgctccaacaagcccgtgcaccgtgcttattgccagatcaaggtcttttgtgacaagggagctgaacgtaagatcagggacgaagagcggaagcagtccaagagaaaagtgtcagatgttaaagtgccacttctcccatctcacaagagaatggacatcacagtgtttaaaccttttattgatttggacacgcagcccgtgctatttatacctgatgttcacttcgccaacctgcagaggggaacccacgtccttccgattgcaagtgaagagctggagggtgaaggatccgtccttaagcgcggaccctatggaaccgaggacgatttcgctgtgcctccttcaacaaaattggcccggattgaagaacccaagcgcgtgcttctgtatgttagaaaggagagtgaagaggtttttgacgcccttatgctgaaaacccccagtctaaaaggactaatggaggctatctcagacaagtatgatgtgcctcacgacaagattggtaagatatttaaaaagtgcaagaagggtatcctagtgaacatggatgataacattgtgaagcactactccaatgaagacaccttccagctgcagattgaggaagccggaggttcatacaagttgacccttacggagatctag

SEQ ID NO: 259220 - DNA, 1857 bp, Artificial Sequence
  derived and/or modified sequence
ctgcccaaggaggtggagaacaagcggcccgtgctggtgctgcagaacgaagcactgtacccccagcggcgaagctacacatccgaggacgaagcctggaaatcctttcttgagaatccactcaccgcagctacaaaagcgatgatgagcatcaacggtgacgaggattccgccgctgcgttgggtctgctgtatgattattacaaagttccccgcgagaggcgttcttcgaccgccaaaccggaagtcgagcatcccgagccagaccactctaagcgcaactccatcccgatcgtaacagagcaacctctgatttccgctggggagaatcgcgtgcaggtgctcaaaaacgtgcccttcaatatagtgttgccacacgggaaccagctgggcatcgacaagagagggcaccttactgcgcctgacacgaccgttaccgtgagcattgcaacaatgcccacacacagcatcaaaacagagacccagcctcacggattcgctgtggggatcccccctgccgtctaccaccccgagccaaccgaacgagtggttgtctttgaccgcaatctgaacacggatcagttttctagcggagctcaagccccgaatgcacagcgccgaaccccagatagcacattctcagaaacgttcaaggaaggcgtgcaagaggttttctttccttcagatctatccttaaggatgccgggtatgaattccgaggactatgtcttcgacagcgtgagtggcaacaactttgaatacacattggaagcttcgaaaagcctgcgccagaaaccaggggactctacaatgacttacctgaacaaaggtcagttttatcctatcacccttaaggaagtctctagcagtgaaggcattcaccatcctatctccaaagttcgctccgtgattatggtggttttcgccgaggataagtcacgggaggatcagctgaggcactggaaatactggcatagtaggcagcataccgccaaacagaggtgcatcgatattgccgattataaggagagcttcaacacaatttccaacatagaagagatcgcttacaatgcgatcagctttacttgggatattaatgatgaagcgaaggtgtttatctccgtcaactgtctgagtacggacttcagtagtcagaagggagtcaaaggattacctctgaacatccaagtagatacctattcctataacaacagatctaataaaccagtgcaccgcgcatattgtcaaataaaggtgttctgcgataagggagccgaaaggaagatcagggatgaggaacggaaacagtctaagaggaaggtgtctgacgtcaaagttcccctgttgccatctcacaagcggatggatataaccgtctttaaaccatttatcgacctggacacccagcccgtcctgtttattcctgacgtgcactttgctaaccttcagaggggaacccacgtgctcccaatcgcaagtgaggagctggaaggcgaagggtccgtacttaagcgcgggccttatggaacagaagatgatttcgctgtgccgccaagcaccaaattggcaaggatcgaggaaccaaagagggtgctactgtacgtgcgaaaagagtctgaagaggtgtttgacgcgttgatgctgaagacaccgtcactgaaaggcctgatggaagccatctctgacaagtatgacgtcccgcacgataagattggtaaaattttcaagaagtgtaagaaagggatcctggttaatatggacgacaatatagtgaagcactactcgaacgaagatactttccagcttcagatcgaagaggccggcggctcctacaaactgactctgacagaaatatag

SEQ ID NO: 259221 - DNA, 1857 bp, Artificial Sequence
  derived and/or modified sequence
atgacccaagaatatgataataagcgcccagtactcgtcctccaaaatgaggccctctacccccaaagacggagttacacctcagaggacgaggcttggaagtctttcctggagaatcctctgacggccgctactaaggcaatgatgagtataaatggcgacgaagacagtgcagctgctctgggcttactgtatgactactacaaggttccgagggaacgtcgctcctccaccgccaaacctgaagttgagcatcctgagccagatcattccaagcgaaactcgattccaattgtgaccgagcaaccactgatttcggccggtgaaaaccgggtgcaggttttgaagaatgtaccatttaatatcgtgctgccacatgggaatcagctaggaattgataagcgcggacatctgaccgcacctgacaccactgttaccgtgtctatagcgactatgcctactcatagcatcaagacagagacacagcctcacggctttgccgtcgggatcccccctgccgtgtatcatccagaaccgacagaacgggtggtagtgttcgataggaatctgaacacggatcagttttcaagcggcgctcaggcccctaatgcgcaacgtagaacacctgactctactttcagcgagacatttaaggaaggggttcaagaggtcttcttcccatccgatctatcccttagaatgcccggaatgaacagcgaggattacgtgttcgacagtgtgagtggcaataatttcgagtacacactggaggcctctaaatctttgaggcagaaaccaggcgactcaacaatgacctatctaaataagggacaattctatcccataacactgaaagaggtgtcttcctccgagggaatacatcaccccatcagcaaggtacgaagcgtgattatggttgtattcgccgaggacaaaagtcgggaagatcagcttaggcactggaaatattggcacagccgacagcacaccgcaaagcaaaggtgcattgatattgctgattataaagaatctttcaacactatcagcaatatcgaggagatcgcctacaacgctattagctttacttgggacattaatgacgaagccaaagtttttatctctgtgaactgcttgtcaacagacttctccagccaaaaaggggtcaagggcctgccgctgaacatacaagtggacacctatagttacaataatagatccaacaagccagtgcaccgcgcatattgccagatcaaggtgttttgcgacaagggtgccgagagaaagataagggatgaggaacgaaagcagagcaaacgcaaagtcagcgacgtcaaagtgccactgctcccgtctcacaagcgcatggacatcactgtattcaagccgtttatcgacctggacacccaacctgttctcttcatccctgatgtccactttgcgaacttgcaaagaggtactcatgtgctgcctattgctagtgaagagctggaaggtgaagggtctgtgttaaagcgcggaccttatgggaccgaggacgacttcgctgtgccacccagtacaaagctggcccgtatcgaggaacctaagagagtcctgctgtacgtccgtaaggagtccgaagaggttttcgatgccctgatgctgaaaactccttcgctcaagggactaatggaagctatctccgacaaatacgacgtgccgcacgataaaattggcaaaatctttaaaaaatgtaaaaaggggatcctggtgaatatggacgacaatatcgtcaagcattattcgaatgaagacaccttccagctgcagattgaagaagccggaggctcgtacaagttaactctgaccgagatttag

SEQ ID NO: 259222 - DNA, 1857 bp, Artificial Sequence
  derived and/or modified sequence
ctgccaaaggaagtggagaacaagcggccagtcctggtgttgcaaaatgaggcattgtacccacagagacgtagttataccagcgaggacgaggcctggaagtctttcctggagaatccattaactgccgctacaaaagcaatgatgtccatcaacggcgatgaggatagcgcagcagcccttggactgctgtatgactactacaaagtgcctagagaacgcaggagctccacagccaagccggaagtggagcacccagagcctgaccactccaagagaaattctatccccattgtaacggagcagcccctgatttcagccggagagaatagagtacaggtgttgaagaacgttcctttcaatattgtgcttccccacggaaaccagctaggtattgataaaagaggacatttgaccgctcccgacactaccgtgaccgtgagtatcgcaacaatgcccacacacagcatcaaaaccgagactcaaccacatggcttcgcagtgggcatccctcctgcagtgtatcaccccgagcctactgaacgagtggttgtgtttgaccggaaccttaataccgatcaattttcatctggggcacaggccccaaacgcacagaggaggacgcctgactccacgttttccgagacattcaaggagggagtccaggaggtgttttttcccagtgatctgagcctgcggatgcccggaatgaactctgaggactacgtcttcgatagcgttagcggcaacaacttcgaatacacactggaggccagcaaatctctgagacaaaaacccggtgactctacgatgacatatttgaataaaggtcaattctatccgattacgcttaaggaggtgtctagtagcgaaggcattcaccatcccatatcaaaggttcggagtgttatcatggtcgtctttgctgaagacaagtctcgagaggaccagctgcgtcactggaagtactggcactccaggcagcataccgctaaacaaagatgcatcgatatcgcagattacaaggagtccttcaacactatttccaacatagaggagatcgcttacaacgccatatctttcacgtgggacataaacgatgaggccaaggtctttatctcagtgaactgtctgagtacagatttttcatcccagaagggcgttaagggacttcctctgaatattcaggtcgatacgtactcatacaacaaccggagcaataaacctgttcatagggcatactgccagattaaagtgttctgtgacaagggggcagaaaggaaaatacgggacgaggagaggaagcagtcaaagcgtaaggttagtgatgtgaaagtgcctcttttacccagtcacaagcgcatggacatcaccgtcttcaagccatttatcgacctggacacacagcccgttctgtttataccagacgtgcacttcgctaacttacagagggggacacatgtactgcccatcgcatccgaggaactggaaggggagggatcagtgttgaaacgcggaccatacgggaccgaggatgactttgctgttccaccaagtacgaaactcgccagaattgaagaaccaaagcgcgtgcttctgtatgtgcgcaaagaaagtgaggaggtcttcgacgccctgatgctaaaaacccctagtctaaaaggattgatggaggccatcagtgataagtacgacgtcccacatgataaaatcggcaaaattttcaagaaatgcaaaaaaggcatactggttaacatggacgacaatatcgtcaaacattattccaacgaagataccttccagctgcagatcgaggaagccggaggcagttataagctgactcttactgaaatctag

SEQ ID NO: 259223 - DNA, 1857 bp, Artificial Sequence
  derived and/or modified sequence
atgacccaggagtacgacaacaagagacccgtgctggtgctgcagaacgaggccctgtacccccagagaagaagctacaccagcgaggacgaggcctggaagagcttcctggagaaccccctgaccgccgccaccaaggccatgatgagcatcaacggcgacgaggacagcgccgccgccctgggcctgctgtacgactactacaaggtgcccagagagagaagaagcagcaccgccaagcccgaggtggagcaccccgagcccgaccacagcaagagaaacagcatccccatcgtgaccgagcagcccctgatcagcgccggcgagaacagagtgcaggtgctgaagaacgtgcccttcaacatcgtgctgccccacggcaaccagctgggcatcgacaagagaggccacctgaccgcccccgacaccaccgtgaccgtgagcatcgccaccatgcccacccacagcatcaagaccgagacccagccccacggcttcgccgtgggcatcccccccgccgtgtaccaccccgagcccaccgagagagtggtggtgttcgacagaaacctgaacaccgaccagttcagcagcggcgcccaggcccccaacgcccagagaagaacccccgacagcaccttcagcgagaccttcaaggagggcgtgcaggaggtgttcttccccagcgacctgagcctgagaatgcccggcatgaacagcgaggactacgtgttcgacagcgtgagcggcaacaacttcgagtacaccctggaggccagcaagagcctgagacagaagcccggcgacagcaccatgacctacctgaacaagggccagttctaccccatcaccctgaaggaggtgagcagcagcgagggcatccaccaccccatcagcaaggtgagaagcgtgatcatggtggtgttcgccgaggacaagagcagagaggaccagctgagacactggaagtactggcacagcagacagcacaccgccaagcagagatgcatcgacatcgccgactacaaggagagcttcaacaccatcagcaacatcgaggagatcgcctacaacgccatcagcttcacctgggacatcaacgacgaggccaaggtgttcatcagcgtgaactgcctgagcaccgacttcagcagccagaagggcgtgaagggcctgcccctgaacatccaggtggacacctacagctacaacaacagaagcaacaagcccgtgcacagagcctactgccagatcaaggtgttctgcgacaagggcgccgagagaaagatcagagacgaggagagaaagcagagcaagagaaaggtgagcgacgtgaaggtgcccctgctgcccagccacaagagaatggacatcaccgtgttcaagcccttcatcgacctggacacccagcccgtgctgttcatccccgacgtgcacttcgccaacctgcagagaggcacccacgtgctgcccatcgccagcgaggagctggagggcgagggcagcgtgctgaagagaggcccctacggcaccgaggacgacttcgccgtgccccccagcaccaagctggccagaatcgaggagcccaagagagtgctgctgtacgtgagaaaggagagcgaggaggtgttcgacgccctgatgctgaagacccccagcctgaagggcctgatggaggccatcagcgacaagtacgacgtgccccacgacaagatcggcaagatcttcaagaagtgcaagaagggcatcctggtgaacatggacgacaacatcgtgaagcactacagcaacgaggacaccttccagctgcagatcgaggaggccggcggcagctacaagctgaccctgaccgagatctag

SEQ ID NO: 259224 - DNA, 1857 bp, Artificial Sequence
  derived and/or modified sequence
ctgcccaaggaggtggagaacaagagacccgtgctggtgctgcagaacgaggccctgtacccccagagaagaagctacaccagcgaggacgaggcctggaagagcttcctggagaaccccctgaccgccgccaccaaggccatgatgagcatcaacggcgacgaggacagcgccgccgccctgggcctgctgtacgactactacaaggtgcccagagagagaagaagcagcaccgccaagcccgaggtggagcaccccgagcccgaccacagcaagagaaacagcatccccatcgtgaccgagcagcccctgatcagcgccggcgagaacagagtgcaggtgctgaagaacgtgcccttcaacatcgtgctgccccacggcaaccagctgggcatcgacaagagaggccacctgaccgcccccgacaccaccgtgaccgtgagcatcgccaccatgcccacccacagcatcaagaccgagacccagccccacggcttcgccgtgggcatcccccccgccgtgtaccaccccgagcccaccgagagagtggtggtgttcgacagaaacctgaacaccgaccagttcagcagcggcgcccaggcccccaacgcccagagaagaacccccgacagcaccttcagcgagaccttcaaggagggcgtgcaggaggtgttcttccccagcgacctgagcctgagaatgcccggcatgaacagcgaggactacgtgttcgacagcgtgagcggcaacaacttcgagtacaccctggaggccagcaagagcctgagacagaagcccggcgacagcaccatgacctacctgaacaagggccagttctaccccatcaccctgaaggaggtgagcagcagcgagggcatccaccaccccatcagcaaggtgagaagcgtgatcatggtggtgttcgccgaggacaagagcagagaggaccagctgagacactggaagtactggcacagcagacagcacaccgccaagcagagatgcatcgacatcgccgactacaaggagagcttcaacaccatcagcaacatcgaggagatcgcctacaacgccatcagcttcacctgggacatcaacgacgaggccaaggtgttcatcagcgtgaactgcctgagcaccgacttcagcagccagaagggcgtgaagggcctgcccctgaacatccaggtggacacctacagctacaacaacagaagcaacaagcccgtgcacagagcctactgccagatcaaggtgttctgcgacaagggcgccgagagaaagatcagagacgaggagagaaagcagagcaagagaaaggtgagcgacgtgaaggtgcccctgctgcccagccacaagagaatggacatcaccgtgttcaagcccttcatcgacctggacacccagcccgtgctgttcatccccgacgtgcacttcgccaacctgcagagaggcacccacgtgctgcccatcgccagcgaggagctggagggcgagggcagcgtgctgaagagaggcccctacggcaccgaggacgacttcgccgtgccccccagcaccaagctggccagaatcgaggagcccaagagagtgctgctgtacgtgagaaaggagagcgaggaggtgttcgacgccctgatgctgaagacccccagcctgaagggcctgatggaggccatcagcgacaagtacgacgtgccccacgacaagatcggcaagatcttcaagaagtgcaagaagggcatcctggtgaacatggacgacaacatcgtgaagcactacagcaacgaggacaccttccagctgcagatcgaggaggccggcggcagctacaagctgaccctgaccgagatctag

SEQ ID NO: 259225 - DNA, 264 bp, Artificial Sequence
  derived and/or modified sequence
atgatcaagttcaccaccaagatctaccaccccaacgtggacgagaacggccagatctgcctgcccatcatcagcagcgagaactggaagccctgcaccaagacctgccaggtgctggaggccctgaacgtgctggtgaacagacccaacatcagagagcccctgagaatggacctggccgacctgctgacccagaaccccgagctgttcagaaagaacgccgaggagttcaccctgagattcggcgtggacagacccagctag

SEQ ID NO: 259226 - DNA, 198 bp, Artificial Sequence
  derived and/or modified sequence
atgatcaagttcaccaccaagatctaccaccccaacgtggacgagaacggccagatctgcctgcccatcatcagcagcgagaactggaagccctgcaccaagacctgccaggtgctggaggccctgaacgtgctggtgaacagacccaacatcagagagcccctgagaatggacctggccgacctgctgacccagtag

SEQ ID NO: 259227 - DNA, 264 bp, Artificial Sequence
  derived and/or modified sequence
atgatcaaattcaccacgaaaatctaccatcccaacgtggacgagaatggacagatttgcctacccatcatttcgtcagagaactggaaaccttgcacaaaaacttgtcaagtgcttgaagcgctgaatgtgcttgttaatcggcccaatattagagagcccttacggatggacctggccgatttgctcactcagaaccccgagcttttccgtaagaatgccgaagagttcacattaaggtttggggtggatcgcccaagctag

SEQ ID NO: 259228 - DNA, 198 bp, Artificial Sequence
  derived and/or modified sequence
atgatcaagttcacaacgaaaatatatcacccaaatgtggacgagaacggccaaatttgcctgcccattattagtagtgaaaattggaagccctgcactaagacctgtcaggttctcgaggcgctgaatgtcctcgtgaatcgtcctaatatcagggaacccctgagaatggatttagcggatctgctgactcagtag

SEQ ID NO: 259229 - DNA, 264 bp, Artificial Sequence
  derived and/or modified sequence
atgatcaagttcaccaccaagatctaccaccccaacgtggatgaaaatggccagatctgcctgcccatcatcagcagcgagaactggaagccctgcaccaagacctgccaggtgctggaggccctgaatgtgctggtgaaccggcccaacatccgggagcccctgaggatggacctggccgacctgctgacccagaaccctgagctgttcaggaagaatgctgaggagttcaccctgcgctttggagtggaccggcccagctag

SEQ ID NO: 259230 - DNA, 198 bp, Artificial Sequence
  derived and/or modified sequence
atgatcaagttcaccaccaagatctaccaccccaacgtggatgaaaatggccagatctgcctgcccatcatcagcagcgagaactggaagccctgcaccaagacctgccaggtgctggaggccctgaatgtgctggtgaaccggcccaacatccgggagcccctgaggatggacctggccgacctgctgacccagtag

SEQ ID NO: 259231 - DNA, 264 bp, Artificial Sequence
  derived and/or modified sequence
atgatcaagttcaccaccaagatctaccaccccaacgtggacgagaatgggcagatttgtttgccgatcatctcatctgagaattggaagccctgtacgaagacttgccaggtactcgaggcactgaatgtcctcgtcaacaggcccaacattcgcgaaccgctcagaatggatcttgccgacctgctgacccagaaccccgagttgttccggaagaatgccgaagagttcacactgcggtttggagtcgacagaccttcatag

SEQ ID NO: 259232 - DNA, 198 bp, Artificial Sequence
  derived and/or modified sequence
atgatcaagttcaccaccaagatctaccaccccaacgtggacgagaatgggcaaatctgtctgcctattattagctccgaaaactggaagccatgcaccaagacatgtcaagtgctagaagctctgaatgtgctcgttaaccgcccaaacatcagagagccactgagaatggacctcgccgacttgttaactcagtag

SEQ ID NO: 259233 - DNA, 264 bp, Artificial Sequence
  derived and/or modified sequence
atgattaagttcacaacgaaaatttaccatcctaacgtggacgaaaatggacagatctgtttgcctattatttcaagtgaaaactggaaaccctgcaccaagacatgtcaggtgctggaagccttaaacgtgctcgtaaacagaccgaacatcagagaaccactgaggatggacctcgcggacttactcactcagaacccagagctgtttcggaaaaacgccgaagaattcacgctgagattcggagttgacaggccctcctag

SEQ ID NO: 259234 - DNA, 198 bp, Artificial Sequence
  derived and/or modified sequence
atgatcaagtttactacgaagatctaccaccccaacgtggatgagaacgggcagatttgcttgcccatcatcagctcagaaaattggaagccatgcaccaagacatgccaggtactggaggccctcaatgtcctggttaatcgtcccaatataagggagcccctgagaatggacctcgcagatctgttgactcagtag

SEQ ID NO: 259235 - protein, 440 aa, Artificial Sequence
  derived and/or modified sequence
MNTLLCKGMFCLLSWEADSRGRLGEYTLQPLSLQTEETTELGSKKELKSMPFITYLSGLLTAQMLSDDQLISGVEIRCEEKGRCPSTCHLCRRPGKEQLSPTPVLLEINRVVPLYTLIQDNGTKEAFKSALMSSYWCSGKGDVIDDWCRCDLSAFDANGLPNCSPLLQPVLRLSPTVEPSSTVVSLEWVDVQPAIGTKVSDYILQHKKVDEYTDTDLYTGEFLSFADDLLSGLGTSCVAAGRSHGEVPEVSIYSVIFKCLEPDGLYKFTLYAVDTRGRHSELSTVTLRTACPLVDDNKAEEIADKIYNLYNGYTSGKEQQMAYNTLMEVSASMLFRVQHHYNSHYEKFGDFVWRSEDELGPRKAHLILRRLERVSSHCSSLLRSAYIQSRVETVPYLFCRSEEVRPAGMVWYSILKDTKITCEEKMVSMARNTYGESKGR

SEQ ID NO: 259236 - protein, 98 aa, Artificial Sequence
  derived and/or modified sequence
  misc_feature (1)..(1): Xaa can be any naturally occurring amino acid
XMAYNTLMEVSASMLFRVQHHYNSHYEKFGDFVWRSEDELGPSLLESFMSLQDINLLERRPGRPQRPGNPLSNVSWRISEIAPTSHTDMSAGIKETAS

SEQ ID NO: 259237 - DNA, 1323 bp, Artificial Sequence
  derived and/or modified sequence
atgaatacacttctgtgcaaaggaatgttctgcctgcttagctgggaggccgactcaagagggcggctcggcgagtacaccttacagcccctgtccttacagaccgaagagacgaccgagctcggctcaaagaaagagctcaaatccatgccctttatcacctacctgtcagggttactgacggcccagatgctaagtgacgaccagcttatctcaggcgttgaaatccgctgcgaggaaaagggcagatgcccttcaacatgccatctctgtcggcggcccggaaaggagcaactgagcccaacacccgtcttgctggaaatcaaccgggtcgtccccctttataccctcattcaagacaatggtaccaaggaagcatttaagagcgcgttgatgagttcttattggtgctcaggaaagggcgacgtgatcgatgattggtgtaggtgtgaccttagcgccttcgacgccaatggactccctaattgcagccccctgttgcaacccgtcctgcggttatcccctacagtggagccaagttccaccgtggtcagtttagagtgggttgatgtccaaccagcgattggtaccaaagtctctgattatatcctgcaacacaaaaaggttgacgaatatacagatacggacttgtatactggcgaattcctctccttcgccgacgatctcttatccggactgggcacatcttgcgtggcagcggggcggagccacggcgaagtgccagaagtgagcatctactccgtcattttcaaatgtctcgaacccgacggcctctataaatttaccctgtacgcagtcgacacaagggggcgccacagcgagctctcaaccgtgacactgagaaccgcgtgtccactggtggatgacaataaggcagaagaaatagccgataaaatctataacttatacaatggatatacatccggcaaagaacagcaaatggcctataacactctgatggaagtctctgcttccatgctgttccgcgtccagcatcactacaacagtcactacgagaaattcggggacttcgtgtggaggtccgaggatgaactgggaccgcggaaggctcacctcatcctgcggcggctggagagggtctccagccactgttcctcactgctgaggtccgcctacatccagtccagagtggagactgtaccatatctcttctgtaggagtgaagaggtaaggccagcgggcatggtttggtactccatactgaaggatactaaaatcacttgtgaggagaagatggtgagtatggcgaggaatacgtacggcgagtcaaaaggccggtag

SEQ ID NO: 259238 - DNA, 1323 bp, Artificial Sequence
  derived and/or modified sequence
atgaacaccctgctgtgcaagggcatgttctgcctgctgtcctgggaggccgacagccggggccgcctgggggagtacaccctgcagcccctgagcctgcagacagaggagaccacagagctgggcagcaagaaggagctgaagtccatgcccttcatcacctacctgagcggcctgctgacagcccagatgctgagtgatgaccagctgatcagcggcgtggagatccgctgtgaggagaagggccgctgccccagcacctgccacctgtgccggcggcctgggaaggagcagctgagccccacccctgtgctgctggagatcaacagagtggtgcccctgtacaccctcatccaggacaatggcaccaaggaggccttcaagagcgccctgatgagcagctactggtgcagcgggaaaggagatgtgattgatgactggtgccgctgtgacctgagcgcctttgatgccaacggcctgcccaactgcagccccctgctgcagcctgtgctgcggctgagccccaccgtggagcccagcagcacagtggtgtccctggagtgggtggatgtgcagcctgccatcggcaccaaggtgtctgactacatcctgcagcacaagaaggtggatgagtacacagacacagacctgtacacaggagagttcctgagctttgctgatgacctgctgagcggcctgggcaccagctgtgtggccgccggccgcagccacggggaggtgcctgaggtgtccatctacagcgtcatcttcaagtgcctggagccagatggcctgtacaagttcaccctgtatgctgtggacacccggggccgccacagcgagctgagcacagtgaccctgaggacagcctgccccctggtggatgacaacaaggccgaggagattgctgacaagatctacaacctgtacaacggctacaccagcggcaaggagcagcagatggcctacaacaccctgatggaggtgtctgcctccatgctgttccgggtgcagcaccactacaacagccactatgagaagtttggagactttgtgtggaggagtgaagatgagctgggccccaggaaggcccacctgatcctgcggcggctggagcgggtgagcagccactgcagcagcctgctgcggagcgcctacatccagagccgggtggagaccgtgccctacctgttctgccgctctgaggaggtgcggcctgctggcatggtgtggtacagcatcctgaaggacaccaagatcacctgtgaggagaagatggtgtccatggccaggaacacctacggggagagcaagggccgctag

SEQ ID NO: 259239 - DNA, 1323 bp, Artificial Sequence
  derived and/or modified sequence
atgaacaccctgctgtgcaagggcatgttctgcctgctgagctgggaggcagacagtagggggcggttgggcgagtacacgcttcaacctctttccctccaaactgaagagaccaccgagttgggttccaagaaggagttgaaaagtatgccttttattacctacctgtctggattgctcaccgcccagatgctgtccgacgaccagctgataagcggcgtagagattcggtgtgaggaaaagggccgatgtccgagcacatgccatttgtgccggcggcccggtaaagaacagctatcgcccacacctgtcctgctcgaaattaacagagtggttccgctttataccttgattcaggataatggaactaaggaggcttttaaatccgcacttatgagctcatattggtgttccggaaaaggcgacgtcatcgacgattggtgtaggtgtgatctgagtgcctttgacgctaacggtcttcctaattgtagtcccctcctgcagccagtgctgaggttgtcacccaccgttgagccctcaagcactgttgtatccctggaatgggtggacgtccagccagccataggaaccaaagtgagcgattacatcctgcaacacaagaaggtcgatgaatacaccgataccgacctgtataccggtgagtttctgtccttcgcagatgacttactgtctgggctaggtactagctgcgtagcagccggacggtcccacggagaagtgcctgaagtgtccatctactctgtcatcttcaagtgtctggagcctgacggcctttacaaatttactctctatgcagttgacacccggggacggcacagtgagttaagcaccgtgaccttaagaaccgcctgtccgttggttgatgataacaaagccgaagagatcgcagacaaaatctacaacctatataatggttacacgtccggaaaggagcagcaaatggcatacaacaccctgatggaggttagtgccagtatgctgttccgagtgcagcatcattacaattcacactacgaaaaattcggggactttgtctggcggagcgaagacgagctgggacccaggaaagcccacctcatcctgagaagacttgaacgcgtctcttcacactgttccagcctgttaagaagcgcctacattcaaagtcgtgtcgagacagttccgtatttgttctgtagaagcgaagaggtccgacctgcgggcatggtgtggtattctatccttaaagataccaagatcacatgcgaggaaaagatggttagcatggcacgcaatacctatggagagtcaaagggtagatag

SEQ ID NO: 259240 - DNA, 1323 bp, Artificial Sequence
  derived and/or modified sequence
atgaataccctgctctgtaagggtatgttctgtctcctcagttgggaggcggactctcgcggaaggctcggcgagtataccctccaaccacttagtttgcagactgaggaaaccactgagctcgggagcaagaaagagctgaaatctatgccatttatcacctatctgtccgggctcctgacagctcagatgctcagtgacgaccaactcatctccggagtcgaaatcagatgcgaggagaaggggaggtgtccctctacctgccacctgtgtcggagaccagggaaggagcaactttccccgactccagttctgttggagatcaacagagttgtgcctctgtacactctaatacaggataatgggaccaaggaagccttcaagtcggctcttatgagtagttactggtgtagtgggaaaggagatgttattgatgattggtgtcggtgtgatctaagcgcctttgacgccaacggtctccccaactgttcccccttactgcagcccgtcttgcgtctgagccccaccgtggagccgtcttctaccgtcgtatcactggagtgggtggatgtgcagcctgcgattggaacaaaggtcagtgattacatcctgcagcacaagaaggtagacgaatataccgacactgacctgtatacaggggagtttctgagtttcgcagacgatctactgagcggtctggggaccagctgtgtcgccgctggtaggtcacatggcgaggtgccagaagtttccatctattcagtgattttcaaatgtcttgaacctgacggcctctataagttcactttgtacgcagtggacacacgcggtcgtcacagcgagcttagcacggtgacactgcgaaccgcctgtcccttagtggacgataacaaggccgaggaaattgcggacaaaatctacaatctatataacggttatacttccgggaaggaacagcagatggcctacaatacgctgatggaagtgtccgcttctatgctgtttcgagtacagcatcattacaattcacactacgagaagtttggagacttcgtttggcggtctgaggatgaactgggccctcggaaggcccatctgatcctgagacgcctggaaagggtctcctcccattgcagttctctgttgaggtcggcctacatccaatctcgtgtagagacagtgccctatctgttctgtagatcggaggaggtcaggcccgcaggtatggtctggtattcgatcctcaaggacactaaaatcacttgtgaagaaaaaatggtgagtatggcacgcaatacctacggagaatccaaggggagatag

SEQ ID NO: 259241 - DNA, 2356 bp, Artificial Sequence
  derived and/or modified sequence
ccaagcgcgcggggcaaggcggccctgcaggggtgagctttcctctgagaacccggggccttagcgacacgtaatccagttttccgtctccttggtgcagatgaagaaaccgacgcccatgggcgaaagggacctgctcaagttcactcagtaagtcaggagataagccagaatgcgtatctgactccagtctcaatgtctaccccttcacaaaacggtagcctccagggtagtcctcagcaaagcgttggcaccttactgaatctgtttttccatctgagaaatgggccaacggaaaaatcaaacttccattctggggaagtcgagaaccgggactccctaggaagggcagtgctttggcctcatgttctgtgctctgacagagagctgcactagagacaagtttatccatgaacacattgctctgtaaaggaatgttttgcctactcagctgggaggccgacagcagaggcagacttggggagtacactctgcagcccctgtccctgcagactgaagagaccacagagctgggcagcaagaaggagctcaagtccatgcccttcatcacctacctctcaggtttgctgacagcccagatgctgtcagatgaccagctcatttcaggtgtggagattcgctgtgaggagaaggggcgctgtccatctacctgtcacctttgccgccggccaggcaaggagcagctgagccccacaccagtgctgctggaaatcaaccgtgtggtgccactttataccctcatccaagacaatggcacaaaggaggccttcaagagtgcactgatgagttcctactggtgctcagggaaaggggatgtgatcgatgactggtgcaggtgtgacctcagcgcctttgatgccaatgggctccccaactgcagcccccttctgcagccggtgctgcggctgtccccaacagtggagccctccagtactgtggtctccttggagtgggtggatgttcagccagctattgggaccaaggtctccgactatattctgcagcataagaaagtggatgaatacacagacactgacctgtacacaggagaattcctgagttttgctgatgacttactctctggcctgggcacatcttgtgtagcagctggtcgaagccatggagaggtccctgaagtcagtatctactcagtcatcttcaagtgtctggagcccgacggtctctacaagttcactctgtatgctgtggatacacgagggaggcactcagagctaagcacggtgaccctgaggacggcctgtccactggtagatgacaacaaggcagaagaaatagctgacaagatctacaatctgtacaatgggtacacaagtggaaaggagcagcagatggcctacaacacactgatggaggtctcagcctcgatgctgttccgagtccagcaccactacaactctcactatgaaaagtttggcgacttcgtctggagaagtgaggatgagctggggcccaggaaggcccacctgattctacggcgactggagagggtgagtagccactgctccagcctcctgcggagtgcctacatccagagccgcgtggaaacagtgccctatcttttctgccgcagcgaggaggtccggcctgcaggcatggtgtggtatagcatcctcaaggacaccaaaatcacgtgtgaggagaagatggtgtcaatggcccgaaacacgtacggggagtccaagggccggtgagggagggtattgccctccgtgagcacagagactctccatgggagggggagcagtattctcctggatcctggggcctgggtgggctgggggacagctgaggatgggcctagcagatgaagcttgccagcaaggccaaagcaaacggtttctcctgtggatagtggacagagacctttgtaaccaatggaattattcatttttctctatcttttattttttcaaagatattatttgactctatcaaaagtctctcctttttaaaccttttcttatggatggctgtcaatcccgaggcagaagttttcaggtggagaccaagcggcctttgctcttcttccttcttcctgccacactctgctttcttcctgccatggacccctggaggagacctatggagggacagttttgacctgacccctagaggagacagttttgacctcttcagcaccaggaaggaagctctgaggatggttgcagtgaggaagcatgggtctttaaggacttctctctcttttttgctggacattattgagtttgtgggaccctgcctcttcctgctacctgtgggtctgcccagagtccctgcaggcctgtccatgcattaaaaattcctattgtctctc

SEQ ID NO: 259242 - DNA, 1757 bp, Artificial Sequence
  derived and/or modified sequence
gcttgtcgtgcagctggccccaagcgcgcggggcaaggcggccctgcaggggtgagctttcctctgagaacccggggccttagcgacacgtaatccagttttccgtctccttggtgcagatgaagaaaccgacgcccatgggcgaaagggacctgctcaagttcactcaagaccacagagctgggcagcaagaaggagctcaagtccatgcccttcatcacctacctctcaggtttgctgacagcccagatgctgtcagatgaccagctcatttcaggtgtggagattcgctgtgaggagaaggggcgctgtccatctacctgtcacctttgccgccggccaggcaaggagcagctgagccccacaccagtgctgctggaaatcaaccgtgtggtgccactttataccctcatccaagacaatggcacaaaggaggccttcaagagtgcactgatgagttcctactggtgctcagggaaaggggatgtgatcgatgactggtgcaggtgtgacctcagcgcctttgatgccaatgggctccccaactgcagcccccttctgcagccggtgctgcggctgtccccaacagtggagccctccagtactgtggtctccttggagtgggtggatgttcagccagctattgggaccaaggtctccgactatattctgcagcataagaaagtggatgaatacacagacactgacctgtacacaggagaattcctgagttttgctgatgacttactctctggcctgggcacatcttgtgtagcagctggtcgaagccatggagaggtccctgaagtcagtatctactcagtcatcttcaagtgtctggagcccgacggtctctacaagttcactctgtatgctgtggatacacgagggaggcactcagagctaagcacggtgaccctgaggacggcctgtccactggtagatgacaacaaggcagaagaaatagctgacaagatctacaatctgtacaatgggtacacaagtggaaaggagcagcagatggcctacaacacactgatggaggtctcagcctcgatgctgttccgagtccagcaccactacaactctcactatgaaaagtttggcgacttcgtctggagaagtgaggatgagctggggcccaggaaggcccacctgattctacggcgactggagagggtgagtagccactgctccagcctcctgcggagtgcctacatccagagccgcgtggaaacagtgccctatcttttctgccgcagcgaggaggtccggcctgcaggcatggtgtggtatagcatcctcaaggacaccaaaatcacgtgtgaggagaagatggtgtcaatggcccgaaacacatattatttgactctatcaaaagtctctcctttttaaaccttttcttatggatggctgtcaatcccgaggcagaagttttcaggtggagaccaagcggcctttgctcttcttccttcttcctgccacactctgctttcttcctgccatggacccctggaggagacctatggagggacagttttgacctgacccctagaggagacagttttgacctcttcagcaccaggaaggaagctctgaggatggttgcagtgaggaagcatgggtctttaaggacttctctctcttttttgctggacattattgagtttgtgggaccctgcctcttcctgctacctgtgggtctgcccagagtccctgcaggcctgtccatgcattaaaaattcctattgtctctc

SEQ ID NO: 259243 - DNA, 1323 bp, Artificial Sequence
  derived and/or modified sequence
atgaacaccctgctgtgcaagggcatgttctgcctgctgagctgggaggccgacagcagaggcagactgggcgagtacaccctgcagcccctgagcctgcagaccgaggagaccaccgagctgggcagcaagaaggagctgaagagcatgcccttcatcacctacctgagcggcctgctgaccgcccagatgctgagcgacgaccagctgatcagcggcgtggagatcagatgcgaggagaagggcagatgccccagcacctgccacctgtgcagaagacccggcaaggagcagctgagccccacccccgtgctgctggagatcaacagagtggtgcccctgtacaccctgatccaggacaacggcaccaaggaggccttcaagagcgccctgatgagcagctactggtgcagcggcaagggcgacgtgatcgacgactggtgcagatgcgacctgagcgccttcgacgccaacggcctgcccaactgcagccccctgctgcagcccgtgctgagactgagccccaccgtggagcccagcagcaccgtggtgagcctggagtgggtggacgtgcagcccgccatcggcaccaaggtgagcgactacatcctgcagcacaagaaggtggacgagtacaccgacaccgacctgtacaccggcgagttcctgagcttcgccgacgacctgctgagcggcctgggcaccagctgcgtggccgccggcagaagccacggcgaggtgcccgaggtgagcatctacagcgtgatcttcaagtgcctggagcccgacggcctgtacaagttcaccctgtacgccgtggacaccagaggcagacacagcgagctgagcaccgtgaccctgagaaccgcctgccccctggtggacgacaacaaggccgaggagatcgccgacaagatctacaacctgtacaacggctacaccagcggcaaggagcagcagatggcctacaacaccctgatggaggtgagcgccagcatgctgttcagagtgcagcaccactacaacagccactacgagaagttcggcgacttcgtgtggagaagcgaggacgagctgggccccagaaaggcccacctgatcctgagaagactggagagagtgagcagccactgcagcagcctgctgagaagcgcctacatccagagcagagtggagaccgtgccctacctgttctgcagaagcgaggaggtgagacccgccggcatggtgtggtacagcatcctgaaggacaccaagatcacctgcgaggagaagatggtgagcatggccagaaacacctacggcgagagcaagggcagatag

SEQ ID NO: 259244 - protein, 395 aa, Artificial Sequence
  derived and/or modified sequence
MPFITYLSGLLTAQMLSDDQLISGVEIRCEEKGRCPSTCHLCRRPGKEQLSPTPVLLEINRVVPLYTLIQDNGTKEAFKSALMSSYWCSGKGDVIDDWCRCDLSAFDANGLPNCSPLLQPVLRLSPTVEPSSTVVSLEWVDVQPAIGTKVSDYILQHKKVDEYTDTDLYTGEFLSFADDLLSGLGTSCVAAGRSHGEVPEVSIYSVIFKCLEPDGLYKFTLYAVDTRGRHSELSTVTLRTACPLVDDNKAEEIADKIYNLYNGYTSGKEQQMAYNTLMEVSASMLFRVQHHYNSHYEKFGDFVWRSEDELGPRKAHLILRRLERVSSHCSSLLRSAYIQSRVETVPYLFCRSEEVRPAGMVWYSILKDTKITCEEKMVSMARNTYYLTLSKVSPF

SEQ ID NO: 259245 - DNA, 1188 bp, Artificial Sequence
  derived and/or modified sequence
atgccttttatcacctacctctccggccttcttacggcccagatgctttcagacgatcagctgatctctggggtggaaattcgatgcgaagagaaggggagatgcccaagtacctgtcatctgtgccgtagaccaggaaaggaacagttgtcccctaccccggtccttctggaaataaaccgggtggtaccgctgtataccctgatccaggataacggcaccaaagaggcatttaaaagtgcgttgatgtcctcctactggtgctccgggaagggagatgtgatcgacgattggtgccgatgtgatctgtctgcttttgatgccaacggcctgcccaactgcagtccgctgctgcagcctgtcctccgactgtctcccaccgtggagccttcctccacagttgtgagtcttgagtgggttgatgtacaaccagcgatcggaaccaaagtgtctgattacatcctgcagcataagaaggtagacgaatatacagacacagacctgtacacgggggagtttcttagctttgcagacgacttgctgagcgggctggggactagttgcgtcgctgctggtagaagccacggcgaagtgcctgaggtttctatatattcagtaatcttcaaatgcttagagccggacggcttgtataaatttacactctacgcagtggacacgcgaggccggcactctgaactatccacagtgacattgaggactgcctgtcctctagtggatgataataaagcagaggaaatcgcagataagatttacaacctctacaatgggtatacttccgggaaagaacagcagatggcttataacacacttatggaagttagcgctagcatgctctttagagtccagcaccactacaactcccactacgagaaattcggcgacttcgtgtggaggtctgaggacgaacttggccctagaaaagctcacctcattctcaggcggttggaaagagtgtcttctcattgctcctccctgctacgatcagcatacatacagtctagggtggagaccgtcccatacctgttctgtagatcagaggaggtgcgcccagcagggatggtgtggtatagcattctcaaagacaccaagatcacatgcgaggaaaagatggtgtcgatggctcgtaacacctattatctcaccttaagtaaagtgtcaccattctag

SEQ ID NO: 259246 - DNA, 1188 bp, Artificial Sequence
  derived and/or modified sequence
atgccttttatcacctacctgagcgggctgctcactgctcagatgcttagcgacgatcagttgatctcaggggtcgagatcagatgcgaagagaaggggaggtgcccatccacatgccacctgtgccgccgtccaggcaaggaacagctgtctccaactcccgtgctgcttgagattaaccgggtagttcccctgtataccctaattcaggacaacggtactaaagaggcgttcaagagtgcactaatgtcatcatactggtgttccgggaaaggtgatgtaattgacgactggtgtcgatgtgacctctccgccttcgatgcaaacggactgccgaactgttcccctttgttacagcccgtgctgaggctatcaccaacagtggaaccaagctctactgtcgtgtccttggaatgggttgacgttcagccggccatcggcacaaaagtcagtgactatattcttcagcacaaaaaggtggatgagtataccgacactgacttgtacacaggcgaattcctgtcgttcgccgacgatctgctgtctggtctgggcacatcctgtgtcgccgctggccggtcacacggagaagttccagaggtgtctatttactccgttatcttcaagtgcctggagcctgatggactctacaagttcactctgtatgctgtcgacacgcgcggacgacattctgagctgtccactgtcaccctgcggactgcttgccctctggttgatgacaataaggccgaggaaatcgctgataagatatacaatctgtacaacggctatacatctggaaaagagcagcagatggcatacaatacacttatggaagtgtccgcaagcatgctgttccgcgtgcagcatcactacaacagccattatgagaaattcggcgacttcgtgtggcggtcagaggatgaattgggccccagaaaagcccacctgattttgcgacgcctggagagagtgtcctcccactgctcgtcgctgcttaggtcagcatacattcagtcaagggttgagactgtgccctatctgttctgcaggtctgaagaggtccgccctgctggaatggtatggtattccattctgaaggatacaaaaattacctgtgaggagaagatggtatccatggcgcggaatacgtattacctgacactgagcaaggtctctccattctag

SEQ ID NO: 259247 - DNA, 1188 bp, Artificial Sequence
  derived and/or modified sequence
atgcccttcatcacctacctgagcggcctgctgacagcccagatgctgagtgatgaccagctgatctctggagtggagatccgctgtgaggagaagggccgctgccccagcacctgccacctgtgcagaagacctgggaaggagcagctgagccccacccctgtgctgctggagatcaacagagtggtgcccctgtacaccctcatccaggacaatggcaccaaggaggccttcaagagcgccctgatgagcagctactggtgcagcgggaaaggagatgtgattgatgactggtgccgctgtgacctgagcgcctttgatgccaacggcctgcccaactgcagccccctgctgcagcctgtgctgcggctgagccccaccgtggagcccagcagcacagtggtgtccctggagtgggtggatgtgcagcctgccatcggcaccaaggtgtctgactacatcctgcagcacaagaaggtggatgagtacacagacacagacctgtacaccggggagttcctgagctttgctgatgacctgctgagcggcctgggcaccagctgtgtggccgccggccgcagccatggagaggtgcctgaggtgtccatctacagcgtcatcttcaagtgcctggagccagatggcctgtacaagttcaccctgtatgctgtggacacccggggccgccacagcgagctgagcacagtgaccctgaggacagcctgccccctggtggatgacaacaaggccgaggagattgctgacaagatctacaacctgtacaacggctacaccagcggcaaggagcagcagatggcctacaacaccctgatggaggtgtctgcctccatgctgttccgggtgcagcaccactacaacagccactatgagaagtttggagactttgtgtggaggagtgaagatgagctgggccccaggaaggcccacctgatcctgcggcggctggagcgggtgagcagccactgcagcagcctgctgcggagcgcctacatccagagccgggtggagaccgtgccctacctgttctgccgctctgaggaggtgcggcctgctggcatggtgtggtacagcatcctgaaggacaccaagatcacctgtgaggagaagatggtgtccatggccaggaacacctactacctgaccctgagcaaggtgagccccttctag

SEQ ID NO: 259248 - DNA, 1188 bp, Artificial Sequence
  derived and/or modified sequence
atgcccttcatcacctacctgagcggcctgctgaccgcccagatgctgagcgacgaccagttgatcagcggtgtagagattcggtgtgaggagaaaggccgctgtccatccacctgtcacctgtgccgaaggccggggaaggagcagctgtctccgacccctgtccttctcgagatcaacagagtggtgccactatacacactgatccaggacaatggcaccaaagaagccttcaaatctgccctcatgtcttcttactggtgtagcggcaagggagacgtgatcgacgactggtgccgatgcgacctctcagccttcgacgccaacgggctgccaaattgcagtcccctgttgcagccagtgctgcggttgtctccgacagtggaaccgtccagcactgtggtgagcctcgaatgggtagatgtgcagcctgccatcggtacaaaggtgtcagactatattcttcagcataagaaggtagatgaatacaccgatactgacctctacacaggcgaattcctatcttttgccgatgatctgctgtccggcctcggcacgtcatgcgtggccgctgggaggtctcacggggaagtccccgaggtctctatctactcagtaatctttaaatgcttagagccagacggcctttacaagtttaccctgtacgccgtggatactcgtggcagacattctgagctgtctaccgtaacattacggacagcctgtccactggttgatgataacaaagcggaggaaatcgcagacaaaatttataatttatataacggctacacaagcggaaaggagcaacagatggcctataacaccctcatggaggtcagcgcaagtatgctcttccgtgtgcagcaccactataatagtcattatgagaaattcggtgatttcgtctggcggagcgaggacgaactcgggcctcgaaaagctcaccttatactaaggcgactggagcgtgttagctctcactgcagtagcctcctacggtctgcatatatccagtcaagagttgagacagtgccttatctcttttgcagatcggaggaggtgcgacccgctggtatggtgtggtacagcattctgaaagacacaaagattacatgtgaggaaaagatggtgtcaatggcccggaatacctactatctcacccttagcaaggtttctccgttctag

SEQ ID NO: 259249 - DNA, 1188 bp, Artificial Sequence
  derived and/or modified sequence
atgcccttcatcacctacctgagcggcctgctgaccgcccagatgctctctgacgatcagttgatctctggcgtggagattcggtgtgaagagaagggcagatgccccagcacgtgccatctgtgccgtcgtccaggaaaggaacagctctcgcctacacctgtgctgctggaaatcaacagagtggtacctctttatactctgatccaggataatgggacaaaggaggcctttaaatccgccctgatgtcttcatactggtgttctgggaagggggacgtgatagacgattggtgccgctgcgatctgagtgctttcgacgcgaacggactccccaactgttcccctttactgcagccagtgctgcgcctgtccccgactgtcgagccctccagcactgtggtgtcattggaatgggtcgacgtccaacccgctatcggtactaaggtgtccgactacatactacaacataagaaagtcgatgaatataccgacacagacctctacacaggggaattcctttccttcgccgatgacctcctgtcggggctggggactagctgtgtggctgcaggcagatctcatggtgaagtcccggaggtgtcaatctattctgtcatatttaaatgcctggaacctgacggactctataagtttacactatacgcggtggatacaagggggagacattccgaactttccactgtcacactgaggactgcttgtccactggtcgatgataataaggctgaagaaattgccgacaagatctataatttatacaacggctatacttctggtaaggagcagcagatggcgtacaatactctaatggaagtgtccgcaagtatgttgttccgcgttcaacaccactataatagccattatgagaagttcggggactttgtgtggcgttccgaggatgagctgggtccaaggaaagctcatttaattctacggcggctggagcgggtttcatctcactgcagctctcttctgagaagtgcgtacatccagagtcgggtggagaccgtaccatacctcttttgccggtccgaggaggtgcggcccgccggaatggtatggtattctatcttgaaggataccaaaattacatgcgaagaaaaaatggtgagtatggctaggaatacgtactacttgaccctctccaaggtctctcctttttag

SEQ ID NO: 259250 - DNA, 1188 bp, Artificial Sequence
  derived and/or modified sequence
atgcccttcattacctatctgtcaggactgctgacagcacagatgctctccgatgaccagctgattagcggtgtcgaaatcaggtgcgaagaaaaaggtcggtgcccatctacttgccacctgtgtcggagacctggcaaggaacagctttccccgactccggtgctgctcgaaattaaccgcgttgtccccctctacaccctcattcaagataatggtacaaaagaggcgttcaaatccgccctgatgtctagctactggtgcagtgggaaaggagacgtcattgacgactggtgcaggtgtgatctctctgctttcgatgcgaacgggttacccaattgctcacccctgctgcagcccgtcttacggctatcaccgacagtggaaccttcaagtaccgtggtgagcctggaatgggtagacgttcagccggcaattggaactaaagttagtgattacattctacaacacaaaaaagtggatgaatacacagacacagacctgtacacaggtgagtttctgtcttttgctgatgatcttttgagcggattggggacttcgtgtgtcgcagctggcaggtctcatggcgaggtgccagaggtgtctatctatagtgtgatctttaaatgcctcgagcctgacgggttatataaattcacactgtacgcagtggacacaagaggacggcactccgagttgtccacagtgactctcagaaccgcttgccctttggtggatgacaacaaggcagaagaaatcgcagacaagatttataacctgtataacggatatacttcaggcaaggaacagcagatggcatataatacgctgatggaagtctctgccagcatgctgttccgggtgcagcatcactacaattctcactatgagaaattcggagacttcgtctggcggtcagaagacgaactgggcccacggaaggctcatctgatcttgcgtcggcttgaacgggtatcctctcactgcagcagcctattacgcagcgcttatattcagtctcgcgtggagactgttccctatctgttctgccggtcagaggaagtgaggcccgctgggatggtgtggtacagcatcctgaaggacacaaaaattacttgcgaggagaaaatggtgagtatggctaggaacacctattacctgaccttgtctaaggtgagtcctttttag

SEQ ID NO: 259251 - DNA, 1188 bp, Artificial Sequence
  derived and/or modified sequence
atgcccttcatcacctacctctccggtctcttaacggcacagatgctttccgacgatcagctcattagcggtgttgagattaggtgcgaagaaaagggccgatgtccctccacctgccacctctgtagaagacccggaaaggagcagttatcccctacacctgtcctcctggagataaaccgggtagtgcccttgtacacactaattcaagataatggcaccaaggaggctttcaaatctgcccttatgtccagttattggtgcagtggcaaaggggacgtcatcgatgactggtgccgttgtgatctttccgctttcgacgcgaatggcctgccaaattgttcccctctgctccagcccgtcttgaggttgtccccaacagtagagcccagtagcaccgtcgtgtccctggaatgggtcgacgtgcaaccagcgatcggcaccaaggtgtccgattatatcctgcagcacaagaaagtcgatgaatataccgacacggatctctacactggggaatttctcagctttgcggacgacctcttgagcggcctgggcacatcttgcgtcgctgcagggagatcgcacggcgaggtgcccgaggtctcaatctattcagtgatcttcaaatgtttagagccggatggattgtacaagttcactctgtatgctgtcgataccagaggccgtcacagcgaacttagtaccgtcacactcagaaccgcttgtccactggtagatgataataaggcagaggagattgcggacaaaatctacaacttgtacaatgggtacacatccggtaaggaacaacagatggcttataataccctgatggaagtgtcggcctcaatgttgttccgtgtgcagcaccactataattcccattacgagaagtttggagactttgtgtggagatccgaggatgagctgggacctcgcaaagcacacctcatcttacgcaggctggagcgcgtgtctagccattgttcttccttgctgaggagcgcctacattcaatcacgagtggagactgtcccctacctattttgccgatcggaggaggtgaggcctgcaggcatggtgtggtattcgattttaaaagataccaagattacctgcgaggagaaaatggtatctatggcccgaaacacctactatcttacactgtccaaggtcagccccttctag

SEQ ID NO: 259252 - DNA, 1188 bp, Artificial Sequence
  derived and/or modified sequence
atgcccttcatcacctacctgagcggcctgctgaccgcccagatgctgagcgacgaccagctgatcagcggcgtggagatcagatgcgaggagaagggcagatgccccagcacctgccacctgtgcagaagacccggcaaggagcagctgagccccacccccgtgctgctggagatcaacagagtggtgcccctgtacaccctgatccaggacaacggcaccaaggaggccttcaagagcgccctgatgagcagctactggtgcagcggcaagggcgacgtgatcgacgactggtgcagatgcgacctgagcgccttcgacgccaacggcctgcccaactgcagccccctgctgcagcccgtgctgagactgagccccaccgtggagcccagcagcaccgtggtgagcctggagtgggtggacgtgcagcccgccatcggcaccaaggtgagcgactacatcctgcagcacaagaaggtggacgagtacaccgacaccgacctgtacaccggcgagttcctgagcttcgccgacgacctgctgagcggcctgggcaccagctgcgtggccgccggcagaagccacggcgaggtgcccgaggtgagcatctacagcgtgatcttcaagtgcctggagcccgacggcctgtacaagttcaccctgtacgccgtggacaccagaggcagacacagcgagctgagcaccgtgaccctgagaaccgcctgccccctggtggacgacaacaaggccgaggagatcgccgacaagatctacaacctgtacaacggctacaccagcggcaaggagcagcagatggcctacaacaccctgatggaggtgagcgccagcatgctgttcagagtgcagcaccactacaacagccactacgagaagttcggcgacttcgtgtggagaagcgaggacgagctgggccccagaaaggcccacctgatcctgagaagactggagagagtgagcagccactgcagcagcctgctgagaagcgcctacatccagagcagagtggagaccgtgccctacctgttctgcagaagcgaggaggtgagacccgccggcatggtgtggtacagcatcctgaaggacaccaagatcacctgcgaggagaagatggtgagcatggccagaaacacctactacctgaccctgagcaaggtgagccccttctag

SEQ ID NO: 259253 - DNA, 483 bp, Artificial Sequence
  derived and/or modified sequence
atgaacaacgccagatacctgtggaagagaatcccccccgccatcaagagcgccaacagcgagctgggcggcatctggagcgtgggccagagaatctggcagagagacttccccggcatctacaccaccatcaacgcccaccagtggagcgagaccgtgcagcccatcatggaggccctgagagacgccaccagaagaagagccttcgccctggtgagccaggcctacaccagcatcatcgccgacgacttcgccgccttcgtgggcctgcccgtggaggaggccgtgaagggcatcctggagcagggctggcaggccgacagcaccaccagaatggtgctgcccagaaagcccgtggccggcgccctggacgtgagcttcaacaagttcatccccctgagcgagcccgcccccgtgccccccatccccaacgagcagcagctggccagactgaccgactacgtggccttcctggagaactag

SEQ ID NO: 259254 - DNA, 483 bp, Artificial Sequence
  derived and/or modified sequence
atgaacaatgcaaggtacctgtggaaaagaattccccctgctatcaaaagtgcgaactcagagttaggggggatctggtctgtgggtcagcggatatggcaaagagactttcccggtatctacacgaccatcaacgcacatcagtggagcgaaaccgttcagcccattatggaggctcttagggacgctacacgtcgacgagccttcgccctggtgagccaggcctatacttccattatagccgatgatttcgcagcgttcgtggggctgcctgtcgaggaagctgttaagggcatcctggaacagggctggcaagccgactctactacacgcatggtgctcccaagaaagcccgtcgcaggtgccttggacgtgtccttcaacaaattcattcccctgtccgaacccgctccagttccccctatcccgaatgaacagcagttggcccggttgaccgactacgtggcattcctggaaaattag

SEQ ID NO: 259255 - DNA, 483 bp, Artificial Sequence
  derived and/or modified sequence
atgaacaatgcccgctacctgtggaagaggatccccccagccatcaagagcgccaacagcgagctgggcggcatctggagcgtgggccagaggatctggcagagggacttccctggcatctacaccaccatcaatgcccaccagtggagcgagaccgtgcagcccatcatggaggccctgagagatgccacccggcggcgggcctttgccctggtgtcccaggcctacaccagcatcatcgcagatgactttgctgcctttgtgggcctgcctgtggaggaggccgtgaagggcatcctggagcagggctggcaggccgacagcaccaccaggatggtgctgcccaggaagcctgtggccggggccctggatgtgtccttcaacaagttcatccccctgtctgagcccgcccctgtgccccccatccccaatgagcagcagctggcccggctgacagattatgtggccttcctggagaactag

SEQ ID NO: 259256 - DNA, 483 bp, Artificial Sequence
  derived and/or modified sequence
atgaacaacgcccggtacctgtggaagcggatcccccccgccatcaagagtgcaaattccgagctcggtggcatttggagcgtcggccagcgcatttggcagcgggatttccctggcatctacacaactattaatgcacatcaatggtccgagaccgtgcaacctattatggaggctctgagagacgcaactcgcagacgggctttcgctctagtctcacaggcgtacacttcaattatcgccgacgacttcgccgcctttgtagggttacccgtggaggaagcggttaaaggaatcctcgagcaggggtggcaagcggacagcactacgcgtatggtgttgccacgcaaaccagtggccggagcactggatgtctcctttaacaaatttattccacttagtgaaccagcacccgtgccgcccatccccaatgaacagcaattagcgaggctcaccgattacgtggcttttctggaaaattag

SEQ ID NO: 259257 - DNA, 483 bp, Artificial Sequence
  derived and/or modified sequence
atgaacaacgccaggtacttgtggaagagaatacctcctgccattaaatcggcaaatagtgagcttggaggcatatggtcagtcggccagcgcatttggcagcgcgatttcccgggtatttatacaactatcaacgctcaccagtggtccgagactgttcaacccatcatggaggccttgcgcgatgctaccagaagacgggctttcgctctcgtcagccaggcatatacttccataattgcggacgattttgctgcctttgtcgggctgccagttgaggaagctgtgaagggcatcctagagcagggctggcaagcagactccacaactcgcatggttctgcctcgaaagccagtggccggagccctggatgtctcatttaacaaattcatcccgctcagtgaaccagcccctgtgccaccgatcccaaatgaacagcagctggcacgattgacagactatgtagcttttctcgaaaattag

SEQ ID NO: 259258 - protein, 123 aa, Artificial Sequence
  derived and/or modified sequence
MAEKRHTRDSEAQRLPDSFKDSPSKGLGPCGWILVAFSFLFTVITFPISIWMCIKVIAAEGEMNASRALKEASMVITESPAALQLRYLQTLTTIAAEKNSTIVFPLPIDMLQGIIGAKHSHLG

SEQ ID NO: 259259 - DNA, 372 bp, Artificial Sequence
  derived and/or modified sequence
atggccgagaagagacacaccagagacagcgaggcccagagactgcccgacagcttcaaggacagccccagcaagggcctgggcccctgcggctggatcctggtggccttcagcttcctgttcaccgtgatcaccttccccatcagcatctggatgtgcatcaaggtgatcgccgccgagggcgagatgaacgccagcagagccctgaaggaggccagcatggtgatcaccgagagccccgccgccctgcagctgagatacctgcagaccctgaccaccatcgccgccgagaagaacagcaccatcgtgttccccctgcccatcgacatgctgcagggcatcatcggcgccaagcacagccacctgggctag

SEQ ID NO: 259260 - DNA, 372 bp, Artificial Sequence
  derived and/or modified sequence
atggccgaaaagagacacacacgtgatagcgaagcccagagactgcctgactcttttaaagattcaccatcaaaaggactggggccttgcggctggatcctcgtggcgttctcttttctcttcaccgtgatcaccttcccaatctcgatctggatgtgcataaaagtcatcgctgccgaaggcgagatgaacgcctcccgcgctcttaaggaggcgtctatggtgataactgagtctcccgctgcacttcagctcagatacctccagacccttacaaccattgccgcggagaagaactcaactatcgtctttccactgcctatcgacatgttacaaggcataattggcgcaaagcactctcaccttggctag

SEQ ID NO: 259261 - DNA, 372 bp, Artificial Sequence
  derived and/or modified sequence
atggccgagaagaggcacacccgggacagcgaggcccagaggctgcctgacagcttcaaggacagccccagcaagggcctgggcccctgtggctggatcctggtggccttctccttcctgttcaccgtcatcaccttccccatcagcatctggatgtgcatcaaggtgattgctgctgagggggagatgaatgccagccgggccctgaaggaggcctccatggtgatcacagagagccctgctgccctgcagctgcgctacctgcagaccctgaccaccatcgctgctgagaagaacagcaccatcgtgttccccctgcccatcgacatgctgcagggcatcattggagccaagcacagccacctgggctag

SEQ ID NO: 259262 - DNA, 372 bp, Artificial Sequence
  derived and/or modified sequence
atggccgagaagcggcacacccgggacagcgaggcccagcggctgcccgattcattcaaagatagccctagtaaaggcttagggccatgcggttggattcttgtcgctttttcctttctgttcacagtcataaccttcccaattagcatttggatgtgcattaaggtgattgccgccgagggggaaatgaacgccagccgggctttgaaagaagcaagtatggtgattactgaatcaccagctgctctacaactgcgctacttacagactctgactacgattgcagcggaaaaaaattcaaccattgtttttccccttcccatcgacatgctgcagggcattataggtgcgaaacactctcatctcggatag

SEQ ID NO: 259263 - DNA, 372 bp, Artificial Sequence
  derived and/or modified sequence
atggctgaaaaacggcatacacgcgattccgaggcccaacggctgccagattcttttaaggacagcccatccaagggcctaggcccatgtggatggatccttgtagcctttagctttctatttactgtcatcacatttccgatctctatatggatgtgtattaaggttattgccgcagaaggggagatgaacgcttcacgagcccttaaagaggcctctatggtgattacggaatcccccgcagcattgcagcttagatatctccaaacactgactaccattgcggctgagaaaaattccaccatcgtctttccgctgccaattgatatgctccagggcattatcggcgctaagcatagccatctggggtag

SEQ ID NO: 259264 - DNA, 870 bp, Artificial Sequence
  derived and/or modified sequence
agggcattcccggcggctccgggtttggcaacgaggacgggggagtgcgactgcgtctcgggcagcatggccgagaagcggcacacacgggactccgaagcccagcggctccccgactccttcaaggacagccccagtaagggccttggaccttgcggatggattttggtggcgttctcattcttattcaccgttataactttcccaatctcaatatggatgtgcataaaggttattgcagccgaaggagaaatgaatgcatccagggctctgaaagaagcctccatggtcatcactgaatctcctgcagcccttcagctccgatacctgcagacactgaccaccattgctgctgagaaaaactcaacaattgtcttccctctgcccatagatatgctgcaaggaatcataggggcaaaacacagccatctaggctagtgtagagatgagcgctagccttccaagcatgaagtcggggaccaaattagcctttaactcataaagagagggtagggcttttctttttccatatgtcaattgtggtgttcccagaatgtatagcagttataaaaataggtgaaagaattgttagcttgtaaatactgagagattggtgatttatataaggtaatctgttagtcttaaaatagttaaaagtttgtatttttagattattatgtagtaggttagatccctcttgttttgacttccactgactcattctgaaccccctaagcacccaggccagaggcaagaacctgggctgtaactgccacctgacaccgctgactggctaaatgctttgcagaaagtgatgaccttacaccacaaccagcttctccaggtcatatgtgccttacctccagagag

SEQ ID NO: 259265 - protein, 449 aa, Artificial Sequence
  derived and/or modified sequence
MADGEEPMAVDGGCGDTGDWEGRWNHVKKFLERSGPFTHPDFEPSTESLQFLLDTCKVLVIGAGGLGCELLKNLALSGFRQIHVIDMDTIDVSNLNRQFLFRPKDIGRPKAEVAAEFLNDRVPNCNVVPHFNKIQDFNDTFYRQFHIIVCGLDSIIARRWINGMLISLLNYEDGVLDPSSIVPLIDGGTEGFKGNARVILPGMTACIECTLELYPPQVNFPMCTIASMPRLPEHCIEYVRMLQWPKEQPFGEGVPLDGDDPEHIQWIFQKSLERASQYNIRGVTYRLTQGVVKRIIPAVASTNAVIAAVCATEVFKIATSAYIPLNNYLVFNDVDGLYTYTFEAERKENCPACSQLPQNIQFSPSAKLQEVLDYLTNSASLQMKSPAITATLEGKNRTLYLQSVTSIEERTRPNLSKTLKELGLVDGQELAVADVTTPQTVLFKLHFTS

SEQ ID NO: 259266 - DNA, 1350 bp, Artificial Sequence
  derived and/or modified sequence
atggctgatggagaagagcctatggccgttgatgggggatgtggcgacacgggggactgggagggcaggtggaaccacgtgaagaaatttctggagcgctccggtccctttacacatcctgacttcgaacccagtacggaaagcttgcagttcttattggatacttgcaaggtgttggttatcggggcaggcgggcttggctgcgaattgctgaagaacttggccctctctggctttcgccagatccacgtgattgacatggataccatcgacgtgagcaacctgaaccgacaatttctctttcggcctaaggatatcggcagacccaaagctgaggtggccgccgaattcctgaacgatcgggtccccaattgcaatgtggtccctcatttcaacaaaattcaggactttaatgacactttctacagacaattccacattatcgtctgcgggctggattccataatcgcacgtcgatggatcaatggtatgttgattagcttacttaactacgaagacggggtgctcgaccctagctcaatcgtaccccttattgatgggggcaccgagggctttaagggtaatgcccgcgttatattacctggtatgaccgcatgtatcgagtgcactctggagttatacccgccacaagtgaactttcctatgtgtactatcgcctccatgccaaggctgccagagcattgtattgaatacgtgcggatgctgcagtggccgaaagaacagccctttggggaaggggtccctctcgacggcgacgaccctgagcacatacagtggatttttcaaaagagcttagaaagggcctcccagtacaatataaggggcgtgacataccggcttactcagggcgtggtgaaaaggattatccctgccgtggctagcaccaatgctgtcattgcagccgtgtgtgcaacggaagtgtttaagattgctacttcagcatacatccctcttaataactacctcgtgtttaatgacgtcgacggactgtatacctatacttttgaagcggagcggaaggaaaactgtccggcctgttctcaactcccacagaatatccagttttcgccttcagccaagctccaggaggtgctggattacttgactaactcagccagcctccaaatgaagtcccccgctatcaccgctaccctagagggcaagaacaggacgttgtatctgcagtcggtcacttcaattgaagagaggacaaggcccaatctgtccaagacattgaaggaactgggcctggtggacggacaggaactcgctgtcgctgatgtgacgaccccccagacagtgcttttcaagctgcacttcacctcctag

SEQ ID NO: 259267 - DNA, 1350 bp, Artificial Sequence
  derived and/or modified sequence
atggctgatggagaggagcccatggctgtggatggcggctgtggggacacaggagactgggagggccgctggaaccacgtgaagaagttcctggagaggagcggccccttcacccacccagactttgagcccagcacagagagcctgcagttcctgctggacacctgcaaggtgctggtgattggagctgggggcctgggctgtgagctgctgaagaacctggccctgagcggcttccggcagatccacgtgattgacatggacaccattgatgtgagcaacctgaaccggcagttcctgttccggcccaaggacatcggccggcccaaggccgaggtggccgctgagttcctgaatgacagagtgcccaactgcaatgtggtgccccacttcaacaagatccaggacttcaatgacaccttctaccggcagttccacatcatcgtgtgtggcctggacagcatcatcgcccggcgctggatcaatggcatgctgatcagcctgctgaactatgaagatggagtgctggaccccagcagcatcgtgcccctgattgatggcggcacagagggcttcaagggaaatgcccgggtcatcctgcccggcatgacagcctgcatcgagtgcaccctggagctgtacccaccccaggtgaacttccccatgtgcaccatcgcctccatgccccggctgcctgagcactgcatcgagtatgtgaggatgctgcagtggcccaaggagcagccctttggagaaggagtgcccctggatggagatgatcctgagcacatccagtggatcttccagaagagcctggagcgggccagccagtacaacatccggggcgtgacctaccgcctgacccagggcgtggtgaagaggatcatcccagctgtggccagcaccaatgctgtgattgctgctgtgtgtgccacagaggtgttcaagatcgccaccagcgcctacatccccctgaacaactacctggtgttcaatgatgtggatggcctgtacacctacacctttgaggccgagaggaaggagaactgcccagcctgcagccagctgccccagaacatccagttcagccccagcgccaagctgcaggaggtgctggactacctgaccaacagcgccagcctgcagatgaagagccctgccatcacagccaccctggagggcaagaacagaaccctgtacctgcagagcgtgaccagcattgaggagaggacccggcccaacctgagcaagaccctgaaggagctgggcctggtggatggccaggagctggccgtggctgatgtgaccaccccccagacagtgctcttcaagctgcacttcaccagctag

SEQ ID NO: 259268 - DNA, 1350 bp, Artificial Sequence
  derived and/or modified sequence
atggccgacggcgaggagcccatggccgtggacggcggctgcggcgacaccggcgactgggaagggaggtggaatcacgtgaaaaagtttctggagaggtccgggcccttcacacatcccgatttcgagccctccacggaaagtctgcaattcctgcttgacacttgtaaagtcctggtgatcggggcgggggggctgggctgcgaattactcaagaatttggctctgagcggattccgtcagattcacgttattgacatggacacaattgatgtgtcaaatctcaacagacaattcctatttagacctaaggacatcggccgcccaaaagccgaggttgccgctgagttcctgaatgaccgcgtaccaaattgcaacgtagtgcctcatttcaacaaaatacaggactttaatgacaccttttataggcagttccatatcatcgtgtgcggactagactccattatcgccagacggtggattaatgggatgctaatcagcctgctgaactatgaggatggagttctggacccttcctcgatcgtgccgctgatcgacggaggcaccgaggggttcaagggaaacgccagggttatcctgccgggcatgacggcatgtattgagtgtaccctggagctctatccaccacaggttaacttcccgatgtgtacaatcgcatctatgccacgcctacctgaacactgcatcgagtacgtgcggatgctgcagtggccaaaggagcagccatttggcgagggagttccattggatggcgacgaccccgaacacattcagtggattttccagaaatctttggagagggctagccagtacaacattcgaggtgtcacctatcggctgacccagggtgtggttaagcgaatcatccctgccgtagcttcaaccaatgctgtaatagcagcagtgtgtgcaaccgaggtcttcaagatagcgacaagcgcctacatccctcttaacaattatttagtgttcaacgacgttgacgggttgtatacatataccttcgaggcagagcgtaaagagaattgcccagcctgttctcaactgccacagaacatacagttcagccctagcgccaaactgcaagaagtcctcgactatctcaccaatagtgctagtcttcagatgaaatccccggctatcacagcgaccctggagggaaagaaccggaccctttatcttcagagtgttacatccatcgaagaaaggacccgcccaaatcttagcaagacattgaaagaattgggccttgttgatgggcaggagcttgctgtcgccgacgtcactacaccgcagacagttctgtttaaattgcacttcaccagctag

SEQ ID NO: 259269 - DNA, 1350 bp, Artificial Sequence
  derived and/or modified sequence
atggctgacggagaggagccaatggcggttgatggaggatgtggagatactggcgactgggaaggccgttggaaccacgttaaaaagtttcttgaacgctccggcccatttacacaccctgatttcgagccttccaccgagtctttacagtttctgctggacacttgcaaggtcctggtcattggagccggaggactgggttgcgagctgctgaagaatctagcactgagcggtttccgccagatacatgtgatcgacatggacaccatcgacgtgtctaatcttaaccggcagttccttttccgacctaaagatatcggtcggcctaaggccgaggtcgctgctgagttcctcaatgatcgggttcccaattgtaatgtggtcccacactttaacaaaattcaagatttcaacgacacattctatcggcagtttcatataatcgtatgtgggttggatagcataattgcccgacggtggatcaatggaatgctgattagtctcctgaattatgaggatggagtgctcgacccaagttctattgtgccactcattgatggcggtaccgaggggtttaaaggcaacgcgagggttattttgccaggtatgactgcatgtatcgagtgtaccttagaactttacccccctcaagttaatttcccaatgtgtaccattgctagcatgcccaggctacccgagcattgtatcgaatatgtgaggatgctgcagtggcctaaagaacagcccttcggagagggtgtgccactggacggcgatgatcccgagcatatccaatggattttccagaaaagtctggagcgcgcttctcaatacaatatccgtggtgtaacttatcgccttacacaaggagttgtgaagagaataattccagccgttgcgtccaccaatgctgtcattgccgctgtctgtgctacagaggtcttcaaaattgcaactagcgcctatatcccactcaacaactatctcgtgtttaatgatgtggacgggctctacacctacacctttgaagctgagaggaaggaaaactgtccagcctgcagccagctgccccagaacatccaatttagcccaagcgccaagctgcaggaggtcctagactatctgactaattccgcatcacttcagatgaaatcaccagccattactgccactctggaggggaagaatcgcaccctatatttgcaatccgtaacgagcatcgaagagcgtacccgcccaaacctgagtaagaccctgaaagagctgggcttggtcgacgggcaggagctggccgtggccgatgtgaccactccacagacagtcttatttaagctacattttacgtcatag

SEQ ID NO: 259270 - DNA, 2112 bp, Artificial Sequence
  derived and/or modified sequence
cccgctcctccccgccctgccgcgcgtgggcacctgggaagaggcggagaacaatatggcggatggcgaggagccaatggctgttgatggtgggtgtggggacactggagactgggaaggtcgctggaaccatgtaaagaagttcctcgagcgatctggacccttcacacaccctgatttcgaaccgagcactgaatctctccagttcttgttagatacatgtaaagttctagtcattggagctggcggcttaggatgtgagctcctgaaaaatctggccttgtctggttttagacagattcatgttatagatatggacactatagatgtttccaatctaaataggcagtttttatttaggcctaaagatattggaagacctaaggctgaagttgctgcagaatttctaaatgacagagttcctaattgcaatgtagttccacatttcaacaagattcaagattttaacgacactttctatcgacaatttcatattattgtatgtggactggactctatcatcgccagaagatggataaatggcatgctgatatctcttctaaattatgaagatggtgtcttagatccaagctccattgtccctttgatagatggggggacagaaggttttaaaggaaatgcccgggtgattctgcctggaatgactgcttgtatcgaatgcacgctggaactttatccaccacaggttaattttcccatgtgcaccattgcatctatgcccaggctaccagaacactgtattgagtatgtaaggatgttgcagtggcctaaggagcagccttttggagaaggggttccattagatggagatgatcctgaacatatacaatggattttccaaaaatccctagagagagcatcacaatataatattaggggtgttacgtataggctcactcaaggggtagtaaaaagaatcattcctgcagtagcttccacaaatgcagtcattgcagctgtgtgtgccactgaggtttttaaaatagccacaagtgcatacattcccttgaataattacttggtgtttaatgatgtagatgggctgtatacatacacatttgaagcagaaagaaaggaaaactgcccagcttgtagccagcttcctcaaaatattcagttttctccatcagctaaactacaggaggttttggattatctaaccaatagtgcttctctgcaaatgaaatctccagccatcacagccaccctagagggaaaaaatagaacactttacttacagtcggtaacctctattgaagaacgaacaaggccaaatctctccaaaacattgaaagaattggggcttgttgatggacaagaactggcggttgctgatgtcaccaccccacagactgtactattcaaacttcattttacttcttaaggaaaatctccacataatagaaaactcatggaaataatatactttgtggatgctaagaagttgaatcgatgtcatttttagcaatagtgttgccacgatttgtctttttttatataatgaaccactcttttttaactttgtaaccttcccttgaagacagaattttggtgttggtgcttgtaagcattttcattaataatatgagaaatgatacctggagagagagattatgagcaaatgtattgcttcttttagaggaggaagcatacaacctcttttgtgtgaattttgttattatggtcaaagaatgcattcctaagttttcatttgagtacccaaatacacaaaaggtgtccctttaaggaaaataaagaattaagttttaaataacattacattttacaatctgacatctggagtatattgaacataggctatttcttgatataacactcatttaattgtggccatccaaatgaatattattgcagaatttatcttgttcataatgatttgtaaatggtgttatagctgaatacctgtgcatgaaaatgggcaatattttcatctgtttacttgtagtgccatagaggccaatatgcacaatattaactaatgccaagacatggctgtttaaaaaatttaatgttcaaacagttatcactgatgcttttgcactatttattaataaaatcatatattgtgta

SEQ ID NO: 259271 - DNA, 1350 bp, Artificial Sequence
  derived and/or modified sequence
atggccgacggcgaggagcccatggccgtggacggcggctgcggcgacaccggcgactgggagggcagatggaaccacgtgaagaagttcctggagagaagcggccccttcacccaccccgacttcgagcccagcaccgagagcctgcagttcctgctggacacctgcaaggtgctggtgatcggcgccggcggcctgggctgcgagctgctgaagaacctggccctgagcggcttcagacagatccacgtgatcgacatggacaccatcgacgtgagcaacctgaacagacagttcctgttcagacccaaggacatcggcagacccaaggccgaggtggccgccgagttcctgaacgacagagtgcccaactgcaacgtggtgccccacttcaacaagatccaggacttcaacgacaccttctacagacagttccacatcatcgtgtgcggcctggacagcatcatcgccagaagatggatcaacggcatgctgatcagcctgctgaactacgaggacggcgtgctggaccccagcagcatcgtgcccctgatcgacggcggcaccgagggcttcaagggcaacgccagagtgatcctgcccggcatgaccgcctgcatcgagtgcaccctggagctgtaccccccccaggtgaacttccccatgtgcaccatcgccagcatgcccagactgcccgagcactgcatcgagtacgtgagaatgctgcagtggcccaaggagcagcccttcggcgagggcgtgcccctggacggcgacgaccccgagcacatccagtggatcttccagaagagcctggagagagccagccagtacaacatcagaggcgtgacctacagactgacccagggcgtggtgaagagaatcatccccgccgtggccagcaccaacgccgtgatcgccgccgtgtgcgccaccgaggtgttcaagatcgccaccagcgcctacatccccctgaacaactacctggtgttcaacgacgtggacggcctgtacacctacaccttcgaggccgagagaaaggagaactgccccgcctgcagccagctgccccagaacatccagttcagccccagcgccaagctgcaggaggtgctggactacctgaccaacagcgccagcctgcagatgaagagccccgccatcaccgccaccctggagggcaagaacagaaccctgtacctgcagagcgtgaccagcatcgaggagagaaccagacccaacctgagcaagaccctgaaggagctgggcctggtggacggccaggagctggccgtggccgacgtgaccaccccccagaccgtgctgttcaagctgcacttcaccagctag

SEQ ID NO: 259272 - protein, 585 aa, Artificial Sequence
  derived and/or modified sequence
MEKKWKYCAVYYIIQIHFVKGVWEKTVNTEENVYATLGSDVNLTCQTQTVGFFVQMQWSKVTNKIDLIAVYHPQYGFYCAYGRPCESLVTFTETPENGSKWTLHLRNMSCSVSGRYECMLVLYPEGIQTKIYNLLIQTHVTADEWNSNHTIEIEINQTLEIPCFQNSSSKISSEFTYAWSVENSSTDSWVLLSKGIKEDNGTQETLISQNHLISNSTLLKDRVKLGTDYRLHLSPVQIFDDGRKFSCHIRVGPNKILRSSTTVKVFAKPEIPVIVENNSTDVLVERRFTCLLKNVFPKANITWFIDGSFLHDEKEGIYITNEERKGKDGFLELKSVLTRVHSNKPAQSDNLTIWCMALSPVPGNKVWNISSEKITFLLGSEISSTDPPLSVTESTLDTQPSPASSVSPARYPATSSVTLVDVSALRPNTTPQPSNSSMTTRGFNYPWTSSGTDTKKSVSRIPSETYSSSPSGAGSTLHDNVFTSTARAFSEVPTTANGSTKTNHVHITGIVVNKPKDGMSWPVIVAALLFCCMILFGLGVRKWCQYQKEIMERPPPFKPPPPPIKYTCIQEPNESDLPYHEMETL

SEQ ID NO: 259273 - DNA, 1758 bp, Artificial Sequence
  derived and/or modified sequence
atggaaaagaaatggaaatactgcgccgtgtactacatcattcagattcacttcgtgaagggcgtctgggagaaaaccgtcaatactgaggaaaacgtgtacgccaccctcggctctgacgtaaatctcacttgtcaaactcagactgtcgggtttttcgtgcagatgcagtggagtaaagtgactaataaaatcgatctgattgccgtgtaccacccccagtatgggttttattgcgcctacggccgcccttgcgaatccctggtcaccttcacagagacacctgagaacggatcaaagtggaccttacacttacgcaatatgagctgctccgtgtccggaagatatgagtgcatgctcgtgttgtatcctgaaggtatacaaacaaagatctacaacctgttgatacagacccatgttactgcagatgagtggaatagtaatcatacaatagaaatagagattaaccaaaccctggaaatcccctgcttccagaactctagttcaaagatctcctctgagttcacctacgcctggagcgtggaaaatagtagcactgactcttgggtgttactttctaaaggaatcaaggaggataatggcacccaggagacactgatcagtcaaaatcatctcatcagcaacagtacgttgctcaaggacagggtaaagctggggaccgactacaggctccatcttagcccagtgcagattttcgacgatgggcggaagttctcctgccatatccgagtcggccccaataaaatactccgcagtagcactacggttaaagtcttcgccaagcccgagatccctgtcatagtcgagaataactctaccgatgtgctggtcgagaggcgctttacctgtctgctcaaaaatgtcttccccaaagcgaatataacatggttcattgatgggtcattcctgcatgacgaaaaagaaggaatctacatcactaatgaggaaaggaagggcaaggacggctttctggagttgaaaagtgtactgactagggtccactccaacaaacccgctcaatcagacaatctgactatctggtgtatggccctcagccctgtgcctggaaataaggtttggaacatatcttctgaaaaaataaccttcctgctcggcagtgaaattagcagtacagaccctcctttgagtgtcaccgagagcacgctcgatacccagccctcacccgcctctagtgtgtccccagcgaggtaccccgccactagcagtgtgaccctggtggacgtgtcagccctccgcccaaacaccactccccagccctctaatagttctatgaccacaagaggtttcaactacccttggacatcaagtgggacagacaccaaaaagtcagtgagccggattccgtccgagacatattcatcctccccttccggggctggaagcacactgcacgacaacgtgtttacaagtactgctcgcgctttttctgaggtgcctactactgctaacggcagcacaaaaacaaatcatgtccacattactggcatcgttgttaataagcctaaagatggtatgagttggccagtgattgttgccgcactgctgttctgctgtatgattctgtttgggctaggcgtccggaagtggtgtcagtatcaaaaggagatcatggaaagaccgcccccgtttaaaccccctccacctcctataaagtacacgtgtattcaggagccaaatgaatctgatctgccgtaccacgagatggaaacactgtag

SEQ ID NO: 259274 - DNA, 1758 bp, Artificial Sequence
  derived and/or modified sequence
atggagaagaagtggaagtactgtgctgtgtactacatcatccagatccactttgtgaagggcgtgtgggagaagacagtgaacacagaagaaaatgtgtatgccaccctgggcagtgatgtgaacctgacctgccagacccagacagtgggcttctttgtgcagatgcagtggagcaaggtgaccaacaagattgacctgattgctgtgtaccacccccagtatggcttctactgtgcctacggccggccctgtgagagcctggtgaccttcacagagaccccagaaaatggcagcaagtggaccctgcacctgaggaacatgagctgcagcgtgtctggccgctatgagtgcatgctggtgctgtacccagagggcatccagaccaagatctacaacctgctgatccagacccacgtgacagcagatgagtggaacagcaaccacaccattgaaattgagatcaaccagaccctggagatcccctgcttccagaacagcagcagcaagatcagcagcgagttcacctacgcctggagcgtggagaacagcagcacagacagctgggtgctgctgagcaagggcatcaaggaggacaatggcacccaggagaccctcatcagccagaaccacctgatcagcaacagcaccctgctgaaggacagagtgaagctgggcacagactaccgcctgcacctgagccctgtgcagatctttgatgatggcaggaagttcagctgccacatccgggtgggccccaacaagatcctgcggagcagcaccaccgtgaaggtgtttgccaagccagagatccctgtgattgtggagaacaacagcacagatgtgctggtggagcggcgcttcacctgcctgctgaagaatgtgttccccaaggccaacatcacctggttcattgatggcagcttcctgcatgatgagaaggagggcatctacatcaccaatgaggagaggaagggcaaggatggcttcctggagctgaagtctgtgctgaccagggtgcacagcaacaagccagcccagagcgacaacctgaccatctggtgcatggccctgagccctgtgcccggcaacaaggtgtggaacatcagcagcgagaagatcaccttcctgctgggcagcgagatcagcagcacagatcctcccctgtctgtgacagagagcaccctggacacccagcccagccctgccagctctgtgtccccagcccgctacccagccaccagctctgtgaccctggtggatgtgtctgccctgcggcccaacaccaccccccagcccagcaacagctccatgaccacccggggcttcaactacccctggaccagcagcggcacagacaccaagaagtctgtgagccgcatccccagcgagacctacagcagcagccccagcggggccggcagcaccctgcatgacaacgtgttcaccagcacagcccgggccttcagcgaggtgcccaccacagccaacggcagcaccaagaccaaccacgtgcacatcaccggcatcgtggtgaacaagcccaaggatggcatgtcctggcctgtgattgtggccgccctgctcttctgctgcatgatcctgtttggcctgggcgtgaggaagtggtgccagtaccagaaggagatcatggagcggcccccacccttcaagcccccacctccacccatcaagtacacctgcatccaggagcccaatgaaagtgacctgccctaccacgagatggagaccctgtag

SEQ ID NO: 259275 - DNA, 1758 bp, Artificial Sequence
  derived and/or modified sequence
atggagaagaagtggaagtactgcgccgtgtactacatcatccagattcattttgttaagggcgtgtgggagaagactgtgaataccgaagagaatgtgtacgccacattaggctcagacgtcaacttgacctgccagacccagactgtgggcttttttgtgcagatgcaatggtctaaagttaccaacaagatcgatcttatcgctgtgtatcatccacagtacggcttctattgtgcatatggaagaccctgtgagagcctcgtgaccttcaccgaaacaccagaaaacggatcaaagtggacactccatctgagaaatatgtcttgtagtgtgagtggccggtacgaatgcatgctggttttatatcctgaggggattcaaacaaagatatacaacctgttaatccagacacatgtgacagcagacgaatggaatagcaatcacaccattgagatagaaatcaaccagaccttagagatcccttgttttcagaatagcagcagtaagatctcctcagagtttacgtatgcttggtcggtggagaacagtagtaccgattcttgggtgctgttgtctaaaggcattaaggaggacaacggcacacaggagacattaatcagtcagaaccatctgatctctaattcaacacttctgaaggaccgcgtgaaactcggtacagactacaggctccatctaagccctgtacaaatcttcgatgacggcaggaagttcagctgtcacataagagtcggtccgaacaaaatcctgaggtcttcaacgacagtgaaagtgtttgccaaaccggaaataccagtgattgtggagaataattctactgatgtgctggtggagagaagatttacatgtttactgaagaatgtcttccccaaggctaacattacttggttcattgacggcagtttcctccatgatgagaaggagggaatttatataacgaacgaggagcgtaagggcaaggacggtttcttggagcttaagtcagtcttgaccagggtacacagcaataaacctgcgcagagtgacaacctcaccatttggtgcatggctctctccccggtcccaggaaacaaggtatggaacatctctagcgagaagattacattcctgctgggatccgagattagctctacagacccacccctcagtgtcacagagtccaccctggacacacagccatcccccgcctcctcagtgtcgcctgccaggtatccggctactagctcagtcacacttgttgatgtgagcgctcttagaccaaacacaaccccacaacccagcaacagcagtatgactacgcgcgggttcaattacccctggacctcttccggcacagacaccaagaaatcggtgtccagaattccatcagaaacatatagctcatccccctctggcgctggctccactctgcatgacaacgtgttcactagtacagcccgggcgttcagcgaagtgccaacaaccgctaatggctcaaccaagacaaatcacgtgcacataactggaatcgtcgtgaacaagccaaaagatgggatgtcctggcctgtgatagttgcagctctattattctgctgcatgattctgttcggacttggggttcgcaagtggtgtcaataccaaaaagaaatcatggagagacctcctccattcaagcccccccccccgcccatcaagtacacctgcattcaagagccgaacgaatcggacttaccttaccacgagatggagacgctgtag

SEQ ID NO: 259276 - DNA, 1758 bp, Artificial Sequence
  derived and/or modified sequence
atggaaaaaaagtggaagtactgtgcagtgtactatataatccagattcactttgtcaaaggagtgtgggaaaagacagtgaatacagaggaaaatgtttatgctaccctggggagcgatgttaacctgacatgtcagacccagaccgtcggcttcttcgtgcagatgcagtggtctaaggtcacaaacaaaattgacttgatcgcggtgtaccacccacaatacggtttctactgtgcctacggacgtccttgtgagagcctggtgacatttaccgagacacctgaaaacgggtccaaatggaccttgcaccttaggaatatgagctgttcagtgagcgggcgatatgagtgcatgctcgtgctataccctgagggaattcagacaaagatctacaacctgctcattcagacacacgtaaccgccgatgaatggaactccaaccacaccatcgaaatcgaaatcaaccagacgctggaaattccctgttttcagaactccagcagcaaaatttcaagtgagtttacatacgcctggtccgtcgaaaactcatccaccgattcctgggtgctgctcagcaaaggaataaaggaggataacggcacacaggaaaccctcatctcgcaaaaccatctgatcagtaactcaacccttttaaaggatagggtcaagttgggtaccgattaccgcctacacctgtcccccgtgcagatattcgacgatgggcgaaaattttcatgccacattagagtcggccctaacaagatccttcgttcaagcacaaccgtgaaagtctttgccaagccggaaattccagttatagtggaaaacaattcaaccgatgtgcttgtcgaaagacggtttacatgcctactgaagaacgtgtttcctaaagccaatataacttggttcattgatggaagctttctgcacgacgaaaaggaaggcatctatatcaccaatgaggagcgcaagggcaaagacggatttctggagttaaagagcgttctcacgcgtgtgcatagcaataaacccgcacagtcagacaatctgacaatctggtgtatggcattatcacccgtacccggtaataaggtgtggaatatcagctctgagaaaattacatttttgctgggctcggaaattagtagtaccgaccccccactctctgtgaccgaatcgaccctggatactcagccgagtcctgcctctagcgtgagccctgcccgttacccagctacatcatccgtaactctggtggatgtgagtgcactgcgtccaaatacaactcctcagcccagcaatagcagcatgactactcgtggctttaattacccatggacatcctctggtacagacaccaagaagtccgtctcaaggatcccttctgagacctattcttctagcccatccggtgccggatctacgttacacgacaacgtgtttaccagtacggctcgagccttttccgaagtccccacgactgccaatgggtccacaaagaccaatcacgtccacatcactggcatcgtagttaataagccaaaggacgggatgtcctggcctgttatagtcgcagcccttctgttctgttgcatgattctatttggccttggtgtgagaaaatggtgtcagtatcagaaggagatcatggaacgccctccaccctttaagccccctccaccacctatcaaatatacgtgcatccaagaacccaacgaaagtgatctcccttaccacgagatggagacgctgtag

SEQ ID NO: 259277 - DNA, 4324 bp, Artificial Sequence
  derived and/or modified sequence
ataaacagacccaggcgtgtgtggtagagttcgggttttttagcacgaagtgggtggctggagtttgcttgaaaacatcaattgactttgtgatcattacagaaatgctggtgtaaggtgttcagaagacaatggagaaaaaatggaaatactgtgctgtctattacatcatccagatacattttgtcaagggagtttgggaaaaaacagtcaacacagaagaaaatgtttatgctacacttggctctgatgtcaacctgacctgccaaacacagacagtaggcttcttcgtgcagatgcaatggtccaaggtcaccaataagatagacctgattgctgtctatcatccccaatacggcttctactgtgcctatgggagaccctgtgagtcacttgtgactttcacagaaactcctgagaatgggtcaaaatggactctgcacttaaggaatatgtcttgttcagtcagtggaaggtacgagtgtatgcttgttctgtatccagagggcattcagactaaaatctacaaccttctcattcagacacacgttacagcagatgaatggaacagcaaccatacgatagaaatagagataaatcagactctggaaataccatgctttcaaaatagctcctcaaaaatttcatctgagttcacctatgcatggtcggtggaaaacagcagcacggattcttgggtccttctttctaagggtataaaggaggataatggaactcaggaaacacttatctcccaaaatcacctcatcagcaattccacattacttaaagatagagtcaagcttggtacagactacagactccacctctctccagtccaaatcttcgatgatgggcggaagttctcttgccacattagagtcggtcctaacaaaatcttgaggagctccaccacagtcaaggtttttgctaaaccagaaatccctgtgattgtggaaaataactccacggatgtcttggtagagagaagatttacctgcttactaaagaatgtatttcccaaagcaaatatcacatggtttatagatggaagttttcttcatgatgaaaaagaaggaatatatattactaatgaagagagaaaaggcaaagatggatttttggaactgaagtctgttttaacaagggtacatagtaataaaccagcccaatcagacaacttgaccatttggtgtatggctctgtctccagtcccaggaaataaagtgtggaacatctcatcagaaaagatcacttttctcttaggttctgaaatttcctcaacagaccctccactgagtgttacagaatctacccttgacacccaaccttctccagccagcagtgtatctcctgcaagatatccagctacatcttcagtgacccttgtagatgtgagtgccttgaggccaaacaccactcctcaacccagcaattccagtatgactacccgaggcttcaactatccctggacctccagtgggacagataccaaaaaatcagtttcacggatacctagtgaaacatacagttcatccccgtcaggtgcaggctcaacacttcatgacaatgtctttaccagcacagccagagcattttcagaagtccccacaactgccaatggatctacgaaaactaatcacgtccatatcactggtattgtggtcaataagcccaaagatggaatgtcctggccagtgattgtagcagctttactcttttgctgcatgatattgtttggtcttggagtgagaaaatggtgtcagtaccaaaaagaaataatggaaagacctccacctttcaagccaccaccacctcccatcaagtacacttgcattcaagagcccaacgaaagtgatctgccttatcatgagatggagaccctctagtctcgtgagactttgccccatggcagaactctgctggaatcctattgagaaggtagacattgtgctttattaatatagtcgctcttcagccatgcctttgctgcagctgaaatggaagtcagaagtgagtgacctgttttcccagcaactcaccctcttccatctccaaacgcctgaagcttaaccaagagtgagaggatatgtcatgttcacactcaatgcaattcgtagtggttttcttgcttatgtaagaagtacatattagtctgccatctttaaaaaaaaatacagtattttcatttaaattctctgatggagggacaacaatggtttcaactgtatgcccatgcctgatcctcttatttgaacatctatcaacattgtaaactctttgccaaaatcctggggctttgctgcattccctaagataattacaggaaaaagaaaatgtaaaagtgctaacaaggctgccaagtaatggagaagtatggttagtcttcatattgaaattctgttgcttattttcatggaaggaaacagaatactttgcacaggaaccacattttcaatcctccttcactgtcttcctaccatgttcagcccagactcctgccacatggaccaggatgaagagggatcaaagagataattagccaaaaacccagtagcctagaagatacaaaactccactggcctctaaaattatattagccaagagtggtttcatttgagtgccttcgtgtgtatgtccatcaaactggaaccaaactgttttgtaagtaaacaggcagcctaagcccaaccctactttctaattccagttattctctttttcatctggggatttacctgttcatttaatctgcctgttttgatctgttttgaaaaagataaagagcctcaaatcagaccagcactgattaattaaccctgctcctaccaatcttttttaaagcagttgaagcagaatgtataggtgtcagagaagaaacctagtcagccagacgtgctctgtattcagcaatagtttgtgaatgaataaattactaatcctccttgtcgcttgaaaccttcccacactccctgctccaggagggaaaaacagatgttgttgacagatagagtgataggcaaattctgtgtggactttagtcccaaaaggaaactttagttcacttgcagtatgcttatccttgactgcacatgagaatgccttgtgcagagttatttggagattatgtctttttcttaaacaccatggctgtcacacttcagttcaattaaatcagaatgtctgaggagtgagacacaggcatcaacactctcaaatgattcacatgttcagccaaagttgagaaccatcgagcctgtggaagttctttctcatggctcagaatcttaggtaggtgcttaactcttgtggtggccagcctccaagatgagccccagtgttcttgcctcctactattcacatctttatgtggtcccctccaatgctgaatacagatgatttgtgtaacctgaggccaggattaaggggaggcaatcaatgcacctagggaaaaaatttaaggaggtattcacactcagggtcatgcacttgcacaatgttgagaatgagtaccactctcaccattggtatagccaaaaaagcttggaagtgaccaaggctaggtcacaaaatacactgtggcttcttctttgatctctctttgaccatactgacactgggaaaagcccattcccatgccatgaagacaccaaggcagccctattgagaaatctacctgtcgtggccgggcgcagtggctcacgcctgtaatcccagcactttgggaggccgaggtgggtggatcacgaggtcaggagatcgagaccatcctggctaacacagtgaaaccccgtctctactaaaaatacaaaaaattagccgggtgtggtgtcgggcacctgtagtcccagctactcaggaggctgaggcaggagaagggtgggaacccgggaggcagagcttgcagtgagccgagattgtgccactgcacactccaatctgggtgaaagaccgagactccgcctcaaaaaaaaaaaaaaaagaaagaaagaaagaaagaaagaaatctacctgtcaaggaactaaggtattttgctaacaagcaccaacttgccagccatgtaagggagccatcttggaagcagatcctccagcctccagtcaagtcttcagataattgcaacttcagttgatcttttgaccaagacctcaagagagccagaactacccagctaagccttttactaaatttctgaacttctaacactattagataataagtgcttattgtttaacaccattaattttgagtataatttgttacatagcgacagataactatacagctcaacaactagaaaaataaactgtttacctgccttaa

SEQ ID NO: 259278 - DNA, 1758 bp, Artificial Sequence
  derived and/or modified sequence
atggagaagaagtggaagtactgcgccgtgtactacatcatccagatccacttcgtgaagggcgtgtgggagaagaccgtgaacaccgaggagaacgtgtacgccaccctgggcagcgacgtgaacctgacctgccagacccagaccgtgggcttcttcgtgcagatgcagtggagcaaggtgaccaacaagatcgacctgatcgccgtgtaccacccccagtacggcttctactgcgcctacggcagaccctgcgagagcctggtgaccttcaccgagacccccgagaacggcagcaagtggaccctgcacctgagaaacatgagctgcagcgtgagcggcagatacgagtgcatgctggtgctgtaccccgagggcatccagaccaagatctacaacctgctgatccagacccacgtgaccgccgacgagtggaacagcaaccacaccatcgagatcgagatcaaccagaccctggagatcccctgcttccagaacagcagcagcaagatcagcagcgagttcacctacgcctggagcgtggagaacagcagcaccgacagctgggtgctgctgagcaagggcatcaaggaggacaacggcacccaggagaccctgatcagccagaaccacctgatcagcaacagcaccctgctgaaggacagagtgaagctgggcaccgactacagactgcacctgagccccgtgcagatcttcgacgacggcagaaagttcagctgccacatcagagtgggccccaacaagatcctgagaagcagcaccaccgtgaaggtgttcgccaagcccgagatccccgtgatcgtggagaacaacagcaccgacgtgctggtggagagaagattcacctgcctgctgaagaacgtgttccccaaggccaacatcacctggttcatcgacggcagcttcctgcacgacgagaaggagggcatctacatcaccaacgaggagagaaagggcaaggacggcttcctggagctgaagagcgtgctgaccagagtgcacagcaacaagcccgcccagagcgacaacctgaccatctggtgcatggccctgagccccgtgcccggcaacaaggtgtggaacatcagcagcgagaagatcaccttcctgctgggcagcgagatcagcagcaccgacccccccctgagcgtgaccgagagcaccctggacacccagcccagccccgccagcagcgtgagccccgccagataccccgccaccagcagcgtgaccctggtggacgtgagcgccctgagacccaacaccaccccccagcccagcaacagcagcatgaccaccagaggcttcaactacccctggaccagcagcggcaccgacaccaagaagagcgtgagcagaatccccagcgagacctacagcagcagccccagcggcgccggcagcaccctgcacgacaacgtgttcaccagcaccgccagagccttcagcgaggtgcccaccaccgccaacggcagcaccaagaccaaccacgtgcacatcaccggcatcgtggtgaacaagcccaaggacggcatgagctggcccgtgatcgtggccgccctgctgttctgctgcatgatcctgttcggcctgggcgtgagaaagtggtgccagtaccagaaggagatcatggagagacccccccccttcaagcccccccccccccccatcaagtacacctgcatccaggagcccaacgagagcgacctgccctaccacgagatggagaccctgtag

SEQ ID NO: 259279 - protein, 244 aa, Artificial Sequence
  derived and/or modified sequence
MTEPGASPEDPWVKVEYAYSDNSLDPGLFVESTRKGSVVSRANSIGSTSASSVPNTDDEDSDYHQEAYKESYKDRRRRAHTQAEQKRRDAIKRGYDDLQTIVPTCQQQDFSIGSQKLSKAIVLQKTIDYIQFLHKEKKKQEEEVSTLRKDVTALKIMKVNYEQIVKAHQDNPHEGEDQVSDQVKFNVFQGIMDSLFQSFNASISVASFQELSACVFSWIEEHCKPQTLREIVIGVLHQLKNQLY

SEQ ID NO: 259280 - DNA, 2418 bp, Artificial Sequence
  derived and/or modified sequence
cctcgccgcagtgggcccgcccgctggcccgtttccggtccggtgggtacaagatgacggagccgggcgcctctcccgaggacccttgggtcaaggtggagtatgcctacagcgacaacagcctggaccccgggctttttgtagaaagcacccgcaaggggagtgtagtgtccagagctaatagcatcggttccaccagtgcctcttctgtccccaacacagatgatgaggacagtgattaccaccaggaggcctacaaggagtcctacaaagaccggcggcggcgcgcacacactcaggctgagcagaagaggagggacgccatcaagagaggctatgatgaccttcagaccatcgtccccacttgccagcagcaggacttctccattggctcccaaaagctcagcaaagccatcgttctacaaaagaccattgactacattcagtttttgcacaaggagaagaaaaagcaggaggaggaggtgtccacgttacgcaaggatgtcaccgccctaaagatcatgaaagtgaactatgagcagattgtgaaggcacaccaggacaacccccatgaaggggaggaccaggtctctgaccaggtcaagttcaacgtgtttcaaggcatcatggattccctgttccagtccttcaatgcctccatctcagtggccagcttccaggagctgtcagcgtgtgtcttcagctggatcgaggagcactgtaagcctcagaccctgcgggagattgtgattggcgtcctgcaccaattgaaaaaccagctttactgaccggttcttggaaacctggagaacagccaacaagaggcccttgaatctctacgtggccactgaactgctgggcccgggagactggactacaacacctcacactggtcagctggtttctacttggtgtttggtttttcccagccccattttatcttcagcggagccgcggtgtttgttttgtgaaagcttctgattaatttattatattgacgataaaactcaaacctacccagccttccccccactccatggaagtccttgggatgggcgtctgctctgggacaccccaaagagctcctgccctctcagccctttattcaagcctcagatttctgctcatgatctacatagatttggaaactggttttcctctgttttggtctcttgggcaacatttttggcccaagtttgggcaacatttggcccaagtttgggattttggcagtagctgtatgggagaaaaagagtaagaggaaatattcccacagccatgaagggtgaaagggcaccttgtcccagactagggctgcctggtcagtcccaggtgaggccaaggctttctggccatctcagggaggggccaccaggttcctcccctcaccccatattccatcaccttcctcctctgctctgggtggtaagggaagccctcccggttcccacaggctatgatgctgcatggcagagggcaggtataacacagcactacatattggaaattttttatttttctaaataccaatgcagttttgctacggttacaattttgaaatattaactgagcctcaaaatcaccctttctgtcaagcatatcttggcctctcccatgtctcagtgttgcctgcatttctcccaggacttgggggtggggtgaaaagcgtacaaaagatacttaaaagggctcctggggtacacaagcccagcaggtcctgagtgaagccgtgggccctccaaatgctcgttttatagcaacctctctctaccctagttctccaaattcacttctgccttcctcaggtttgatatctggcaggtttgactatccagaggaaattaaatatttttatataaaattaaattataataaatattgccaaatgctttcctttagattgttccaagtctaaatgttaacctcaagctactgcaatttagacaatgaaatgggctgggtctacccccagccaccagccctcatcctctctacccagtgctctggtttatgcttgtctcctgactgctctgcttaaaggtgaaagtagcaggaacaacaacaaaagccaaccaaaaacaaggtagccagtgcaagacatctcactcttctgacatcctgcagtccccaccagtcctgaccgtgggcccctcaggggtctgggagtgtgacgttgtaatcttcatccgtctctatcccaacttcctcctgtgagacagggagacaagtgaatgagatgtcaccaggataagaccacagggaagcaaagaaggaagagagctccacttacaaagaactgcttcttgctcttggggtatccttcaagtattgcatcagacagctctgtagcctgacaagaaataaaaccacccgttttcagatgggcaaggcactgcctgtcagtttatgatattgtgt

SEQ ID NO: 259281 - DNA, 735 bp, Artificial Sequence
  derived and/or modified sequence
atgactgaacctggtgcctctccagaggatccttgggtgaaagtggaatacgcgtattctgataattctctggatcctggcctgtttgtggaatccacaagaaagggctctgttgtctctcgagccaacagtatcggaagcaccagtgcatctagtgtcccaaatacagacgatgaggatagcgattaccatcaagaagcctataaggagagctacaaagataggcgacgccgagcacatacgcaggctgaacagaaaaggcgggatgctattaagcggggttatgatgacctccaaacaattgtaccaacctgccagcagcaagatttctccatcggatctcagaagttgagtaaagcaatagtcctccagaaaacaattgattacatccagttcctgcacaaggagaaaaaaaaacaggaggaggaggtctcgactctccgaaaggacgtcaccgcgctcaagatcatgaaggtgaactacgaacagatcgtgaaagcccaccaggataacccacatgagggcgaggaccaagtgtccgaccaggttaaatttaacgtctttcagggtattatggatagtctgtttcagtcctttaacgcttcaatatcggtggcgtcctttcaggagctctccgcatgtgtgtttagctggatagaggagcattgcaagccccagaccctccgcgagatcgttatcggcgtgcttcaccagctcaagaatcagttgtattag

SEQ ID NO: 259282 - DNA, 735 bp, Artificial Sequence
  derived and/or modified sequence
atgacagagcccggggccagccctgaggacccctgggtgaaggtggagtatgcctacagcgacaacagcctggaccccggcctgtttgtggagagcaccaggaaaggatctgtggtgtcccgggccaacagcatcggcagcaccagcgccagctctgtgcccaacacagatgatgaagattctgactaccaccaggaggcctacaaggagagctacaaggacagaagaagaagagcccacacccaggccgagcagaagagaagagatgccatcaagaggggctatgatgacctgcagaccatcgtgcccacctgccagcagcaggacttcagcatcggcagccagaagctgagcaaggccatcgtgctgcagaagaccatcgactacatccagttcctgcacaaggagaagaagaagcaggaggaggaggtgtccaccctgaggaaggatgtgacagccctgaagatcatgaaggtgaactatgagcagatcgtgaaggcccaccaggacaacccccatgaaggagaggaccaggtgtctgaccaggtgaagttcaacgtgttccagggcatcatggacagcctcttccagagcttcaatgccagcatctctgtggccagcttccaggagctgagcgcctgtgtgttctcctggattgaggagcactgcaagccccagaccctgcgggagatcgtgattggagtgctgcaccagctgaagaaccagctgtactag

SEQ ID NO: 259283 - DNA, 2399 bp, Artificial Sequence
  derived and/or modified sequence
cgccacccgcttcctcgccgcagggggcccgcccgctggcccgtttccggtccggtgggtacaagatgacggagccgggcgcctctcccgaggacccttgggtcaaggtggagtatgcctacagcgacaacagcctggaccccgggctttttgtagaaagcacccgcaaggggagtgtagtgtccagagctaatagcatcggttccaccagtgcctcttctgtccccaacacagatgatgaggacagtgattaccaccaggaggcctacaaggagtcctacaaagaccggcggcggcgcgcacacactcaggctgagcagaagaggagggacgccatcaagagaggctatgatgaccttcagaccatcgtccccacttgccagcagcaggacttctccattggctcccaaaagctcagcaaagccatcgttctacaaaagaccattgactacattcagtttttgcacaaggagaagaaaaagcaggaggaggaggtgtccacgttacgcaaggatgtcaccgccctaaagatcatgaaagtgaactatgagcagattgtgaaggcacaccaggacaacccccatgaaggggaggaccaggtctctgaccaggtcaagttcaacgtgtttcaaggcatcatggattccctgttccagtccttcaatgcctccatctcagtggccagcttccaggagctgtcagcgtgtgtcttcagctggatcgaggagcactgtaagcctcagaccctgcgggagattgtgattggcgtcctgcaccaattgaaaaaccagctttactgaccggttcttggaaacctggagaacagccaacaagaggcccttgaatctctacgtggccactgaactgctgggcccgggagactggactacaacacctcacactggtcagctggtttctacttggtgtttggtttttcccagccccattttatcttcagcggagccgcggtgtttgttttgtgaaagcttctgattaatttattatattgacgataaaactcaaacctacccagccttccccccactccatggaagtccttgggatgggcgtctgctctggacaccccaaagagctcctgccctctcagccctttattcaagcctcagatttctgctcatgatctacatagatttggaaactgttttcctctgttttggtctcttgggcaacatttttggcccaagtttgggcaacatttggcccaagtttgggcattttggcagtagctgtatgggagaaaaagagtaagaggaaatattcccacagccatgaagggtgaaagggcaccttgtgcctagactagggctgcctggtcagtcccaggtgaggccaagggctttctggccatctcagggaggggccaccaggttcctcccctcaccccatattccatcaccttcctcctctgctctgggtggtaagggaagccctcccggttcccacaggctatgatgctgcatggcagaggcaggtataacacagcactacatattggaaattttttatttttctaaataccaatgcagttttgctacggttacaattttgaaatattaactgagcctcaaaatcaccctttctgtcaagcatatcttggcctctcccatgtctcagtgttgcctgcatttctcccaggacttgggggtggggtgaaaagcgtacaaaagatacttaaaagggctcctggggtacacaagcccagcaggtcctgagtgaagccgtgggccctccaaatgctcgttttatagcaacctctctctaccctagttctccaaattcacttctgccttcctcaggtttgatatctggcaggtttgactatccagaggaaattaaatatttttatataaaattaaattataataaatattgccaaatgctttcctttagcattgttccaagtctaaatgttaacctcaagctactgcaatttagacaatgaaatgggctgggtctacccccagccaccagccctcatcctctctacccagtgctctggtttatgcttgtctcctgactgctctgcttaaaggtgaaagtagcaggaacaacaacaaaagccaaccaaaaacaaggtagccagtgcaagacatctcactcttctgacatcctgcagtccccaccagtcctgaccgtgggcccctcaggggtctgggagtgtgacgttgtaatcttcatccgtctctatcccaacttcctcctgtgagacagggagacaagtgaatgagatgtcaccaggataagaccacagggaagcaaagaaggaagagagctccacttacaaagaactgcttcttgctcttggggtatccttcaagtattgcatcagacagctctgtagcctgacaagaaataaaaccacccgttttcagatgggc

SEQ ID NO: 259284 - DNA, 735 bp, Artificial Sequence
  derived and/or modified sequence
atgaccgagcccggcgccagccccgaggacccctgggtgaaggtggagtacgcctacagcgataactccctcgacccagggctgttcgtcgaatcaacccgcaagggaagcgttgtgtccagggcaaacagcatcggtagcacaagtgcttcctccgtacccaacaccgacgacgaagacagtgattatcaccaggaagcttacaaagaaagttacaaggaccggcgccgacgggctcacactcaggcagaacagaagcgtagagatgctatcaagaggggttacgatgatctccagaccatcgtaccaacgtgccaacaacaagatttcagcatagggtctcagaaactgagcaaagctatcgtactgcagaaaactatagattacatccagttcctgcacaaagagaaaaagaaacaagaagaagaagtgagcacactgcgaaaggacgtcactgccctgaagataatgaaggtgaactacgaacagattgtcaaggcccaccaggataatcctcacgagggggaggaccaagtttccgaccaggtgaaattcaacgtcttccagggtatcatggattcactattccagagctttaatgcttcaatttccgttgctagcttccaggaactctcagcctgcgttttttcttggattgaggaacactgcaaaccccaaacactgcgcgagatagtcatcggagtgctgcatcaattaaaaaaccagctctattag

SEQ ID NO: 259285 - DNA, 735 bp, Artificial Sequence
  derived and/or modified sequence
atgaccgaacccggtgcctcaccagaggacccttgggtgaaggttgaatacgcctacagcgataactctttggacccaggcctgttcgttgaaagtacacgaaaggggagcgtggtttccagggctaactccattggctcaacctcagcctcttccgtcccaaacactgatgacgaggattccgattatcatcaagaagcctacaaggaaagttataaggaccgtcgcaggcgggctcacacccaggcagaacagaaaaggagggacgcaatcaagagggggtatgacgatctccagactatcgtcccaacatgccagcagcaggattttagcataggatctcagaaactaagcaaggccattgtgctacagaagacaattgactacatccagttccttcataaagaaaaaaaaaagcaagaggaagaagtatcaacactgaggaaggacgtgactgctctgaagattatgaaggtgaattatgaacagatagtgaaagcccatcaggacaatccccacgagggcgaggatcaagtctcagaccaggtcaagttcaacgtattccaggggatcatggattctctgtttcaatccttcaatgcgagcatttccgtggcttcgttccaggagctatccgcctgcgtctttagttggattgaagaacactgcaagccacagactttgagggagatcgtcattggcgtgctccatcagctgaagaatcagctgtattag

SEQ ID NO: 259286 - DNA, 735 bp, Artificial Sequence
  derived and/or modified sequence
atgaccgagcccggcgccagccccgaggacccctgggtgaaggtggagtacgcctacagcgacaacagcctggaccccggcctgttcgtggagagcaccagaaagggcagcgtggtgagcagagccaacagcatcggcagcaccagcgccagcagcgtgcccaacaccgacgacgaggacagcgactaccaccaggaggcctacaaggagagctacaaggacagaagaagaagagcccacacccaggccgagcagaagagaagagacgccatcaagagaggctacgacgacctgcagaccatcgtgcccacctgccagcagcaggacttcagcatcggcagccagaagctgagcaaggccatcgtgctgcagaagaccatcgactacatccagttcctgcacaaggagaagaagaagcaggaggaggaggtgagcaccctgagaaaggacgtgaccgccctgaagatcatgaaggtgaactacgagcagatcgtgaaggcccaccaggacaacccccacgagggcgaggaccaggtgagcgaccaggtgaagttcaacgtgttccagggcatcatggacagcctgttccagagcttcaacgccagcatcagcgtggccagcttccaggagctgagcgcctgcgtgttcagctggatcgaggagcactgcaagccccagaccctgagagagatcgtgatcggcgtgctgcaccagctgaagaaccagctgtactag

SEQ ID NO: 259287 - protein, 214 aa, Artificial Sequence
  derived and/or modified sequence
MTEPGASPEDPWVKVEYAYSDNSLDPDDEDSDYHQEAYKESYKDRRRRAHTQAEQKRRDAIKRGYDDLQTIVPTCQQQDFSIGSQKLSKAIVLQKTIDYIQFLHKEKKKQEEEVSTLRKDVTALKIMKVNYEQIVKAHQDNPHEGEDQVSDQVKFNVFQGIMDSLFQSFNASISVASFQELSACVFSWIEEHCKPQTLREIVIGVLHQLKNQLY

SEQ ID NO: 259288 - DNA, 645 bp, Artificial Sequence
  derived and/or modified sequence
atgaccgagccgggggcttcccctgaggatccttgggtgaaagtagagtatgcttacagcgacaactcgctggaccctgacgatgaggactctgactatcaccaagaggcatacaaagagtcctataaggatagaagacggagagcccatactcaggccgaacagaagcgtagagatgccatcaaacgtgggtacgatgatttacagaccattgttcctacctgccaacagcaggatttcagcatcggaagccagaaactgtctaaggcgatcgttctccaaaagactattgactatattcagtttctgcataaagaaaaaaagaagcaggaagaagaagtaagtacattacgcaaggatgtgacagccctcaagatcatgaaagtgaactacgaacagatcgttaaggcgcatcaggacaatccccacgagggcgaagatcaggtgtcagatcaggtgaagttcaacgtgttccagggaatcatggactctctgttccagagcttcaacgcatctatctctgtggcttccttccaagagcttagtgcctgcgtcttcagctggatagaggaacactgcaaaccgcaaaccctcagggagattgtcatcggagtgctccatcagctgaagaaccagctttattag

SEQ ID NO: 259289 - DNA, 645 bp, Artificial Sequence
  derived and/or modified sequence
atgacagagcccggggccagccctgaggacccctgggtgaaggtggagtatgcctacagcgacaacagcctggaccctgatgatgaagattctgactaccaccaggaggcctacaaggagagctacaaggacagaagaagaagagcccacacccaggccgagcagaagagaagagatgccatcaagaggggctatgatgacctgcagaccatcgtgcccacctgccagcagcaggacttcagcatcggcagccagaagctgagcaaggccatcgtgctgcagaagaccatcgactacatccagttcctgcacaaggagaagaagaagcaggaggaggaggtgtccaccctgaggaaggatgtgacagccctgaagatcatgaaggtgaactatgagcagatcgtgaaggcccaccaggacaacccccatgaaggagaggaccaggtgtctgaccaggtgaagttcaacgtgttccagggcatcatggacagcctcttccagagcttcaatgccagcatctctgtggccagcttccaggagctgagcgcctgtgtgttctcctggattgaggagcactgcaagccccagaccctgcgggagatcgtgattggagtgctgcaccagctgaagaaccagctgtactag

SEQ ID NO: 259290 - DNA, 2309 bp, Artificial Sequence
  derived and/or modified sequence
cgccacccgcttcctcgccgcagggggcccgcccgctggcccgtttccggtccggtgggtacaagatgacggagccgggcgcctctcccgaggacccttgggtcaaggtggagtatgcctacagcgacaacagcctggaccccgatgatgaggacagtgattaccaccaggaggcctacaaggagtcctacaaagaccggcggcggcgcgcacacactcaggctgagcagaagaggagggacgccatcaagagaggctatgatgaccttcagaccatcgtccccacttgccagcagcaggacttctccattggctcccaaaagctcagcaaagccatcgttctacaaaagaccattgactacattcagtttttgcacaaggagaagaaaaagcaggaggaggaggtgtccacgttacgcaaggatgtcaccgccctaaagatcatgaaagtgaactatgagcagattgtgaaggcacaccaggacaacccccatgaaggggaggaccaggtctctgaccaggtcaagttcaacgtgtttcaaggcatcatggattccctgttccagtccttcaatgcctccatctcagtggccagcttccaggagctgtcagcgtgtgtcttcagctggatcgaggagcactgtaagcctcagaccctgcgggagattgtgattggcgtcctgcaccaattgaaaaaccagctttactgaccggttcttggaaacctggagaacagccaacaagaggcccttgaatctctacgtggccactgaactgctgggcccgggagactggactacaacacctcacactggtcagctggtttctacttggtgtttggtttttcccagccccattttatcttcagcggagccgcggtgtttgttttgtgaaagcttctgattaatttattatattgacgataaaactcaaacctacccagccttccccccactccatggaagtccttgggatgggcgtctgctctggacaccccaaagagctcctgccctctcagccctttattcaagcctcagatttctgctcatgatctacatagatttggaaactgttttcctctgttttggtctcttgggcaacatttttggcccaagtttgggcaacatttggcccaagtttgggcattttggcagtagctgtatgggagaaaaagagtaagaggaaatattcccacagccatgaagggtgaaagggcaccttgtgcctagactagggctgcctggtcagtcccaggtgaggccaagggctttctggccatctcagggaggggccaccaggttcctcccctcaccccatattccatcaccttcctcctctgctctgggtggtaagggaagccctcccggttcccacaggctatgatgctgcatggcagaggcaggtataacacagcactacatattggaaattttttatttttctaaataccaatgcagttttgctacggttacaattttgaaatattaactgagcctcaaaatcaccctttctgtcaagcatatcttggcctctcccatgtctcagtgttgcctgcatttctcccaggacttgggggtggggtgaaaagcgtacaaaagatacttaaaagggctcctggggtacacaagcccagcaggtcctgagtgaagccgtgggccctccaaatgctcgttttatagcaacctctctctaccctagttctccaaattcacttctgccttcctcaggtttgatatctggcaggtttgactatccagaggaaattaaatatttttatataaaattaaattataataaatattgccaaatgctttcctttagcattgttccaagtctaaatgttaacctcaagctactgcaatttagacaatgaaatgggctgggtctacccccagccaccagccctcatcctctctacccagtgctctggtttatgcttgtctcctgactgctctgcttaaaggtgaaagtagcaggaacaacaacaaaagccaaccaaaaacaaggtagccagtgcaagacatctcactcttctgacatcctgcagtccccaccagtcctgaccgtgggcccctcaggggtctgggagtgtgacgttgtaatcttcatccgtctctatcccaacttcctcctgtgagacagggagacaagtgaatgagatgtcaccaggataagaccacagggaagcaaagaaggaagagagctccacttacaaagaactgcttcttgctcttggggtatccttcaagtattgcatcagacagctctgtagcctgacaagaaataaaaccacccgttttcagatgggc

SEQ ID NO: 259291 - DNA, 645 bp, Artificial Sequence
  derived and/or modified sequence
atgaccgagcccggcgccagccccgaggacccctgggtgaaggtggaatacgcctattccgacaatagcctggatcccgacgatgaggattctgattatcaccaggaagcttacaaggagtcatataaggataggagaaggcgtgctcacacccaggcagaacagaagaggagagacgcgatcaaaagaggctacgatgatttacaaaccatagttcctacatgtcagcagcaagatttcagtatcggctcccaaaaactatctaaggcaatcgtcctccagaagactatagattacatccaattcctccataaggagaagaaaaagcaggaagaggaggtatccactctgcgtaaagatgttacagcactcaagatcatgaaagtcaactatgaacagattgtaaaagcacatcaggacaacccccacgagggtgaggatcaggtgagcgaccaggttaagttcaacgtttttcagggcattatggacagcctctttcagtcctttaacgcatctatttcagtagcaagtttccaggagctttcagcctgcgtgttcagttggatagaggaacactgcaaaccacagacgttacgtgagattgtgatcggagtgctacatcagctcaaaaatcagctgtattag

SEQ ID NO: 259292 - DNA, 645 bp, Artificial Sequence
  derived and/or modified sequence
atgacagagcccggagcttcgcctgaggacccctgggttaaggtcgagtatgcctactcagacaattctctcgatcccgacgacgaagatagcgactaccaccaggaagcttataaagagtcttacaaggacagacgcaggagggctcatacccaggctgagcaaaagagacgcgatgccatcaaacggggatatgacgacctgcaaaccatcgtccctacttgtcagcaacaggacttctcgattggaagtcaaaaattgtccaaagcaatagtgttgcagaagactatcgattacattcagttcctacacaaagagaaaaaaaaacaagaggaggaggtgtccaccctgagaaaggatgtcacggcattaaagataatgaaggttaactatgaacagattgtaaaggctcaccaggacaacccccacgagggggaggatcaagttagcgaccaggttaagtttaacgtgttccaagggatcatggactcacttttccagtcctttaacgcttccatctccgtcgcctctttccaggagctatctgcttgcgtgttcagctggatagaggagcactgcaaaccccagacgcttagagagattgtgattggggtgctccatcagctgaagaatcagctttactag

SEQ ID NO: 259293 - DNA, 645 bp, Artificial Sequence
  derived and/or modified sequence
atgaccgagcccggcgccagccccgaggacccctgggtgaaggtggagtacgcctacagcgacaacagcctggaccccgacgacgaggacagcgactaccaccaggaggcctacaaggagagctacaaggacagaagaagaagagcccacacccaggccgagcagaagagaagagacgccatcaagagaggctacgacgacctgcagaccatcgtgcccacctgccagcagcaggacttcagcatcggcagccagaagctgagcaaggccatcgtgctgcagaagaccatcgactacatccagttcctgcacaaggagaagaagaagcaggaggaggaggtgagcaccctgagaaaggacgtgaccgccctgaagatcatgaaggtgaactacgagcagatcgtgaaggcccaccaggacaacccccacgagggcgaggaccaggtgagcgaccaggtgaagttcaacgtgttccagggcatcatggacagcctgttccagagcttcaacgccagcatcagcgtggccagcttccaggagctgagcgcctgcgtgttcagctggatcgaggagcactgcaagccccagaccctgagagagatcgtgatcggcgtgctgcaccagctgaagaaccagctgtactag

SEQ ID NO: 259294 - DNA, 1014 bp, Artificial Sequence
  derived and/or modified sequence
atggccgccgccggccccgccgccggccccaccggccccgagcccatgcccagctacgcccagctggtgcagagaggctggggcagcgccctggccgccgccagaggctgcaccgactgcggctggggcctggccagaagaggcctggccgagcacgcccacctggccccccccgagctgctgctgctggccctgggcgccctgggctggaccgccctgagaagcgccgccaccgccagactgttcagacccctggccaagagatgctgcctgcagcccagagacgccgccaagatgcccgagagcgcctggaagttcctgttctacctgggcagctggagctacagcgcctacctgctgttcggcaccgactaccccttcttccacgacccccccagcgtgttctacgactggacccccggcatggccgtgcccagagacatcgccgccgcctacctgctgcagggcagcttctacggccacagcatctacgccaccctgtacatggacacctggagaaaggacagcgtggtgatgctgctgcaccacgtggtgaccctgatcctgatcgtgagcagctacgccttcagataccacaacgtgggcatcctggtgctgttcctgcacgacatcagcgacgtgcagctggagttcaccaagctgaacatctacttcaagagcagaggcggcagctaccacagactgcacgccctggccgccgacctgggctgcctgagcttcggcttcagctggttctggttcagactgtactggttccccctgaaggtgctgtacgccaccagccactgcagcctgagaaccgtgcccgacatccccttctacttcttcttcaacgccctgctgctgctgctgaccctgatgaacctgtactggttcctgtacatcgtggccttcgccgccaaggtgctgaccggccaggtgcacgagctgaaggacctgagagagtacgacaccgccgaggcccagagcctgaagcccagcaaggccgagtag

SEQ ID NO: 259295 - DNA, 1014 bp, Artificial Sequence
  derived and/or modified sequence
atggccgcggcgggacccgccgcaggccccacaggacccgagcccatgccctcctatgcccaattggtacagcgtgggtggggatcagcattggctgccgctagagggtgcaccgactgtggctggggtctggcccggcggggactcgccgagcatgcgcatcttgcacctccagagcttttactgctcgcgctgggggctcttggctggactgctctcaggtccgctgccaccgcacgtctgttcaggcccctcgctaaacgctgttgtctccagccccgggatgccgctaagatgcctgaaagcgcctggaaattcctcttttatttgggatcctggtcttactcagcatacttgctttttgggacagactaccctttctttcacgatccgcctagcgttttttacgactggactcctgggatggctgttcccagagacatagccgccgcatatctcttgcagggatctttctacggtcactcgatttacgccactttatacatggacacctggcgaaaggacagtgtcgtgatgctgttgcaccacgttgtaacacttattcttatagtgtcctcctacgcatttcgttatcacaacgtcgggatcctggtgctgttcctgcacgacattagtgacgtgcaactcgagttcactaagcttaatatctattttaaaagcagaggcggatcctaccacaggttgcatgctctcgcggccgatctgggatgtctgagcttcgggttcagttggttctggttccgactttattggttccccctgaaggtcctatatgccacctcacattgcagtctgcgcactgtgcccgatattcccttttacttctttttcaacgccctgttattgctcctgacgttgatgaatctgtactggtttctgtacatcgtggcattcgcagccaaggtccttaccggtcaggtgcacgagctgaaagatctgcgagaatatgataccgccgaggcacagagtttaaagccatctaaagccgaatag

SEQ ID NO: 259296 - DNA, 1014 bp, Artificial Sequence
  derived and/or modified sequence
atggctgctgctggccctgctgctggccccactggacctgagcccatgcccagctatgcccagctggtgcagaggggctggggcagcgccctggccgccgcccggggctgcacagactgtggctggggcctggcccggcggggcctggccgagcacgcccacctggcccctcctgagctgctgctgctggccctgggcgccctgggctggacagccctgcggtctgctgccacagcccggctcttccggcccctggccaagcgctgctgcctgcagcccagagatgctgccaagatgcctgagagcgcctggaagttcctgttctacctgggctcctggagctacagcgcctacctgctgtttggaacagactaccccttcttccatgaccccccatctgtgttctatgactggaccccaggcatggctgtgccccgggacattgctgctgcctacctgctgcagggcagcttctacggccacagcatctatgccaccctgtacatggacacctggaggaaggacagcgtggtgatgctgctgcaccacgtggtgaccctcatcctgattgtgtcctcctatgccttccgctaccacaacgtgggcatcctggtgctcttcctgcatgacatcagtgatgtgcagctggagttcaccaagctgaacatctacttcaagagcagaggaggcagctaccaccggctgcacgccctggccgctgacctgggctgcctgagctttggcttctcctggttctggttccggctgtactggttccccctgaaggtgctgtatgccaccagccactgcagcctgaggacagtgcctgacatccccttctacttcttcttcaatgccctgctgctgctgctgaccctgatgaacctgtactggttcctgtacatcgtggcctttgctgccaaggtgctgaccggccaggtgcatgagctgaaggacctgcgggagtatgacacagctgaggcccagagcctgaagcccagcaaggccgagtag

SEQ ID NO: 259297 - DNA, 1014 bp, Artificial Sequence
  derived and/or modified sequence
atggccgccgccggccccgccgccggccccaccggccccgagcccatgccatcttacgctcagttggtacaacgcggctggggctccgctctggcagcagctagaggctgcaccgactgtggatggggcctggcccgccgtgggctggccgaacacgcccacctagctccaccggaactgctacttctggctcttggcgcattaggctggactgccttgaggtcagctgctacagcgcgcctctttaggccactggcgaagcggtgttgcctccaaccccgcgacgcggcgaagatgcctgagtctgcttggaaattcctattttacctcgggtcttggagttactcggcgtacctgctgttcggcactgattacccattcttccacgaccccccttcagtgttctatgattggaccccaggaatggctgtgccccgcgatatcgctgcagcttacttgctccagggaagcttttacggccattctatatacgcaactctctacatggatacttggcgaaaggactcggtggtaatgcttctgcatcacgtggtgacactgatcctgatcgtttcttcatatgcttttcggtaccataacgtgggcattttggtactttttctgcacgatatcagtgacgtgcagctcgaatttaccaaactcaacatttatttcaaatcccgaggaggctcttatcacaggctgcatgctctggcagcggacctgggttgcttgtccttcggatttagctggttctggtttcggctgtattggttccccctgaaagtcctctatgccaccagccattgctcactgcgcaccgtgccagacattcctttttacttcttcttcaacgctcttctattgctcctgacccttatgaatctgtactggttcctgtacatagtagccttcgcagccaaggtgctgactgggcaggtccacgagctaaaggatttgagggagtacgacaccgcagaagcccaatcacttaagccttccaaagccgaatag

SEQ ID NO: 259298 - DNA, 1014 bp, Artificial Sequence
  derived and/or modified sequence
atggccgctgcagggcctgctgcaggcccaacaggaccagaacctatgccaagctacgctcaactggtacaacggggatggggctctgctcttgctgccgctaggggttgtaccgactgtggctgggggctggctcggcgtgggctggcggagcacgcccacctcgcccctcccgagctgctgttacttgccctcggggcacttggctggactgcgctgcggtcagcagccaccgcgagactgttcagacccctcgccaagcgctgctgtttgcaacccagggatgccgcaaagatgcctgagagcgcttggaaattcttattttatctggggtcctggtcgtactctgcgtatctactgtttggtacagactatcccttctttcacgaccccccatcagtattttatgactggacacctggcatggcagtcccccgagacatcgctgcagcttacctgctgcagggatccttctatggtcatagcatatatgcaaccttatatatggacacatggcgcaaggattccgtggtcatgctgctacaccacgtcgttacgttgatcctcatcgtcagtagctatgcttttagataccataatgtgggcatcctggtcctgttcctacacgatattagcgatgttcagctggagtttacaaagctgaacatctatttcaagtctcggggaggatcctaccacagacttcatgcactagccgcagaccttggctgcctctcttttggttttagttggttctggttccggctgtattggtttccactgaaggtgttatacgccacatctcactgttccctgagaacggtgcctgatattcccttttactttttctttaacgcgctattactgctcctgactctgatgaacctgtattggtttctgtatatcgtcgcctttgctgctaaggtgcttactgggcaggtccacgaattgaaagacttaagggagtacgatacggctgaagcccaaagcttgaagccatcaaaagccgaatag

SEQ ID NO: 259299 - DNA, 2099 bp, Artificial Sequence
  derived and/or modified sequence
acgcggggcgcgcggctccgtcggctaccgcgggcgggcgcaggcgacgggcacggcgggcgagcgggcggtatggcggcggcggggcccgcggcggggccgacggggcccgagcccatgccgagctacgcgcagctagtgcagcgcggctggggcagcgcgctggcggcggcgcggggctgcacggactgcggctgggggctggcgcgtcgcggcctggctgagcacgcgcacctggcgccgcccgagctgctgctgctggcgctcggcgcgctgggctggaccgccctgcgctccgcggccactgcgcgcctctttcggcccctggcgaagcggtgctgcctccagcccagagatgccgccaagatgcccgagagcgcttggaagtttctcttctacctgggcagctggagctacagtgcctacctgctgtttggcaccgactaccccttcttccatgacccaccatctgtcttctacgactggacgccgggcatggcagtgccacgggacattgcagccgcctacctgctccagggaagcttctatggccactccatctacgctacgctatacatggacacctggcgcaaggactcggtggtcatgctgctccaccacgtggtcactctcatcctcatcgtctcctcctacgccttccggtaccacaatgtgggcatccttgtgctcttcctgcacgatatcagtgacgtgcagcttgagttcaccaagctcaacatttacttcaagtcccgcggcggctcctaccatcggctgcatgccttggcagcagacttgggctgcctcagcttcggcttcagctggttctggttccgcctctactggttcccgctcaaggtcctgtatgccaccagtcactgcagtctgcgcacggtgcctgacatccccttctacttcttcttcaatgcgctcctgctgctgctcacccttatgaacctctactggttcctgtacatcgtggcgtttgcagccaaggtgttgacaggccaggtgcacgagctgaaggacctgcgggagtatgacacagccgaggcccagagcctgaagcccagcaaagccgagtgagtgtggaggggcccgcaccccgcgttccctcctttagtgtcacccgtccaagcgtgttcgtgggcaggcccccaagacccagcagcagatgaggccgacgcggatgctgccccccaagcctactccaaaacagagactgcaataaaggcgtggacgatgtggccagtaccctgaaggacaggacagtgaggaaggggagggagaggctggggaggggcaggcagggcgacaggcagggtctcagcggtagggacactgagggccaggcctagtggctggtgtggcgggagtggcgagccagggccctgtgggtggtgaggagtagttgctggccagcctggatgacgacctctgacccatgtcgccactggagctggtggcagtggggctggggaggaaggaacgccaagggccacagagagaacccaggctccatctgggccgagacatcctggcctctgagtttgacaggggagcccactgcccggccaaacaggagctggggctgggagctcagactcagtccagcccaggtgggagtcctggggaaggagatagcccacgagcctcaccagccctgggtgacagccagatggtgtccgaagccccaggcctggggcaggcagggggtgtctgggccagggatgaacggaggccaaactgggtaacaagcagagtcgggtgtgcagtgtctcataggcaacgtgaggagtgtttgagcaggagccggggcaggaggttgtggaaggccctggaaggtgccgaccagccaggccctctgatttggccggtgggggccatcggtgacgtgggaacgatggtttcagggaagcagtggctcagagctccgtgacgttttttggaacgggaggtgcgagatgcagacatttaacacatccggggctgtagccaggcagaggagcgtcagaccccccaccctgtttggaagggagaacccatcagattcgccttgggtgtagatgaaacagaaataaaagaatcaaagacgactc

SEQ ID NO: 259300 - DNA, 1897 bp, Artificial Sequence
  derived and/or modified sequence
gagaatgtttcattgagcctacgcctcctgaatgcgggagggccacgggatggtcccaagactgtgccaaggcgtgccaggcctcgggtccttgagaaggagcgagggctccaagaacgcccctggcgaagcggtgctgcctccagcccagagatgccgccaagatgcccgagagcgcttggaagtttctcttctacctgggcagctggagctacagtgcctacctgctgtttggcaccgactaccccttcttccatgacccaccatctgtcttctacgactggacgccgggcatggcagtgccacgggacattgcagccgcctacctgctccagggaagcttctatggccactccatctacgctacgctatacatggacacctggcgcaaggactcggtggtcatgctgctccaccacgtggtcactctcatcctcatcgtctcctcctacgccttccggtaccacaatgtgggcatccttgtgctcttcctgcacgatatcagtgacgtgcagcttgagttcaccaagctcaacatttacttcaagtcccgcggcggctcctaccatcggctgcatgccttggcagcagacttgggctgcctcagcttcggcttcagctggttctggttccgcctctactggttcccgctcaaggtcctgtatgccaccagtcactgcagtctgcgcacggtgcctgacatccccttctacttcttcttcaatgcgctcctgctgctgctcacccttatgaacctctactggttcctgtacatcgtggcgtttgcagccaaggtgttgacaggccaggtgcacgagctgaaggacctgcgggagtatgacacagccgaggcccagagcctgaagcccagcaaagccgagtgagtgtggaggggcccgcaccccgcgttccctcctttagtgtcacccgtccaagcgtgttcgtgggcaggcccccaagacccagcagcagatgaggccgacgcggatgctgccccccaagcctactccaaaacagagactgcaataaaggcgtggacgatgtggccagtaccctgaaggacaggacagtgaggaaggggagggagaggctggggaggggcaggcagggcgacaggcagggtctcagcggtagggacactgagggccaggcctagtggctggtgtggcgggagtggcgagccagggccctgtgggtggtgaggagtagttgctggccagcctggatgacgacctctgacccatgtcgccactggagctggtggcagtggggctggggaggaaggaacgccaagggccacagagagaacccaggctccatctgggccgagacatcctggcctctgagtttgacaggggagcccactgcccggccaaacaggagctggggctgggagctcagactcagtccagcccaggtgggagtcctggggaaggagatagcccacgagcctcaccagccctgggtgacagccagatggtgtccgaagccccaggcctggggcaggcagggggtgtctgggccagggatgaacggaggccaaactgggtaacaagcagagtcgggtgtgcagtgtctcataggcaacgtgaggagtgtttgagcaggagccggggcaggaggttgtggaaggccctggaaggtgccgaccagccaggccctctgatttggccggtgggggccatcggtgacgtgggaacgatggtttcagggaagcagtggctcagagctccgtgacgttttttggaacgggaggtgcgagatgcagacatttaacacatccggggctgtagccaggcagaggagcgtcagaccccccaccctgtttggaagggagaacccatcagattcgccttgggtgtagatgaaacagaaataaaagaatcaaagacgactc

SEQ ID NO: 259301 - protein, 112 aa, Artificial Sequence
  derived and/or modified sequence
MGLETEKADVQLFMDDDSYSHHSGLEYADPEKFADSDQDRDPHRLNSHLKDFNAFCKDLPNGSAFSADNMEECDRCYHCSIVYERRTMLLFCQPATEPGLNTWTPGLEIGIL

SEQ ID NO: 259302 - DNA, 339 bp, Artificial Sequence
  derived and/or modified sequence
atgggcctcgaaaccgagaaagctgacgtgcaactgttcatggacgacgattcttacagtcaccactctgggctggagtacgccgaccccgaaaaatttgcggactcggaccaagatagagacccgcaccgcctgaattctcatctcaaagattttaatgcattttgcaaagatctccctaatggcagtgcattttctgccgataacatggaagaatgcgatcggtgctatcactgcagcattgtgtatgagagacggaccatgttgctcttttgtcagcctgccacagaacctggacttaacacctggacgcctggactagaaattggcattctttag

SEQ ID NO: 259303 - DNA, 339 bp, Artificial Sequence
  derived and/or modified sequence
atgggcctggagacagagaaggcagatgtgcagctgttcatggatgatgacagctacagccaccacagcggcctggagtatgctgaccctgagaagtttgctgacagcgaccaggaccgggacccccaccggctgaacagccacctgaaggacttcaatgccttctgcaaggacctgcccaatggaagtgccttctctgctgacaacatggaggagtgtgaccgctgctaccactgcagcatcgtgtatgaaagaaggaccatgctgctcttctgccagcctgccacagagcccggcctgaacacctggaccccaggcctggagatcggcatcctgtag

SEQ ID NO: 259304 - DNA, 339 bp, Artificial Sequence
  derived and/or modified sequence
atgggcctggagaccgagaaggccgacgtgcagctgttcatggacgatgacagttactcccatcatagtggcctcgagtacgcagatccagaaaagttcgccgatagcgatcaggacagagatccccacaggctgaattctcacctgaaggattttaacgctttttgtaaggatttgcctaatgggtccgcgttttcagccgacaacatggaagagtgcgacaggtgttaccattgctcgatcgtctatgaacgcaggaccatgctgctcttttgccaacctgcaaccgagcctgggctaaatacttggaccccaggcctcgaaatcggcattttatag

SEQ ID NO: 259305 - DNA, 339 bp, Artificial Sequence
  derived and/or modified sequence
atgggacttgagacggagaaggcggacgtacaacttttcatggatgacgacagctattctcatcatagtggtctcgaatatgccgaccctgaaaagtttgccgattcagatcaggatagggacccacaccggctaaatagccacctgaaggatttcaatgctttctgcaaagacctccctaatggctcagccttttcggctgacaacatggaagaatgtgaccggtgctaccattgttcaatcgtctatgaaaggaggaccatgctgctcttctgtcagcctgctactgagccgggactgaacacctggacccccggactggagatcggcattctctag

SEQ ID NO: 259306 - DNA, 776 bp, Artificial Sequence
  derived and/or modified sequence
accgcgccagccgggctgcagcggccgcgcaccaaggctgcgatggggctggagacggagaaggcggacgtacagctcttcatggacgacgactcctacagccaccacagcggcctcgagtacgccgaccccgagaagttcgcggactcggaccaggaccgggatccccaccggctcaactcgcatctcaaggattttaatgccttttgtaaagacctgcctaatggttctgccttcagtgcagacaatatggaagagtgtgacagatgttatcattgctccattgtgtacgagcgtaggacgatgcttctcttctgtcagcctgcaactgagccaggattgaatacttggaccccaggtctggagattgggatactgtaatacttctttgttattataacataaaagcaccactgttctgttcatttcctagctgttctaattaagaaaactattaagatgagcaaccacatttagaaatgtttattgacaggtcttttcaaataatgcttttctaattaatagccaaagatttcatatctaactttgtaaccagaattatacagtaagttgacaccacttagatttaaaggcagacagttttgctttagtacaatagtatacattttataatgatgaacttataatgattaagggacatttctataaaaatactacaatagttttatgcacaacttcccattaaaaatgagatttcttatttgtttgtctgtttttactctgggagtaatactttttaaattacctttacatat

SEQ ID NO: 259307 - DNA, 339 bp, Artificial Sequence
  derived and/or modified sequence
atgggcctggagaccgagaaggccgacgtgcagctgttcatggacgacgacagctacagccaccacagcggcctggagtacgccgaccccgagaagttcgccgacagcgaccaggacagagacccccacagactgaacagccacctgaaggacttcaacgccttctgcaaggacctgcccaacggcagcgccttcagcgccgacaacatggaggagtgcgacagatgctaccactgcagcatcgtgtacgagagaagaaccatgctgctgttctgccagcccgccaccgagcccggcctgaacacctggacccccggcctggagatcggcatcctgtag

SEQ ID NO: 259308 - protein, 255 aa, Artificial Sequence
  derived and/or modified sequence
MALMQELYSTPASRLDSFVAQWLQPHREWKEEVLDAVRTVEEFLRQEHFQGKRGLDQDVRVLKVVKVGSFGNGTVLRSTREVELVAFLSCFHSFQEAAKHHKDVLRLIWKTMWQSQDLLDLGLEDLRMEQRVPDALVFTIQTRGTAEPITVTIVPAYRALGPSLPNSQPPPEVYVSLIKACGGPGNFCPSFSELQRNFVKHRPTKLKSLLRLVKHWYQQAHHPGSGRPHPQRGRRVQMGHRCSEGLPVPETGLLL

SEQ ID NO: 259309 - DNA, 768 bp, Artificial Sequence
  derived and/or modified sequence
atggccctgatgcaagaactgtactctacacccgcttctcggctcgattctttcgttgcccagtggctccagccacacagggagtggaaagaggaagtcttggacgctgtgaggaccgttgaggagttcctcaggcaagagcactttcagggcaaacgggggctggaccaggatgtcagagttttgaaagtggtgaaagtgggaagcttcggaaatggaaccgttctccgaagcacacgtgaggtagagcttgtagcttttctcagctgtttccactccttccaggaggccgccaaacaccataaagatgtactgaggctgatttggaaaactatgtggcagtcgcaggacctgctggatcttggactggaggatctaaggatggagcagagggtccctgacgcacttgtgttcactattcagacccgggggaccgccgaaccgatcaccgtaaccatcgttcctgcctaccgggccctgggaccatctttgccgaattcacagccacctcctgaggtttacgtgtcattgatcaaggcctgcggtggcccggggaacttctgcccctccttttccgaactccagcgtaactttgtaaagcaccggcccacaaagctcaagtccctcctccgcctcgtcaaacactggtaccagcaagctcatcaccctggcagcggcagaccccaccctcagagaggacgacgcgttcagatgggtcatcggtgtagcgagggcctgccagtccccgagacgggactgctcctgtag

SEQ ID NO: 259310 - DNA, 768 bp, Artificial Sequence
  derived and/or modified sequence
atggccctgatgcaggagctgtacagcaccccagccagccggctggacagctttgtggcccagtggctgcagccccaccgggagtggaaggaggaggtgctggatgctgtgaggacagtggaggagttcctgcggcaggagcacttccagggcaagaggggcctggaccaggatgtgcgggtgctgaaggtggtgaaggtgggcagctttggaaatggcaccgtgctgcggagcacccgggaggtggagctggtggccttcctgagctgcttccacagcttccaggaggccgccaagcaccacaaggatgtgctgcggctcatctggaagaccatgtggcagagccaggacctgctggacctgggcctggaggacctgaggatggagcagagggtgcctgatgccctggtgttcaccatccagacccggggcacagctgagcccatcaccgtgaccatcgtgcctgcctaccgggccctgggccccagcctgcccaacagccagcccccacctgaggtgtatgtgtccctcatcaaggcctgtggcggccctggcaacttctgccccagcttcagcgagctgcagaggaactttgtgaagcaccggcccaccaagctgaagagcctgctgcggctggtgaagcactggtaccagcaggcccaccaccctggcagcggccggccccacccccagaggggccggcgggtgcagatgggccaccgctgcagcgagggcctgcctgtgcctgagaccggcctgctgctgtag

SEQ ID NO: 259311 - DNA, 768 bp, Artificial Sequence
  derived and/or modified sequence
atggccctgatgcaggagctgtacagcacccccgccagccggctggactctttcgtggctcagtggctacaaccccatcgggagtggaaagaggaagttctggacgcagtaaggactgtggaagagttccttcgccaggagcactttcaggggaaacggggccttgatcaggacgtccgggtgctgaaggtcgtgaaagtgggttcgtttggcaatggaaccgtcctacgatccactcgggaagttgaacttgttgcttttctgtcatgctttcactccttccaagaagccgccaaacatcataaggacgttctgaggctgatatggaaaacaatgtggcagagtcaggacctactggaccttgggctggaagaccttaggatggagcagagagtccccgacgctctggtgttcaccatccagacgcggggcacggccgagcccattactgttacaatcgtccctgcctacagagcactcggcccttccctccccaattcccaaccgcctccagaagtgtatgtgagtttaatcaaggcatgcgggggacccggaaacttttgccctagttttagcgaactacagagaaactttgtaaaacaccggccgaccaaactaaagtcactgttgcgactagtgaaacattggtaccagcaagcacatcatcctggatcgggaaggccccacccacaacgcggaagaagggtgcagatggggcatagatgttccgagggattgcccgtgcctgaaaccgggcttctgctatag

SEQ ID NO: 259312 - DNA, 768 bp, Artificial Sequence
  derived and/or modified sequence
atggctctgatgcaggagctgtactccacccctgcctcccgacttgatagtttcgtggcccaatggttgcaaccgcacagagaatggaaggaagaagttttggatgccgttcggaccgtggaagagttcttgagacaagagcattttcaggggaagcgaggactggaccaggatgtgagggtactgaaggttgtgaaggtagggagttttggaaatggtacagtgcttcgtagtaccagggaggtggagctggtagccttcctatcctgcttccactcctttcaagaggctgccaagcaccataaagacgtccttagactgatttggaagacaatgtggcagtcacaggacctacttgaccttgggctggaagacctgaggatggagcagagagtgcccgacgccctggtttttaccatccagacaagagggacagctgaaccaataaccgtgaccatcgtgcccgcatacagagctcttggccctagcttaccaaattcacagccgcctcctgaagtatatgtctctctgatcaaggcttgtggcggacccggaaacttctgtcccagcttttctgagttgcagcggaactttgtgaagcaccgtcctaccaaacttaaaagcctgctgagactcgtaaaacactggtaccagcaggctcaccatcctggatcgggtcgcccacatcctcagagggggagaagggtccaaatgggacatcgctgttccgaaggactgcccgtgccagagacgggcctgcttctgtag

SEQ ID NO: 259313 - DNA, 1492 bp, Artificial Sequence
  derived and/or modified sequence
tctccaagaagggggacctggagtcagcccgtcacacctggtttcctctctgctagggtccctcctcccacagagcactggagggcagctgaggaggagctaccttaaaaaaggaggtgtgtgccagggagctgggtaggagcctggctatatatctgcccagcagcggtactctcgggacagagatggcactgatgcaggaactgtatagcacaccagcctccaggctggactccttcgtggctcagtggctgcagccccaccgggagtggaaggaagaggtgctagacgctgtgcggaccgtggaggagtttctgaggcaggagcatttccaggggaagcgtgggctggaccaggatgtgcgggtgctgaaggtagtcaaggtgggctccttcgggaatggcacggttctcaggagcaccagagaggtggagctggtggcgtttctgagctgtttccacagcttccaggaggcagccaagcatcacaaagatgttctgaggctgatatggaaaaccatgtggcaaagccaggacctgctggacctcgggctcgaggacctgaggatggagcagagagtccccgatgctctcgtcttcaccatccagaccagggggactgcggagcccatcacggtcaccattgtgcctgcctacagagccctggggccttctcttcccaactcccagccaccccctgaggtctatgtgagcctgatcaaggcctgcggtggtcctggaaatttctgcccatccttcagcgagctgcagagaaatttcgtgaaacatcggccaactaagctgaagagcctcctgcgcctggtgaaacactggtaccagcaggcccatcatcctggatccggccgaccccaccctcaacgtggcagaagggtacagatgggacatcgttgctcagagggcctcccagtgcctgaaacaggactgttgctatgacaacagggagaaccccatctccagctggaacgtgaagagggcacgagacatccacttgacagtggagcagaggggttacccagatttcaacctcatcgtgaacccttatgagcccataaggaaggttaaagagaaaatccggaggaccaggggctactctggcctgcagcgtctgtccttccaggttcctggcagtgagaggcagcttctcagcagcaggtgctccttagccaaatatgggatcttctcccacactcacatctatctgctggagaccatcccctccgagatccaggtcttcgtgaagaatcctgatggtgggagctacgcctatgccatcaaccccaacagcttcatcctgggtctgaagcagcagattgaagaccagcaggggcttcctaaaaagcagcagcagctggaattccaaggccaagtcctgcaggactggttgggtctggggatctatggcatccaagacagtgacactctcatcctctcgaagaagaaaggagaggctctgtttccagccagttagtttt

SEQ ID NO: 259314 - DNA, 768 bp, Artificial Sequence
  derived and/or modified sequence
atggccctgatgcaggagctgtacagcacccccgccagcagactggacagcttcgtggcccagtggctgcagccccacagagagtggaaggaggaggtgctggacgccgtgagaaccgtggaggagttcctgagacaggagcacttccagggcaagagaggcctggaccaggacgtgagagtgctgaaggtggtgaaggtgggcagcttcggcaacggcaccgtgctgagaagcaccagagaggtggagctggtggccttcctgagctgcttccacagcttccaggaggccgccaagcaccacaaggacgtgctgagactgatctggaagaccatgtggcagagccaggacctgctggacctgggcctggaggacctgagaatggagcagagagtgcccgacgccctggtgttcaccatccagaccagaggcaccgccgagcccatcaccgtgaccatcgtgcccgcctacagagccctgggccccagcctgcccaacagccagcccccccccgaggtgtacgtgagcctgatcaaggcctgcggcggccccggcaacttctgccccagcttcagcgagctgcagagaaacttcgtgaagcacagacccaccaagctgaagagcctgctgagactggtgaagcactggtaccagcaggcccaccaccccggcagcggcagaccccacccccagagaggcagaagagtgcagatgggccacagatgcagcgagggcctgcccgtgcccgagaccggcctgctgctgtag

SEQ ID NO: 259315 - protein, 585 aa, Artificial Sequence
  derived and/or modified sequence
MFSCFCFSLQDNSFSSTTVTECDEDPVSLHEDQTDCSSLRDENNKENYPDAGALVEEHAPPSWEPQQQNVEATVLVDSVLRPSMGNFKSRKPKSIFKAESGRSHGESQETEHVVSSQSECQVRAGTPAHESPQNNAFKCQETVRLQPRIDQRTAISPKDAFETRQDLNEEEAAQVHGVKDPAPASTQSVLADGTDSADPSPVHKDGQNEADSAPEDLHSVGTSRLLYHITDGDNPLLSPRCSIFSQSQRFNLDPESAPSPPSTQQFMMPRSSSRCSCGDGKEPQTITQLTKHIQSLKRKIRKFEEKFEQEKKYRPSHGDKTSNPEVLKWMNDLAKGRKQLKELKLKLSEEQGSAPKGPPRNLLCEQPTVPRENGKPEAAGPEPSSSGEETPDAALTCLKERREQLPPQEDSKVTKQDKNLIKPLYDRYRIIKQILSTPSLIPTIQEEEDSDEDRPQGSQQPSLADPASHLPVGDHLTYSNETEPVRALLPDEKKEVKPPALSMSNLHEATMPVLLDHLRETRADKKRLRKALREFEEQFFKQTGRSPQKEDRIPMADEYYEYKHIKAKLRLLEVLISKQDVAKTI

SEQ ID NO: 259316 - protein, 25 aa, Artificial Sequence
  derived and/or modified sequence
MGNFKSRKPKSIFKAESGRSHGESQ

SEQ ID NO: 259317 - DNA, 1758 bp, Artificial Sequence
  derived and/or modified sequence
atgttcagctgcttctgcttcagcctgcaggacaacagcttcagcagcaccaccgtgaccgagtgcgacgaggaccccgtgagcctgcacgaggaccagaccgactgcagcagcctgagagacgagaacaacaaggagaactaccccgacgccggcgccctggtggaggagcacgccccccccagctgggagccccagcagcagaacgtggaggccaccgtgctggtggacagcgtgctgagacccagcatgggcaacttcaagagcagaaagcccaagagcatcttcaaggccgagagcggcagaagccacggcgagagccaggagaccgagcacgtggtgagcagccagagcgagtgccaggtgagagccggcacccccgcccacgagagcccccagaacaacgccttcaagtgccaggagaccgtgagactgcagcccagaatcgaccagagaaccgccatcagccccaaggacgccttcgagaccagacaggacctgaacgaggaggaggccgcccaggtgcacggcgtgaaggaccccgcccccgccagcacccagagcgtgctggccgacggcaccgacagcgccgaccccagccccgtgcacaaggacggccagaacgaggccgacagcgcccccgaggacctgcacagcgtgggcaccagcagactgctgtaccacatcaccgacggcgacaaccccctgctgagccccagatgcagcatcttcagccagagccagagattcaacctggaccccgagagcgcccccagcccccccagcacccagcagttcatgatgcccagaagcagcagcagatgcagctgcggcgacggcaaggagccccagaccatcacccagctgaccaagcacatccagagcctgaagagaaagatcagaaagttcgaggagaagttcgagcaggagaagaagtacagacccagccacggcgacaagaccagcaaccccgaggtgctgaagtggatgaacgacctggccaagggcagaaagcagctgaaggagctgaagctgaagctgagcgaggagcagggcagcgcccccaagggcccccccagaaacctgctgtgcgagcagcccaccgtgcccagagagaacggcaagcccgaggccgccggccccgagcccagcagcagcggcgaggagacccccgacgccgccctgacctgcctgaaggagagaagagagcagctgcccccccaggaggacagcaaggtgaccaagcaggacaagaacctgatcaagcccctgtacgacagatacagaatcatcaagcagatcctgagcacccccagcctgatccccaccatccaggaggaggaggacagcgacgaggacagaccccagggcagccagcagcccagcctggccgaccccgccagccacctgcccgtgggcgaccacctgacctacagcaacgagaccgagcccgtgagagccctgctgcccgacgagaagaaggaggtgaagccccccgccctgagcatgagcaacctgcacgaggccaccatgcccgtgctgctggaccacctgagagagaccagagccgacaagaagagactgagaaaggccctgagagagttcgaggagcagttcttcaagcagaccggcagaagcccccagaaggaggacagaatccccatggccgacgagtactacgagtacaagcacatcaaggccaagctgagactgctggaggtgctgatcagcaagcaggacgtggccaagaccatctag

SEQ ID NO: 259318 - DNA, 1509 bp, Artificial Sequence
  derived and/or modified sequence
atgggcaacttcaagagcagaaagcccaagagcatcttcaaggccgagagcggcagaagccacggcgagagccaggagaccgagcacgtggtgagcagccagagcgagtgccaggtgagagccggcacccccgcccacgagagcccccagaacaacgccttcaagtgccaggagaccgtgagactgcagcccagaatcgaccagagaaccgccatcagccccaaggacgccttcgagaccagacaggacctgaacgaggaggaggccgcccaggtgcacggcgtgaaggaccccgcccccgccagcacccagagcgtgctggccgacggcaccgacagcgccgaccccagccccgtgcacaaggacggccagaacgaggccgacagcgcccccgaggacctgcacagcgtgggcaccagcagactgctgtaccacatcaccgacggcgacaaccccctgctgagccccagatgcagcatcttcagccagagccagagattcaacctggaccccgagagcgcccccagcccccccagcacccagcagttcatgatgcccagaagcagcagcagatgcagctgcggcgacggcaaggagccccagaccatcacccagctgaccaagcacatccagagcctgaagagaaagatcagaaagttcgaggagaagttcgagcaggagaagaagtacagacccagccacggcgacaagaccagcaaccccgaggtgctgaagtggatgaacgacctggccaagggcagaaagcagctgaaggagctgaagctgaagctgagcgaggagcagggcagcgcccccaagggcccccccagaaacctgctgtgcgagcagcccaccgtgcccagagagaacggcaagcccgaggccgccggccccgagcccagcagcagcggcgaggagacccccgacgccgccctgacctgcctgaaggagagaagagagcagctgcccccccaggaggacagcaaggtgaccaagcaggacaagaacctgatcaagcccctgtacgacagatacagaatcatcaagcagatcctgagcacccccagcctgatccccaccatccaggaggaggaggacagcgacgaggacagaccccagggcagccagcagcccagcctggccgaccccgccagccacctgcccgtgggcgaccacctgacctacagcaacgagaccgagcccgtgagagccctgctgcccgacgagaagaaggaggtgaagccccccgccctgagcatgagcaacctgcacgaggccaccatgcccgtgctgctggaccacctgagagagaccagagccgacaagaagagactgagaaaggccctgagagagttcgaggagcagttcttcaagcagaccggcagaagcccccagaaggaggacagaatccccatggccgacgagtactacgagtacaagcacatcaaggccaagctgagactgctggaggtgctgatcagcaagcaggacgtggccaagaccatctag

SEQ ID NO: 259319 - DNA, 78 bp, Artificial Sequence
  derived and/or modified sequence
atgggcaacttcaagagcagaaagcccaagagcatcttcaaggccgagagcggcagaagccacggcgagagccagtag

SEQ ID NO: 259320 - DNA, 1758 bp, Artificial Sequence
  derived and/or modified sequence
atgtttagttgcttttgtttcagcctgcaggacaatagtttttcttctacaaccgtgactgaatgtgatgaggatcccgtctctctgcatgaggatcagacggattgtagttctttgcgggacgagaataataaggaaaactatcccgatgccggcgcgctagtagaagaacacgctccaccatcatgggagcctcagcagcaaaatgttgaagcaaccgtgctggttgattccgtgcttcgcccctccatgggtaacttcaaaagcaggaaaccaaagtctatatttaaagctgagtccggccggagtcacggcgagtctcaggagacagagcacgtggtgtcttctcagtccgaatgccaggtcagggcgggcacgcccgctcacgaatctccacagaacaacgcctttaagtgccaggagacagtaagactacaaccccggatagaccagcgtactgcgataagcccaaaagacgctttcgagaccagacaggatctgaatgaagaagaagcagctcaggtgcacggtgtcaaagaccccgcccctgcatctacacaatcagtacttgccgatggtacggatagtgctgatccatccccagtccataaggatggtcaaaatgaggctgattctgctccagaggacctgcacagcgtgggaactagccgtctgttgtatcacattactgatggtgacaatcctctattatctccacggtgttccatcttcagtcagtcacagcggtttaacctggatcctgagtccgcgccctctcctcctagtacccagcaatttatgatgccaaggtcatcaagcaggtgcagctgtggcgatgggaaggagcctcagacaattacacaactcactaaacacatacagtcattaaagagaaaaatccggaaatttgaagagaagtttgaacaagaaaagaagtaccgcccaagccatggtgacaaaacctccaatcccgaggttctcaaatggatgaacgatttagccaaggggaggaaacagttgaaagaattgaagctgaagctgtccgaggagcaagggtccgccccaaagggccctcccagaaatctcctttgtgaacaacccacagtgcctagagaaaacggcaaaccggaggccgccggaccagaaccatcatcatccggagaggagacgcccgatgcagccctgacctgtctaaaggaacggagagagcagttaccccctcaggaagactcaaaagtcactaaacaggacaaaaacctcatcaaaccactctatgaccgctaccggattataaaacagattttaagcaccccctccctaatcccaactatccaggaggaagaggattccgacgaggataggcctcagggatcccaacaaccttccttggctgatcccgctagccaccttccagtcggggaccacctgacgtactccaatgagaccgaaccagttcgtgctctgctgcctgacgagaagaaggaggtcaaaccacctgctttatctatgtccaacttgcatgaagcaacaatgccagtgctcctcgaccacttgcgcgaaaccagggccgacaagaagaggcttagaaaggcactgagggaattcgaggaacagttcttcaagcagacggggagatctccacagaaggaggaccggatccccatggcggacgagtactatgaatacaagcacataaaggcaaagttgaggctgctggaggtactcatctcaaaacaggatgtggcaaaaaccatctag

SEQ ID NO: 259321 - DNA, 1509 bp, Artificial Sequence
  derived and/or modified sequence
atgggaaacttcaaatcaaggaaacccaagtccatttttaaggcggaatcagggcggagccacggcgaatcccaggaaacagagcatgttgtgtcctctcagtcagaatgccaggttcgcgccgggacacctgcgcatgagagtccccaaaataacgcattcaaatgccaggaaaccgtgagactccagccaagaatcgatcagaggaccgctatatcccccaaggatgccttcgagacccgacaagacctgaatgaagaagaggccgcccaagtccatggagttaaggatccagcaccagctagtactcaaagcgttttggccgacggaaccgattcggccgacccgtcaccagtgcacaaggatggacagaacgaagccgatagtgcacctgaggacctgcattctgtgggtactagtcggctgctgtatcatataactgatggggacaacccattactgtcacctaggtgttcaattttttcgcagtcccagaggttcaatctggaccccgagagcgctccttccccacctagcacccaacaattcatgatgcctaggtcttcctctcggtgtagctgtggtgatggtaaggaaccacagactattacgcaactcactaagcacattcagtctcttaaaaggaaaatcaggaagttcgaagagaaatttgagcaggagaaaaagtatcgcccatcacacggtgataagacctcaaatcccgaggtgctgaagtggatgaatgacctggccaaggggagaaagcagctcaaagagctgaagctgaagctatccgaagaacagggatctgcgccaaagggtccacctcggaaccttctttgtgagcagcctaccgtgccacgcgaaaacgggaagcctgaagccgccggcccagaacccagctcaagcggcgaggagacgcccgacgcagccttaacttgcctaaaagagaggcgagaacagttacctcctcaagaggacagcaaagtcacaaaacaggacaagaatctgataaaacctctgtatgacagatatcgcatcatcaagcagatcctgtctacgccctccttaattccgactatacaggaggaagaagatagtgacgaagaccgcccccaaggcagccaacagcctagtctcgctgatcctgccagccacctccctgttggagaccatctaacctactctaacgagactgagcctgtccgggcactgctcccagatgagaagaaggaagtaaaacctcccgccctttcaatgtctaatctgcacgaagcaacaatgcctgtattactggaccacttgcgcgaaaccagggccgataaaaagcggttacgtaaggccctgagggagttcgaggagcagtttttcaaacagaccggccgctctcctcagaaagaggaccgcatccctatggcggacgaatactatgagtataagcacattaaagcgaagctgcggctgttagaagtactgatctcgaagcaggacgtcgcgaaaacaatatag

SEQ ID NO: 259322 - DNA, 78 bp, Artificial Sequence
  derived and/or modified sequence
atggggaacttcaagtcacggaagccgaagtccatttttaaagctgagtcaggaaggagccacggggaatcacagtag

SEQ ID NO: 259323 - DNA, 3327 bp, Artificial Sequence
  derived and/or modified sequence
cggagacttgccttgcaatgccatgtttgtgtatgtgctcactcccggagagcaatcagggagacggctccccggccagacttggctgatgttttcttgtttctgtttcagccttcaggataattccttcagcagcaccactgtaacagagtgtgacgaagatccagtctctctacatgaagaccagactgattgctccagtctcagagatgaaaacaataaagagaactaccccgacgcaggggctctggtagaagagcacgcgccgccctcttgggagccgcagcagcagaatgtagaggcgaccgtgctggtggacagcgtattgcgacccagcatgggcaacttcaagtccaggaagcccaagtccatcttcaaagcggagagcgggaggagccacggagaaagtcaggagacagagcatgtggtatccagccagtcagagtgtcaggtgagagcaggaacaccagctcatgagagtccacaaaacaatgccttcaagtgccaagaaacagtgcgacttcaaccaagaatagaccagaggactgccatttcgccaaaggatgcttttgaaactcggcaggacttaaatgaggaagaagctgctcaggtgcatggagtcaaggacccggcgccagcatcaacccagagcgtgcttgccgatgggacagattctgcagacccctcaccagtccacaaagatgggcagaatgaggccgacagtgcaccagaagacctccactctgtggggaccagcaggctgctctatcacatcactgatggtgataacccactgctgtcgccacgatgctccatcttcagccaaagccagagattcaacttagaccccgagtcagccccatctccacccagcactcagcagtttatgatgccgcggagttcttcacgctgcagctgtggagatggcaaggagccacagaccatcacccagctcaccaagcacatccagagcctcaagcggaaaattcggaaatttgaagaaaaatttgaacaagaaaagaaataccggccttcacatggtgacaagacttctaatcctgaagtcctgaaatggatgaatgatttggctaaaggtcgtaaacagctcaaagaactaaagctaaagctgtcagaagaacaagggagtgctcccaaaggtccacctagaaacctgttgtgtgagcaacccacagtccccagagaaaatgggaaaccggaagctgcgggcccggagccaagctcctctggagaagagactccagatgctgccttgacatgcctgaaggagagaagagagcaacttcctccccaggaggattctaaggtaactaagcaagacaagaacctcataaagccgctttatgaccgatacagaattatcaagcaaatcttgtcaacaccttcccttattccaacaattcaggaggaagaggactctgatgaagaccgtccacagggaagccaacaaccttctttggcagatccagcatctcaccttcctgttggtgaccacctcacctactctaatgagactgagcctgttagggcccttttaccagatgaaaagaaagaagtaaaaccaccagctctctccatgtctaatttacatgaggctaccatgcctgtacttcttgaccatctccgagaaactagggctgacaagaagagactgcggaaagccttaagagaatttgaagaacagttttttaaacaaacaggaagaagtccacaaaaggaagataggataccaatggcagatgagtattatgaatataagcacataaaagccaaactgagactattagaggtcctcatcagcaagcaagatgtggccaaaactatttgaggttcaggaaatgttatgatcactttcacccatgatataaagtaaagtttattttcctctgccatccttgctaagtagttttgacacaatgaaaatggaagcactttagtggtagtattagctgtttttaagaaggaatagcaagtttaattatatacaaggagaagggatttaaacggggggaagaatacaacaggtagccatataattgggaaaaaattcagtgtcctccatgccaagcagaaaactcatagtcaatacaagtatttttaaaaatgtctaatattttatcaaatctaaataacatagctaggacacttgttagggaaagtttatttagtatccaaagactgtttatgttgatgtatggaaaagagcatgattttaaaaaatcaatcataggaggaaaagaaattcgcttttcaagtaggaaggaatacagctagcaagaaagcaatttatttgaaacttctaatggatttttgagtgataaaacatttactaccttgtcctttaagtctgctaggctctcagtaccctaaaataaactagattgtgttgctatttttttctttctctataaaaataacacattattttatccgttatttgaaattttacatttctggttaccaaagttcattctgatagcatgtactttgtgaattattatctttgtctataactgacagatgtttatattaaaataaaatattgtattaaaaatttaaaataggtattttggatagatatgtgtctgtagtatataatctaatgtgtccatagtattattgctaatcttttggtttactataagatgatataactattttttcattgggaatatacatttttcttaatgttccaacatctatactttgtaaagtcaaaacatttcccatgagctgtagttattcatccttctgtacaaaatgaaaagtttggaaattgtttgccctgataccttgaaaaagaagccagaatatttatttgcttcatcaacttcagtgtatatcattttgtgttattttatacgaaaacatgtttattattttcatttttgtaaaaggaagtaaaaggtcaacattttctctcatgtaccaaccttgtttgtatttctattttctgtaatgtttaagtatgatgttgaagaaattcacattctcttatagtttggatgggaagactattgactatttcagaaacagacttatttcagaggcttattgttttctctgtatttacctaatattttataacttttatgaatcagaataatgtccttcataaatttgtttaattgaagtcatctacttctaacaggacagatacacaactatttgaggtttacaaattacatctttgataagggaaatggtttcgtgacatgtacacagttgctattaaaatgtaactctatatattctatatgattgtaaatattttatacaacaatacaaataaaatatttttctattata

SEQ ID NO: 259324 - DNA, 2110 bp, Artificial Sequence
  derived and/or modified sequence
aaaattggtaggagacatgtggaagaaagcaagtctcccgggtatttcagcacttcggcagaaacactggggcattctcattgccagcctcggggggtggctggcacaaagagcccaagattaaacgcggcgcctgggctggcgaggtcggggtcgtgtggtaactctccaggtgctcctcgctggatcccggggtcccagccccgccgccgcgccccgcccagctctgtccccgcagcctcgcgggctgccgggctttgtggttcgcccgtgccgctgggcccctgctgggggtgtcgttacgagcatgtgcagacagcagcccaagccttcaggataattccttcagcagcaccactgtaacagagtgtgacgaagatccagtctctctacatgaagaccagactgattgctccagtctcagagatgaaaacaataaagagaactaccccgacgcaggggctctggtagaagagcacgcgccgccctcttgggagccgcagcagcagaatgtagaggcgaccgtgctggtggacagcgtattgcgacccagcatgggcaacttcaagtccaggaagcccaagtccatcttcaaagcggagagcgggaggagccacggagaaagtcaggagacagagcatgtggtatccagccagtcagagtgtcaggtgagagcaggaacaccagctcatgagagtccacaaaacaatgccttcaagtgccaagaaacagtgcgacttcaaccaagaatagaccagaggactgccatttcgccaaaggatgcttttgaaactcggcaggacttaaatgaggaagaagctgctcaggtgcatggagtcaaggacccggcgccagcatcaacccagagcgtgcttgccgatgggacagattctgcagacccctcaccagtccacaaagatgggcagaatgaggccgacagtgcaccagaagacctccactctgtggggaccagcaggctgctctatcacatcactgatggtgataacccactgctgtcgccacgatgctccatcttcagccaaagccagagattcaacttagaccccgagtcagccccatctccacccagcactcagcagtttatgatgccgcggagttcttcacgctgcagctgtggagatggcaaggagccacagaccatcacccagctcaccaagcacatccagagcctcaagcggaaaattcggaaatttgaagaaaaatttgaacaagaaaagaaataccggccttcacatggtgacaagacttctaatcctgaagtcctgaaatggatgaatgatttggctaaaggtcgtaaacagctcaaagaactaaagctaaagctgtcagaagaacaagggagtgctcccaaaggtccacctagaaacctgttgtgtgagcaacccacagtccccagagaaaatgggaaaccggaagctgcgggcccggagccaagctcctctggagaagagactccagatgctgccttgacatgcctgaaggagagaagagagcaacttcctccccaggaggattctaaggtaactaagcaagacaagaacctcataaagccgctttatgaccgatacagaattatcaagcaaatcttgtcaacaccttcccttattccaacaattcaggaggaagaggactctgatgaagaccgtccacagggaagccaacaaccttctttggcagatccagcatctcaccttcctgttggtgaccacctcacctactctaatgagactgagcctgttagggcccttttaccagatgaaaagaaagaagtaaaaccaccagctctctccatgtctaatttacatgaggctaccatgcctgtacttcttgaccatctccgagaaactagggctgacaagaagagactgcggaaagccttaagagaatttgaagaacagttttttaaacaaacaggaagaagtccacaaaaggaagataggataccaatggcagatgagtattatgaatataagcacataaaagccaaactgagactattagaggtcctcatcagcaagcaagatgtggccaaaactatttgaggttcaggaaatgttatgatcactttcacccatgatataaagtaaag

SEQ ID NO: 259325 - DNA, 1758 bp, Artificial Sequence
  derived and/or modified sequence
atgttcagctgcttctgcttcagcctgcaggacaacagcttcagcagcaccaccgtgacagaatgtgatgaggaccctgtgtccctgcacgaggaccagacagactgcagcagcctgagagatgagaacaacaaggagaactacccagatgctggggccctggtggaggagcacgccccacccagctgggagccccagcagcagaatgtggaggccaccgtgctggtggacagcgtgctgcggcccagcatgggcaacttcaagagcaggaagcccaagagcatcttcaaggccgagagcggccgcagccacggggagagccaggagacagagcacgtggtgagcagccagagcgagtgccaggtgcgggccggcaccccagcccacgagagcccccagaacaatgccttcaagtgccaggagaccgtgcggctgcagcccagaattgaccagaggacagccatcagccccaaggatgcctttgagacccggcaggacctgaatgaggaggaggccgcccaggtgcacggcgtgaaggaccctgccccagccagcacccagagcgtgctggctgatggaacagacagcgctgaccccagccctgtgcacaaggatggccagaatgaggccgacagcgcccctgaggacctgcacagcgtgggcaccagccggctgctgtaccacatcacagatggagacaaccccctgctgagcccccgctgcagcatcttcagccagagccagcgcttcaacctggaccctgagagcgcccccagcccccccagcacccagcagttcatgatgcccaggagcagcagccgctgcagctgtggagatggcaaggagccccagaccatcacccagctgaccaagcacatccagagcctgaagaggaagatcaggaagtttgaggagaagtttgagcaggagaagaagtaccggcccagccatggagacaagaccagcaaccctgaggtgctgaagtggatgaatgacctggccaagggcaggaagcagctgaaggagctgaagctgaagctgtctgaggagcagggcagcgcccccaagggcccccccaggaacctgctgtgtgagcagcccaccgtgccccgggagaatggcaagccagaggccgccggccctgagcccagcagcagcggggaggagaccccagatgctgccctgacctgcctgaaggagcggcgggagcagctgcccccccaggaggacagcaaggtgaccaagcaggacaagaacctgatcaagcccctgtatgaccgctaccgcatcatcaagcagatcctgagcacccccagcctcatccccaccatccaggaggaggaggacagtgatgaggaccggccccagggcagccagcagcccagcctggccgaccctgccagccacctgcctgtgggggaccacctgacctacagcaatgaaacagagcctgtgcgggccctgctgcctgatgagaagaaggaggtgaagcccccagccctgtccatgagcaacctgcacgaggccaccatgcctgtgctgctggaccacctgcgggagaccagggctgacaagaagaggctgaggaaggccctgcgggagtttgaggagcagttcttcaagcagacaggccgcagcccccagaaggaggaccgcatccccatggctgatgagtactatgagtacaagcacatcaaggccaagctgcggctgctggaggtgctgatcagcaagcaggatgtggccaagaccatctag

SEQ ID NO: 259326 - DNA, 1509 bp, Artificial Sequence
  derived and/or modified sequence
atgggcaacttcaagagcaggaagcccaagagcatcttcaaggccgagagcggccgcagccatggagagagccaggagacagaacatgtggtgagcagccagagcgagtgccaggtgcgggccggcaccccagcccacgagagcccccagaacaatgccttcaagtgccaggagaccgtgcggctgcagcccagaattgaccagaggacagccatcagccccaaggatgcctttgagacccggcaggacctgaatgaggaggaggccgcccaggtgcatggagtgaaggaccctgccccagccagcacccagagcgtgctggctgatggaacagattctgctgaccccagccctgtgcacaaggatggccagaatgaagctgacagcgcccctgaggacctgcacagcgtgggcaccagccggctgctgtaccacatcacagatggagacaaccccctgctgagcccccgctgcagcatcttcagccagagccagcgcttcaacctggaccctgagagcgcccccagcccccccagcacccagcagttcatgatgcccaggagcagcagccgctgcagctgtggagatggcaaggagccccagaccatcacccagctgaccaagcacatccagagcctgaagaggaagatcaggaagtttgaggagaagtttgagcaggagaagaagtaccggcccagccacggggacaagaccagcaaccctgaggtgctgaagtggatgaatgacctggccaagggcaggaagcagctgaaggagctgaagctgaagctgtctgaggagcagggcagcgcccccaagggccccccaagaaacctgctgtgtgagcagcccaccgtgcccagagaaaatggcaagccagaggccgccggccctgagcccagcagcagtggagaggagaccccagatgctgccctgacctgcctgaaggagcggcgggagcagctgcccccccaggaggacagcaaggtgaccaagcaggacaagaacctgatcaagcccctgtatgaccgctaccgcatcatcaagcagatcctgagcacccccagcctcatccccaccatccaggaggaggaggacagtgatgaagatcggccccagggcagccagcagcccagcctggccgaccctgccagccacctgcctgtgggggaccacctgacctacagcaatgaaacagagcctgtgcgggccctgctgcctgatgagaagaaggaggtgaagcccccagccctgtccatgagcaacctgcacgaggccaccatgcctgtgctgctggaccacctgcgggagaccagggctgacaagaagaggctgaggaaggccctgcgggagtttgaggagcagttcttcaagcagacaggccgcagcccccagaaggaggaccgcatccccatggctgatgagtactatgagtacaagcacatcaaggccaagctgcggctgctggaggtgctgatcagcaagcaggatgtggccaagaccatctag

SEQ ID NO: 259327 - DNA, 78 bp, Artificial Sequence
  derived and/or modified sequence
atgggcaacttcaagagcaggaagcccaagagcatcttcaaggccgagagcggccgcagccatggagagagccagtag

SEQ ID NO: 259328 - DNA, 1758 bp, Artificial Sequence
  derived and/or modified sequence
atgttcagctgcttctgcttcagcctgcaggacaacagcttcagctccacaaccgttaccgagtgtgatgaggaccctgtctcattgcacgaggatcagacagattgctcaagcctgcgggatgaaaataataaggagaactacccagatgcaggcgcactggtcgaagagcatgcaccaccttcgtgggaaccccagcagcagaacgtggaggccacagtgctggtagacagcgtgctgaggccgagcatgggaaactttaaatcacggaagccgaaatcaatcttcaaagcagaaagtggtcgatcccacggagaaagccaggagaccgaacatgtggtctcttctcagtccgagtgccaggttcgcgccggcacgccggcccacgaatcaccacagaacaatgcctttaagtgccaggagactgttagattgcagccacggatcgaccagaggacagccattagtccaaaggatgccttcgagacgagacaagacctgaacgaggaagaagcagctcaagtccacggagtgaaggatcctgccccagccagtacccaatccgtactggccgatggcaccgactcagctgaccccagtccagtgcacaaggacggccagaacgaagctgattcagcgcctgaggatctgcattcagttggaaccagtaggctgctttatcacatcacagatggcgacaacccattgttgagtccacgttgtagtatcttttcccaatcccagcggtttaatctggaccctgagtctgccccatcgcccccttccacccagcagttcatgatgccaagatcctcttcgcggtgtagctgcggggatgggaaggaacctcaaacaataactcagctgacgaagcacattcagagcctcaaacgcaaaatccggaagtttgaggagaaattcgaacaggagaaaaaataccggccctcacacggagacaagacaagcaaccccgaagtattgaagtggatgaacgatctggccaaaggtaggaagcaactgaaagaactgaagctaaagctgtccgaggaacagggttctgcaccgaagggcccacctagaaacctgttatgcgaacagcccaccgttcctcgcgagaacggcaagccggaggcagcagggccagagccaagctctagcggcgaggagacacctgacgccgccctcacatgcctgaaggagcgcagagagcagctgcctccacaggaagattctaaggtcacaaagcaggacaaaaaccttatcaagccgctgtacgaccgttacagaatcatcaagcaaattctaagcacaccctctctgattcccaccatacaagaagaagaagactctgacgaagaccgcccgcagggttcccagcagccctcactggctgacccagcttcacatcttcctgtgggggaccacctcacttactcaaacgaaacagagcctgtgagagcactgttgccggatgaaaagaaggaagtaaaaccacctgcattgagtatgagtaacctccacgaggccaccatgcccgtcctgctcgaccacctgcgggagacaagagctgataagaaaagactgaggaaggccctgcgggaattcgaggaacaattcttcaagcagactggccgctcgcctcagaaggaagataggattcctatggctgacgagtattacgaatataagcacatcaaagcaaaactgcgactcctggaggttctgatatcaaaacaggacgtggcgaaaaccatttag

SEQ ID NO: 259329 - DNA, 1509 bp, Artificial Sequence
  derived and/or modified sequence
atgggcaacttcaagagccggaagcccaagagcatcttcaaggccgaatctgggcggagccatggcgagagccaggagacagaacacgtcgtcagtagccagtccgagtgtcaggtgcgagcgggcacaccagctcacgagtccccacagaacaacgcttttaagtgtcaggaaaccgtgcgcctccaaccacggatcgatcagcgcactgccatttcaccaaaggacgctttcgaaacccgacaggacctgaacgaggaggaggcagcgcaggttcatggagtgaaagacccggcaccggcgtctacacagagtgtgctcgcggacggtacagattctgcagacccctcacctgtgcacaaagacggccagaacgaagccgacagtgcccctgaggacctgcactccgtgggcactagccgcctgctgtatcatatcacagatggcgataatcctctcctgtctcctagatgttcaatctttagtcaatcacaaagattcaatctcgaccccgagtccgcgccttccccaccctccactcaacaatttatgatgccacgcagctccagccgatgttcatgcggggacgggaaggagccccaaacaatcacacagctgaccaaacatattcaatcgctgaaacgcaagatacggaaattcgaggagaaattcgagcaagagaagaagtatagaccctctcatggagacaaaacctctaatccagaagttctgaagtggatgaacgacttagcgaaaggacgcaaacagcttaaagaactgaagctaaaactgagcgaagaacaaggttctgcccctaagggcccaccgcgcaacctcttatgtgagcagcccaccgttcctcgggagaatggtaagccagaagctgcgggccctgagccctctagctctggagaagagacaccggacgccgcgctgacctgccttaaggagagaagggagcaattacctccacaggaagatagcaaggtgacaaagcaggataaaaatctcatcaaaccactgtacgaccggtatcgaatcataaagcagattctctccactccctccctgattcctacaatccaggaagaggaggacagtgatgaagataggcctcagggctctcagcaacctagcctggccgatcccgcgagccatcttccagttggtgatcacctgacgtattctaatgagaccgagccagtacgagctctcctgccagacgagaagaaagaagttaaaccccccgctctgagtatgtctaatctgcacgaggcaactatgccagtactgcttgatcacctcagggagacgcgtgccgacaagaagaggctacgcaaagctctgcgggagtttgaggaacaattctttaagcagaccgggaggagtccccagaaagaggataggatccctatggctgatgaatactatgagtataaacatatcaaagccaaacttaggttgctggaggtgctcatctcgaaacaggatgtggccaagaccatctag

SEQ ID NO: 259330 - DNA, 78 bp, Artificial Sequence
  derived and/or modified sequence
atgggcaacttcaagagccggaagcccaagagcatcttcaaggccgaatcagggcgcagccatggggaaagtcagtag

SEQ ID NO: 259331 - DNA, 1758 bp, Artificial Sequence
  derived and/or modified sequence
atgttcagttgcttttgtttcagcctgcaggacaactcgttctcgtccacaacagtgacagagtgcgatgaagaccccgtctcattacacgaggaccaaacagattgcagttcactacgggatgaaaacaataaggaaaattatccagacgccggagcactggtggaggaacatgcacccccatcttgggaaccacagcagcaaaatgtagaagctactgtgctggtggatagtgtcctgagaccctcgatggggaactttaaatcccgaaaacctaagtctatctttaaggcggaaagcggcaggtcccacggggagtcacaggaaaccgaacacgttgtgtcatctcagagcgagtgccaggtccgcgctggcactcctgcccatgaatctcctcagaacaacgccttcaagtgtcaggagaccgttagacttcaacctcgaatcgatcagcgcactgccatttctcctaaagacgcatttgaaacgcgtcaggatttaaatgaagaggaggcggcacaagtgcacggggtaaaggacccagccccagcttcaacacagagcgtcttagcggacggtacagactccgctgatcctagccccgtgcataaggacgggcaaaacgaggccgatagtgcacccgaggatcttcacagtgtaggaacaagcagactgttgtatcacatcactgacggggacaaccctttactgtcccccaggtgctcaatcttcagtcagtcacagcgttttaatctggacccggagtccgcaccatctcctccgtctacccagcagtttatgatgccccgatcttcctcccgatgctcttgcggtgatggcaaggagccccagacgatcactcagctgacaaaacacatacagtccctcaagcgaaagatccgaaagtttgaagagaaattcgagcaggagaagaagtaccggcctagccacggtgataagacaagtaatcccgaagttctcaaatggatgaacgacctggccaagggacgtaagcagctgaaggagcttaagctaaagctgtcggaagaacagggctccgcaccaaaggggccaccgaggaacctgttatgcgagcaacccaccgttcccagggagaacgggaaacctgaggcggcaggaccagaaccctcaagttcgggggaggaaactccagacgccgctttgacctgcttgaaagaacggagagagcaactgccaccacaagaagattctaaggtaacaaagcaggataagaatctcatcaagccattgtatgatcgatatcggattatcaaacaaattctgagcacgccttcactaatccctactatccaggaggaagaggattccgatgaggataggccccagggctcccagcagccctccctggccgacccagcgtctcacttgcccgtgggagaccaccttacatatagcaacgaaacagagcccgtgagggccttgcttcctgacgagaagaaagaggtcaagcctccagcactgagtatgtcaaatctgcacgaggctactatgccggtgttgctcgatcatttgcgggagactcgcgcagataagaaaaggctgagaaaagccctcagagagtttgaggaacagttctttaagcaaacaggtagatccccacaaaaggaagatcggattcctatggcagacgagtactacgagtacaagcacattaaggcaaagctgcgcctcctggaggtccttatttctaaacaagacgtggctaagaccatttag

SEQ ID NO: 259332 - DNA, 1509 bp, Artificial Sequence
  derived and/or modified sequence
atgggaaattttaaatcccggaaaccaaaatccattttcaaagccgaatctggaagaagccatggagagtctcaggagaccgagcacgtcgttagttcgcagagcgaatgccaggtccgagctggcactccagcgcatgaaagcccccagaataatgcctttaagtgccaggagaccgtacgactgcagccacggattgatcaaaggaccgcaattagcccgaaggacgccttcgagacaaggcaagatctgaacgaagaagaagcggctcaggtgcacggggtgaaggatcccgctcctgccagtactcagtctgttttagccgacggcacagactccgcagaccctagtcccgtccataaggatgggcagaatgaggcagactcagctcctgaggatctccactccgtgggtacaagtcgtttactgtatcacatcacggatggcgacaatccactgctgagtcctagatgtagcatcttttcacagagccagaggtttaaccttgaccctgaatctgcgccttcccctcccagtacgcagcagtttatgatgccccgatcctcaagccggtgctcttgtggtgatggtaaagagccccagaccatcacccagctgaccaagcacattcagtccctaaagcgaaagattcgcaagtttgaggaaaagtttgaacaggagaaaaagtatagaccatcccacggagataagaccagtaatcctgaagttctgaagtggatgaacgatctggccaagggcagaaaacagttgaaggagctgaaacttaagctctcagaggaacaaggttccgctcccaagggaccaccgagaaaccttctttgtgaacagcctacagtccccagggaaaacgggaaaccagaagcggcaggcccagagcccagtagctcaggcgaagaaacaccagatgcagcactgacatgtcttaaagagcggagagaacagttgcccccacaggaggattcgaaagtgaccaaacaagacaaaaatctcattaagcccctgtatgacaggtataggattattaagcagatcctgagtaccccctctctgattccaactattcaggaggaggaggacagtgacgaggaccggccacaggggagtcagcagcccagtctcgctgacccagccagtcacctgcctgttggtgaccacctgacatacagcaatgagaccgagcctgtcagggccctcctgccagacgagaaaaaagaagtgaagccaccggcattaagtatgtcgaacttacacgaggccaccatgccagtactactcgatcatctgcgggagacaagagcggacaaaaagaggctgaggaaagctctaagggagtttgaggagcaattttttaaacagactgggaggtctccccagaaagaggatcgcatccctatggcagacgagtactacgagtacaagcacatcaaagccaaattgcggctgttggaggtactgatttccaaacaggacgtggctaaaactatttag

SEQ ID NO: 259333 - DNA, 78 bp, Artificial Sequence
  derived and/or modified sequence
atgggcaatttcaagtccaggaaacccaagtctatattcaaggccgagtcaggaagatctcacggagaatcccagtag

SEQ ID NO: 259334 - protein, 240 aa, Artificial Sequence
  derived and/or modified sequence
MTVGKSSKMLQHIDYRMRCILQDGRIFIGTFKAFDKHMNLILCDCDEFRKIKPKNSKQAEREEKRVLGLVLLRGENLVSMTVEGPPPKDTGIARVPLAGAAGGPGIGRAAGRGIPAGVPMPQAPAGLAGPVRGVGGPSQQVMTPQGRGTVAAAAAAATASIAGAPTQYPPGRGGPPPPMGRGAPPPGMMGPPPGMRPPMGPPMGIPPGRGTPMGMPPPGMRPPPPGMRGPPPPGMRPPRP

SEQ ID NO: 259335 - protein, 235 aa, Artificial Sequence
  derived and/or modified sequence
MEILKELDECYERFSRETDGAQKRRMLHCVQRALIRSQELGDEKIQIVSQMVELVENRTRQVDSHVELFEAQQELGDTAGNSGKAGADRPKGEAAAQADKPNSKRSRRQRNNENRENASSNHDHDDGASGTPKEKKAKTSKKKKRSKAKAEREASPADLPIDPNEPTYCLCNQVSYGEMIGCDNDECPIEWFHFSCVGLNHKPKGKWYCPKCRGENEKTMDKALEKSKKERAYNR

SEQ ID NO: 259336 - DNA, 708 bp, Artificial Sequence
  derived and/or modified sequence
atggagatcctgaaggagctggacgagtgctacgagagattcagcagagagaccgacggcgcccagaagagaagaatgctgcactgcgtgcagagagccctgatcagaagccaggagctgggcgacgagaagatccagatcgtgagccagatggtggagctggtggagaacagaaccagacaggtggacagccacgtggagctgttcgaggcccagcaggagctgggcgacaccgccggcaacagcggcaaggccggcgccgacagacccaagggcgaggccgccgcccaggccgacaagcccaacagcaagagaagcagaagacagagaaacaacgagaacagagagaacgccagcagcaaccacgaccacgacgacggcgccagcggcacccccaaggagaagaaggccaagaccagcaagaagaagaagagaagcaaggccaaggccgagagagaggccagccccgccgacctgcccatcgaccccaacgagcccacctactgcctgtgcaaccaggtgagctacggcgagatgatcggctgcgacaacgacgagtgccccatcgagtggttccacttcagctgcgtgggcctgaaccacaagcccaagggcaagtggtactgccccaagtgcagaggcgagaacgagaagaccatggacaaggccctggagaagagcaagaaggagagagcctacaacagatag

SEQ ID NO: 259337 - DNA, 708 bp, Artificial Sequence
  derived and/or modified sequence
atggagatcctgaaggaactcgatgaatgctatgagcgcttcagcagggaaactgatggcgctcagaaaaggaggatgctccattgcgtgcagagagcactgataagatcccaggagctgggtgatgaaaaaatacagattgtgagccagatggtggagctggtggaaaaccggacccgccaagttgacagccatgtagagttatttgaagcccaacaggagttgggcgacacagctggtaattcggggaaggctggggcagataggcctaagggagaagccgccgcacaagccgacaagcctaattcaaaaaggtccaggcgccaacggaacaacgagaacagagaaaacgcatcatctaatcacgatcatgacgacggggcatcaggtactccgaaagaaaagaaagctaaaacctctaaaaaaaagaaacgaagcaaggccaaggctgagcgggaagcaagtcccgcggatctgcccatcgaccctaatgagccaacatactgtctgtgcaatcaggtctcctatggggagatgatcgggtgtgataacgatgagtgtcccattgaatggttccatttcagttgcgtgggactcaaccataaacctaagggtaagtggtactgcccaaaatgcagaggtgaaaatgaaaagaccatggacaaagcactcgagaaaagcaaaaaggagcgcgcttataacagatag

SEQ ID NO: 259338 - DNA, 708 bp, Artificial Sequence
  derived and/or modified sequence
atggagatcctgaaggagctggatgaatgttatgagcgcttcagccgggagacagatggagcccagaagaggaggatgctgcactgtgtgcagagggccctgatccgcagccaggagctgggagatgagaagatccagatcgtgtcccagatggtggagctggtggagaacagaacccggcaggtggacagccacgtggagctgtttgaggcccagcaggagctgggggacacagctggcaacagcggcaaggccggggctgaccggcccaagggggaggccgccgcccaggccgacaagcccaacagcaagaggagccggcggcagaggaacaatgaaaatcgggagaatgccagcagcaaccacgaccatgatgatggagccagcggcacccccaaggagaagaaggccaagaccagcaagaagaagaagaggagcaaggccaaggccgagcgggaggccagccctgctgacctgcccatcgaccccaatgagcccacctactgcctgtgcaaccaggtgtcctatggagagatgattggctgtgacaatgatgagtgccccatcgagtggttccacttcagctgtgtgggcctgaaccacaagcccaagggcaagtggtactgccccaagtgcagaggagaaaatgagaagaccatggacaaggccctggagaagagcaagaaggagcgggcctacaacagatag

SEQ ID NO: 259339 - DNA, 1189 bp, Artificial Sequence
  derived and/or modified sequence
cctccgagaacggtgtccatgacacagggcgggaagagataaggcctagggaaggcgcccctcgggcctatccacctcttctggggctcggcactaggaagcagcttccctctcaggcccctttgtctccaagccgttccaaactgagtaccgggagacgacacaaagggagggcggtgacggatggcgcaggcgcgggagccgcctaggctgctgggagtggtggtccggccgcggaatggagatcctgaaggagctagacgagtgctacgagcgcttcagtcgcgagacagacggggcgcagaagcggcggatgctgcactgtgtgcagcgcgcgctgatccgcagccaggagctgggcgacgagaagatccagatcgtgagccagatggtggagctggtggagaaccgcacgcggcaggtggacagccacgtggagctgttcgaggcgcagcaggagctgggcgacacagcgggcaacagcggcaaggctggcgcggacaggcccaaaggcgaggcggcagcgcaggctgacaagcccaacagcaagcgctcacggcggcagcgcaacaacgagaaccgtgagaacgcgtccagcaaccacgaccacgacgacggcgcctcgggcacacccaaggagaagaaggccaagacctccaagaagaagaagcgctccaaggccaaggcggagcgagaggcgtcccctgccgacctccccatcgaccccaacgaacccacgtactgtctgtgcaaccaggtctcctatggggagatgatcggctgcgacaacgacgagtgccccatcgagtggttccacttctcgtgcgtggggctcaatcataaacccaagggcaagtggtactgtcccaagtgccggggggagaacgagaagaccatggacaaagccctggagaaatccaaaaaagagagggcttacaacaggtagtttgtggacaggcgcctggtgtgaggaggacaaaataaaccgtgtatttattacattgctgcctttgttgaggtgcaaggagtgtaaaatgtatatttttaaagaatgttagtaaaggaaccattcctttcatagggatggcagtgattctgtttgccttttgttttcattggtacacgtgtaacaagaaagtggtctgtggatcagcattttagaaactacaaatataggtttgattcaaca

SEQ ID NO: 259340 - DNA, 708 bp, Artificial Sequence
  derived and/or modified sequence
atggagatcctgaaggagctggacgagtgctacgagcggttcagccgtgaaactgatggagcacaaaaaaggcgtatgctgcattgcgtccagcgggcacttatccgatcccaggaactgggcgatgaaaagatccagattgtgtctcaaatggttgagttagtggaaaacaggacacgccaagtggacagccatgtggaattgtttgaagcgcagcaggagctgggggacaccgcaggcaattcaggcaaggctggagctgacaggcccaaaggggaggcagccgctcaggccgataaacccaatagcaaaaggagcagaaggcagaggaataatgagaatcgtgagaacgcctcctcaaaccacgatcacgatgacggagcctctggtactccaaaggagaagaaggccaagacatccaaaaaaaaaaaacggtcaaaggcaaaggccgaacgagaggccagccccgctgatctgcccatcgatccaaatgaaccaacctattgtctgtgtaatcaagtgtcttacggagagatgatcgggtgcgacaatgatgagtgtccgatcgagtggttccatttctcctgcgtggggctcaaccacaaacctaaaggcaagtggtattgtcccaaatgcaggggagagaatgagaagaccatggataaggcgctcgaaaagtcaaaaaaggaaagggcctacaataggtag

SEQ ID NO: 259341 - DNA, 708 bp, Artificial Sequence
  derived and/or modified sequence
atggagatattgaaagaactcgatgaatgctacgaaaggttctcccgggaaacagacggcgctcagaaacgcaggatgttgcactgtgttcaaagggcattgattcgtagtcaagaactcggagatgagaaaattcaaatcgtaagccagatggtggagctcgttgagaaccgtacacgccaagttgatagccacgtagagctgttcgaggctcaacaagagttaggtgacacggcgggaaacagcggtaaggccggtgcagaccgcccaaagggggaagcggcagcccaggcggacaagcccaattcaaaacgtagtcgtaggcagaggaataacgagaacagagagaacgcttctagcaatcatgaccatgacgatggcgcttctggcacaccaaaggagaaaaaagcaaaaacatctaaaaagaagaagcgttctaaggccaaggcggagcgcgaggcaagtcccgctgacctgccgattgaccccaacgaacctacctattgcttatgcaaccaagtgagctatggagaaatgataggatgcgacaatgatgagtgtccgatagaatggtttcacttctcttgcgtcggccttaaccacaagcccaaggggaaatggtactgtcctaaatgccgcggtgaaaatgaaaaaacaatggataaagccttggaaaaaagcaagaaagaaagagcatataaccggtag

SEQ ID NO: 259342 - DNA, 633 bp, Artificial Sequence
  derived and/or modified sequence
atgctgcactgcgtgcagagagccctgatcagaagccaggagctgggcgacgagaagatccagatcgtgagccagatggtggagctggtggagaacagaaccagacaggtggacagccacgtggagctgttcgaggcccagcaggagctgggcgacaccgccggcaacagcggcaaggccggcgccgacagacccaagggcgaggccgccgcccaggccgacaagcccaacagcaagagaagcagaagacagagaaacaacgagaacagagagaacgccagcagcaaccacgaccacgacgacggcgccagcggcacccccaaggagaagaaggccaagaccagcaagaagaagaagagaagcaaggccaaggccgagagagaggccagccccgccgacctgcccatcgaccccaacgagcccacctactgcctgtgcaaccaggtgagctacggcgagatgatcggctgcgacaacgacgagtgccccatcgagtggttccacttcagctgcgtgggcctgaaccacaagcccaagggcaagtggtactgccccaagtgcagaggcgagaacgagaagaccatggacaaggccctggagaagagcaagaaggagagagcctacaacagatag

SEQ ID NO: 259343 - DNA, 633 bp, Artificial Sequence
  derived and/or modified sequence
atgctacattgtgtacagagggcactcatcagatcccaggagctgggggacgaaaaaatccagattgtgtcccagatggtcgaactagtggagaatcgcaccaggcaggtcgatagtcatgtcgagttatttgaggcccagcaggaactcggagatacagcaggtaattcaggaaaggcaggggccgaccgcccaaaaggcgaagccgccgcacaagctgacaagcctaacagcaagcgcagcaggcgccagcgcaataacgagaatagggaaaatgcatctagcaatcatgatcacgacgacggagcaagcggcactccgaaagagaaaaaagctaagacgtctaaaaagaaaaaacgaagcaaagctaaagctgagcgggaggcatctccagctgatctgcccatagatccaaatgagccgacatattgcttgtgtaaccaagtcagttatggtgaaatgattggatgcgacaatgatgaatgcccaattgagtggttccacttttcgtgcgtcggactgaaccacaagcccaagggcaaatggtactgtcccaaatgtagaggggaaaatgaaaagactatggataaggcactggaaaaaagcaagaaggaaagagcctataatcggtag

SEQ ID NO: 259344 - DNA, 633 bp, Artificial Sequence
  derived and/or modified sequence
atgctgcactgtgtgcagagggccctgatccgcagccaggagctgggagatgagaagatccagatcgtgtcccagatggtggagctggtggagaacagaacccggcaggtggacagccacgtggagctgtttgaggcccagcaggagctgggggacacagctggcaacagcggcaaggccggggctgaccggcccaagggggaggccgccgcccaggccgacaagcccaacagcaagaggagccggcggcagagaaataatgaaaatagagaaaatgccagcagcaaccacgaccatgatgatggagccagcggcacccccaaggagaagaaggccaagaccagcaagaagaagaagaggagcaaggccaaggccgagcgggaggccagccctgctgacctgcccatcgaccccaatgagcccacctactgcctgtgcaaccaggtgtcctatggagagatgattggctgtgacaatgatgaatgtcccatcgagtggttccacttcagctgtgtgggcctgaaccacaagcccaagggcaagtggtactgccccaagtgccgcggggagaatgagaagaccatggacaaggccctggagaagagcaagaaggagcgggcctacaacagatag

SEQ ID NO: 259345 - DNA, 633 bp, Artificial Sequence
  derived and/or modified sequence
atgctgcactgcgtgcagcgggccctgatccggagccaggagctgggtgatgagaagatccagatagtctcccagatggtcgagcttgtggagaaccgcacccgccaggtagactcccatgtcgagctgttcgaggcccagcaggagcttggggacaccgccgggaattctggcaaagcaggagcagatagaccaaaaggggaggccgctgcgcaggccgacaaacctaacagcaagagaagtaggcgtcagcgtaacaacgagaaccgagagaatgcttcctcaaaccacgatcacgatgatggtgcctctggcacccctaaagagaaaaaggccaaaactagcaagaaaaaaaagagaagtaaggccaaagcagagcgcgaagcttctcccgcagatctgccgattgatcccaacgaaccaacttactgcctgtgtaatcaggtgtcttacggagagatgattggttgtgataatgatgaatgcccaattgagtggtttcacttcagttgcgtaggtctgaatcataagccaaaggggaaatggtactgccccaaatgtaggggagaaaatgagaaaacgatggataaagctctcgagaagagcaagaaagagcgggcttacaaccgctag

SEQ ID NO: 259346 - DNA, 633 bp, Artificial Sequence
  derived and/or modified sequence
atgttacactgcgtccagcgcgcattgatcagaagccaggagctaggggacgagaagatacagatagtgtcccagatggtggagctggtggaaaatcggaccaggcaagttgatagccatgttgaactgttcgaggcccagcaggaactgggcgatactgccggtaattcagggaaggctggggctgaccgccctaagggagaagctgccgctcaggctgataagcccaactctaagcgctctagaagacagaggaataatgagaatcgcgaaaatgcttcatctaatcacgaccacgatgatggggcaagcggaacacctaaggaaaagaaggctaaaactagtaagaaaaagaaaagaagtaaagccaaagctgaacgtgaagcctccccggcagacctacctatcgatcctaacgaaccaacttactgtctgtgtaaccaggtctcctatggtgaaatgatcggatgcgacaatgacgagtgtcccatcgaatggtttcatttctcttgtgtgggcctgaatcataaaccaaagggcaagtggtactgcccgaagtgcaggggtgagaatgaaaaaacaatggacaaagctctcgagaagtcaaaaaaagagcgggcatacaaccgttag

SEQ ID NO: 259347 - protein, 279 aa, Artificial Sequence
  derived and/or modified sequence
MLSPANGEQLHLVNYVEDYLDSIESLPFDLQRNVSLMREIDAKYQEILKELDECYERFSRETDGAQKRRMLHCVQRALIRSQELGDEKIQIVSQMVELVENRTRQVDSHVELFEAQQELGDTAGNSGKAGADRPKGEAAAQADKPNSKRSRRQRNNENRENASSNHDHDDGASGTPKEKKAKTSKKKKRSKAKAEREASPADLPIDPNEPTYCLCNQVSYGEMIGCDNDECPIEWFHFSCVGLNHKPKGKWYCPKCRGENEKTMDKALEKSKKERAYNR

SEQ ID NO: 259348 - protein, 210 aa, Artificial Sequence
  derived and/or modified sequence
MLHCVQRALIRSQELGDEKIQIVSQMVELVENRTRQVDSHVELFEAQQELGDTAGNSGKAGADRPKGEAAAQADKPNSKRSRRQRNNENRENASSNHDHDDGASGTPKEKKAKTSKKKKRSKAKAEREASPADLPIDPNEPTYCLCNQVSYGEMIGCDNDECPIEWFHFSCVGLNHKPKGKWYCPKCRGENEKTMDKALEKSKKERAYNR

SEQ ID NO: 259349 - DNA, 840 bp, Artificial Sequence
  derived and/or modified sequence
atgctgagccccgccaacggcgagcagctgcacctggtgaactacgtggaggactacctggacagcatcgagagcctgcccttcgacctgcagagaaacgtgagcctgatgagagagatcgacgccaagtaccaggagatcctgaaggagctggacgagtgctacgagagattcagcagagagaccgacggcgcccagaagagaagaatgctgcactgcgtgcagagagccctgatcagaagccaggagctgggcgacgagaagatccagatcgtgagccagatggtggagctggtggagaacagaaccagacaggtggacagccacgtggagctgttcgaggcccagcaggagctgggcgacaccgccggcaacagcggcaaggccggcgccgacagacccaagggcgaggccgccgcccaggccgacaagcccaacagcaagagaagcagaagacagagaaacaacgagaacagagagaacgccagcagcaaccacgaccacgacgacggcgccagcggcacccccaaggagaagaaggccaagaccagcaagaagaagaagagaagcaaggccaaggccgagagagaggccagccccgccgacctgcccatcgaccccaacgagcccacctactgcctgtgcaaccaggtgagctacggcgagatgatcggctgcgacaacgacgagtgccccatcgagtggttccacttcagctgcgtgggcctgaaccacaagcccaagggcaagtggtactgccccaagtgcagaggcgagaacgagaagaccatggacaaggccctggagaagagcaagaaggagagagcctacaacagatag

SEQ ID NO: 259350 - DNA, 840 bp, Artificial Sequence
  derived and/or modified sequence
atgttgtcccccgcgaatggagagcagctgcatctggtcaactatgtcgaggactatttagattctatcgaatctttgcccttcgatctgcaacgcaatgtgtccctgatgcgcgagatcgatgccaagtatcaggagattcttaaggagctggatgagtgttatgaacgcttttcccgcgagacggacggagctcagaaacgccgcatgctacattgcgtgcagagggctttgatcaggagtcaggaactcggcgatgagaagatccaaatcgtttcgcagatggttgaactggtggaaaaccggactagacaggtggattcacatgtggaactttttgaagcacaacaggaattaggggacaccgcgggcaactccgggaaggccggggcggatagacctaagggggaggctgcagcccaggctgataaacctaattccaagagatcacggaggcagcggaacaacgaaaatcgcgaaaatgcttcctcaaaccatgaccacgacgacggcgcctcaggcacaccgaaggagaagaaagccaagaccagcaagaagaaaaaaaggtctaaggccaaagccgagcgggaagcctcccctgcagatttgcccattgaccccaacgagcctacctactgcctctgtaatcaggtgtcgtacggcgagatgataggatgcgataacgacgaatgtccaatcgagtggttccacttcagctgtgtgggcttgaatcataaaccgaagggaaaatggtactgccccaagtgcagaggcgaaaatgaaaagaccatggataaagctctggagaaatcaaagaaggagcgagcgtacaacagatag

SEQ ID NO: 259351 - DNA, 840 bp, Artificial Sequence
  derived and/or modified sequence
atgctgagccctgccaacggggagcagctgcacctggtgaactacgtggaggactacctggacagcattgagagcctgccctttgacctgcagagaaatgtgtccctgatgagagaaattgatgccaagtaccaggagatcctgaaggagctggatgaatgttatgagcgcttcagccgggagacagatggagcccagaagaggaggatgctgcactgtgtgcagagggccctgatccgcagccaggagctgggagatgagaagatccagatcgtgtcccagatggtggagctggtggagaacagaacccggcaggtggacagccacgtggagctgtttgaggcccagcaggagctgggggacacagctggcaacagcggcaaggccggggctgaccggcccaagggggaggccgccgcccaggccgacaagcccaacagcaagaggagccggcggcagaggaacaatgaaaatcgggagaatgccagcagcaaccacgaccatgatgatggagccagcggcacccccaaggagaagaaggccaagaccagcaagaagaagaagaggagcaaggccaaggccgagcgggaggccagccctgctgacctgcccatcgaccccaatgagcccacctactgcctgtgcaaccaggtgtcctatggagagatgattggctgtgacaatgatgagtgccccatcgagtggttccacttcagctgtgtgggcctgaaccacaagcccaagggcaagtggtactgccccaagtgcagaggagaaaatgagaagaccatggacaaggccctggagaagagcaagaaggagcgggcctacaacagatag

SEQ ID NO: 259352 - DNA, 2854 bp, Artificial Sequence
  derived and/or modified sequence
gcgagttgcggtagttgctgtgtaccatggtctcggaggtttctgtcccgcggcccgttaggtcctggtcgggttttcagcgaagcaggccgctcccctgcgtttcccagcgggcgtgctgtgccgcccaacaggctctgcctccaagtgccaaaaactcctagtaaagtttgcgcctcgcccgccgtccacaccccagcggccctgacgctgtcccctccgcgaccctcgcctctggaaaaagtgacaggcaaggccacgcccccgcgagggccggcctggagcccgcagcccccagggcctgggacggtgaggggcgtgaatgcggcggggggcggggccgttgccgggggagggggccggggcgcatgcgcgctgcgcagcggggctgaatgtttcccaagtgtttgaaactggtatttgggttttccacgttggacaagtgcggctcggcggccagcggagcgcgccccttcccgctgcccgctccgctcctctcttctacccagcccagtgggcgagtgggcagcggcggccgcggcgctgggccctctcccgccggtgtgtgcgcgctcgtacgcgcggcccccggcgccagccccgccgcctgagagggggcctgcgccgccggccggggcgtgcgcccgggagccaccgccaccgcggcccgcgccctcaggcgctggggtccccgcggacccggaggcggcggacgggctcggcagatgtagccgccgggccgaagcaggagccggcgggggggcgccgggagagcgagggctttgcattttgcagtgctattttttgaggggggcggggggtggaggaagcggaaagccgcgccgagtcgccggggacctccggggtgaaccatgttgagtcctgccaacggggagcagctccacctggtgaactatgtggaggactacctggactccatcgagtccctgcctttcgacttgcagagaaatgtctcgctgatgcgggagatcgacgcgaaataccaagagatcctgaaggagctagacgagtgctacgagcgcttcagtcgcgagacagacggggcgcagaagcggcggatgctgcactgtgtgcagcgcgcgctgatccgcagccaggagctgggcgacgagaagatccagatcgtgagccagatggtggagctggtggagaaccgcacgcggcaggtggacagccacgtggagctgttcgaggcgcagcaggagctgggcgacacagcgggcaacagcggcaaggctggcgcggacaggcccaaaggcgaggcggcagcgcaggctgacaagcccaacagcaagcgctcacggcggcagcgcaacaacgagaaccgtgagaacgcgtccagcaaccacgaccacgacgacggcgcctcgggcacacccaaggagaagaaggccaagacctccaagaagaagaagcgctccaaggccaaggcggagcgagaggcgtcccctgccgacctccccatcgaccccaacgaacccacgtactgtctgtgcaaccaggtctcctatggggagatgatcggctgcgacaacgacgagtgccccatcgagtggttccacttctcgtgcgtggggctcaatcataaacccaagggcaagtggtactgtcccaagtgccggggggagaacgagaagaccatggacaaagccctggagaaatccaaaaaagagagggcttacaacaggtagtttgtggacaggcgcctggtgtgaggaggacaaaataaaccgtgtatttattacattgctgcctttgttgaggtgcaaggagtgtaaaatgtatatttttaaagaatgttagtaaaggaaccattcctttcatagggatggcagtgattctgtttgccttttgttttcattggtacacgtgtaacaagaaagtggtctgtggatcagcattttagaaactacaaatataggtttgattcaacacttaagtctcagactgatttcttgcgggaggagggggactaaactcaacctaacacattaaatgtggaaggaaaatatttcatttagcttttttattttaatacaagtaatattattactttatgaacaattttttttaattggccatgtcgccaaaaatacagcctatagtaaatgtgtttcttgctgccatgatgtatatccatataacaattcagtaacaaaggtttaaagtttgaagattattttttaaaaaggtaaatggttaaattttacatgacagatattttatctattggcctgttccccaaatggccattttaaaatgcttgggtacacttctcttaagtggtctagtcaaggaacctcaagtcatgcttttgctatcaccaatcatagtgtacccatctttaatttatatcaggtgtataaatgtacatttccaaatgaacttgcacttgttatattataattggaagtgcagtcagcagatgctgttgtgaagctaatgtcacaattatgtgcaaaggtgtgcttcctgctgtatgtgagctgtaaaaatgttacgtgaagaaataaatgaaacttggccagtttgttcctctagtagtatatttaattttgacataagtaacttttaaaatttgtcttaaaaatttatacaccagcaatttagacaaagccttaagcaaattttgtattattgttctcacttattattaataatgaagtagaagttacttaattgccagcaaataaatacgtgtcaaaaaagaatctgtattcagaccctgggtcaggaaattactgcccacttgtcaagttcagcccaccatctgtttgaagattatatgaagtttaaattctagtgtccataaataaagtttcagcggaacaca

SEQ ID NO: 259353 - DNA, 840 bp, Artificial Sequence
  derived and/or modified sequence
atgctgagccccgccaacggcgagcagctgcacctggtgaactacgtggaagattacctcgattcaatcgaaagcctgcctttcgacctccaacgcaacgtctcactgatgagggaaattgacgccaaatatcaggaaatccttaaagaactggacgaatgctacgagcgatttagccgcgagaccgatggagctcagaaacgccggatgctgcactgtgtccaaagggccctgattcgcagtcaagagttgggggacgagaagattcagattgttagccagatggtggagctggttgagaatagaaccaggcaggtcgattctcacgtcgaactgtttgaagcgcagcaggagctcggcgatactgcgggaaactctggtaaggctggcgctgatcggccgaagggtgaagccgcggcacaggctgataaacccaactcgaagcggtcccgcaggcagaggaacaatgaaaatagggagaacgcgtcgagcaaccacgaccacgacgacggggccagcggaacccctaaagaaaaaaaggccaagacctcaaaaaagaagaaacgctcaaaagcaaaggccgagagggaggctagccctgccgacctgcctattgatcctaacgagcctacttactgtctttgtaaccaagtgagctatggcgagatgattggctgtgacaatgatgaatgccccatagagtggttccattttagctgcgtggggttaaaccataagccgaaagggaagtggtattgtcccaaatgtcgtggagagaacgagaaaaccatggacaaggcgctagagaaaagcaaaaaggaaagagcctacaaccggtag

SEQ ID NO: 259354 - DNA, 840 bp, Artificial Sequence
  derived and/or modified sequence
atgctttctccagctaatggagaacagctccacctggtgaactacgtggaggattatctggattcaatcgagagtctcccttttgacctgcaaaggaatgtgtcattaatgcgtgagatcgatgcaaaataccaggagatccttaaggagctggacgagtgctacgagcggttttctagggagaccgatggggcacagaaacgcagaatgctccattgcgttcagcgcgctctcatccgaagtcaggagcttggtgatgaaaaaatccaaatcgtgagtcaaatggtggagctggtggagaataggaccaggcaggtggatagtcatgtggaactgtttgaggcgcagcaggagctgggggacacggcaggcaattcagggaaagccggagctgacagaccaaagggtgaagccgctgcccaagcagacaaacctaatagtaaaagatcaaggaggcaacgaaataatgaaaatagagaaaatgcttcctcaaatcatgatcacgatgacggagcgagcggaaccccgaaagaaaaaaaggctaaaacctcgaaaaagaagaagaggtctaaggcaaaagccgagcgagaagcatcccccgcagacctccccattgatcctaacgaacctacctattgtctgtgtaatcaggtctcatatggagaaatgataggatgtgacaacgatgagtgtcctattgagtggtttcatttctcttgcgtggggctgaatcacaaacccaaaggcaaatggtactgtcctaaatgccgaggggagaacgaaaagaccatggacaaggccctggaaaaaagcaagaaggagcgcgcatataaccggtag

SEQ ID NO: 259355 - protein, 799 aa, Artificial Sequence
  derived and/or modified sequence
MNLGKELSNETHVSNDQQSATVSDGELTGADLKDCVSNNSLSSNASLPSVQSCRRLRERRVASWAVSFERLLQDPVGVRYFSDFLRKEFSEENILFWQACEYFNHVPAHDKKELSYRAREIFSKFLCSKATTPVNIDSQAQLADDVLRAPHPDMFKEQQLQIFNLMKFDSYTRFLKSPLYQECILAEVEGRALPDSQQVPSSPASKHSLGSDHSSVSTPKKLSGKSKSGRSLNEELGDEDSEKKRKGAFFSWSRTRSTGRSQKKREHGDHADDALHANGGLCRRESQGSVSSAGSLDLSEACRTLAPEKDKATKHCCIHLPDGTSCVVAVKAGFSIKDILSGLCERHGINGAAADLFLVGGDKPLVLHQDSSILESRDLRLEKRTLFRLDLVPINRSVGLKAKPTKPVTEVLRPVVARYGLDLSGLLVRLSGEKEPLDLGAPISSLDGQRVVLEEKDPSRGKASADKQKGVPVKQNTAVNSSSRNHSATGEERTLGKSNSIKIKGENGKNARDPRLSKREESIAKIGKKKYQKINLDEAEEFFELISKAQSNRADDQRGLLRKEDLVLPEFLRLPPGSTELTLPTPAAVAKGFSKRSATGNGRESASQPGEQWEPVQESSDSPSTSPGSASSPPGPPGTTPPGQKSPSGPFCTPQSPVSLAQEGTAQIWKRQSQEVEAGGIQTVEDEHVAELTLMGEGDISSPNSTLLPPPSTPQEVPGPSRPGSGTHGSRDLPVNRIIDVDLVTGSAPGRDGGIAGAQAGPGRSQASGGPPTSDLPGLGPVPGEPAKPKTSAHHATFV

SEQ ID NO: 259356 - DNA, 2400 bp, Artificial Sequence
  derived and/or modified sequence
atgaacctgggcaaggagctgagcaacgagacccacgtgagcaacgaccagcagagcgccaccgtgagcgacggcgagctgaccggcgccgacctgaaggactgcgtgagcaacaacagcctgagcagcaacgccagcctgcccagcgtgcagagctgcagaagactgagagagagaagagtggccagctgggccgtgagcttcgagagactgctgcaggaccccgtgggcgtgagatacttcagcgacttcctgagaaaggagttcagcgaggagaacatcctgttctggcaggcctgcgagtacttcaaccacgtgcccgcccacgacaagaaggagctgagctacagagccagagagatcttcagcaagttcctgtgcagcaaggccaccacccccgtgaacatcgacagccaggcccagctggccgacgacgtgctgagagccccccaccccgacatgttcaaggagcagcagctgcagatcttcaacctgatgaagttcgacagctacaccagattcctgaagagccccctgtaccaggagtgcatcctggccgaggtggagggcagagccctgcccgacagccagcaggtgcccagcagccccgccagcaagcacagcctgggcagcgaccacagcagcgtgagcacccccaagaagctgagcggcaagagcaagagcggcagaagcctgaacgaggagctgggcgacgaggacagcgagaagaagagaaagggcgccttcttcagctggagcagaaccagaagcaccggcagaagccagaagaagagagagcacggcgaccacgccgacgacgccctgcacgccaacggcggcctgtgcagaagagagagccagggcagcgtgagcagcgccggcagcctggacctgagcgaggcctgcagaaccctggcccccgagaaggacaaggccaccaagcactgctgcatccacctgcccgacggcaccagctgcgtggtggccgtgaaggccggcttcagcatcaaggacatcctgagcggcctgtgcgagagacacggcatcaacggcgccgccgccgacctgttcctggtgggcggcgacaagcccctggtgctgcaccaggacagcagcatcctggagagcagagacctgagactggagaagagaaccctgttcagactggacctggtgcccatcaacagaagcgtgggcctgaaggccaagcccaccaagcccgtgaccgaggtgctgagacccgtggtggccagatacggcctggacctgagcggcctgctggtgagactgagcggcgagaaggagcccctggacctgggcgcccccatcagcagcctggacggccagagagtggtgctggaggagaaggaccccagcagaggcaaggccagcgccgacaagcagaagggcgtgcccgtgaagcagaacaccgccgtgaacagcagcagcagaaaccacagcgccaccggcgaggagagaaccctgggcaagagcaacagcatcaagatcaagggcgagaacggcaagaacgccagagaccccagactgagcaagagagaggagagcatcgccaagatcggcaagaagaagtaccagaagatcaacctggacgaggccgaggagttcttcgagctgatcagcaaggcccagagcaacagagccgacgaccagagaggcctgctgagaaaggaggacctggtgctgcccgagttcctgagactgccccccggcagcaccgagctgaccctgcccacccccgccgccgtggccaagggcttcagcaagagaagcgccaccggcaacggcagagagagcgccagccagcccggcgagcagtgggagcccgtgcaggagagcagcgacagccccagcaccagccccggcagcgccagcagcccccccggcccccccggcaccaccccccccggccagaagagccccagcggccccttctgcaccccccagagccccgtgagcctggcccaggagggcaccgcccagatctggaagagacagagccaggaggtggaggccggcggcatccagaccgtggaggacgagcacgtggccgagctgaccctgatgggcgagggcgacatcagcagccccaacagcaccctgctgcccccccccagcaccccccaggaggtgcccggccccagcagacccggcagcggcacccacggcagcagagacctgcccgtgaacagaatcatcgacgtggacctggtgaccggcagcgcccccggcagagacggcggcatcgccggcgcccaggccggccccggcagaagccaggccagcggcggcccccccaccagcgacctgcccggcctgggccccgtgcccggcgagcccgccaagcccaagaccagcgcccaccacgccaccttcgtgtag

SEQ ID NO: 259357 - DNA, 2400 bp, Artificial Sequence
  derived and/or modified sequence
atgaatcttggtaaagagcttagcaacgagactcatgtctctaatgatcaacagagtgctactgtgtccgacggtgagttgaccggcgccgacctgaaggactgcgtctctaataatagcttatctagcaatgcatccctgccatcagttcagtcctgccgtagactaagagaacgcagggtcgcgagttgggcggtctccttcgaaaggcttcttcaggacccggttggggtcaggtacttctctgacttcttaagaaaggaatttagcgaggagaacatattattctggcaggcttgtgaatacttcaaccacgtgcctgcccatgacaaaaaggagctgagctaccgagcccgagagatctttagcaagttcctgtgtagcaaggctacaactcctgtgaacatcgactctcaggcgcagcttgctgatgacgtgctgagggctccccacccagacatgtttaaagaacaacagttgcagatctttaacctgatgaagttcgacagctatacccgcttcctgaaatcacccctttaccaagagtgtattctcgctgaggttgagggccgtgcattgcccgatagtcagcaggttccgagcagcccagcttctaaacacagcctgggatcagaccactcaagcgtaagtaccccaaagaagctgtccgggaagagtaagtctggtagatcgctgaatgaagagcttggcgacgaggactctgagaaaaaacggaagggagcttttttttcctggtctagaacacggagtacaggccgctcccagaagaaacgcgagcatggcgatcacgcggacgacgctctgcacgctaatggagggctctgtaggagagaaagccaggggtctgtcagttccgcgggttcactcgatcttagcgaagcctgtcgcacgttggctccagaaaaagataaggcaacaaagcattgctgtatccacctgcctgatggcacaagctgtgtcgtcgccgtcaaggccggcttttctatcaaagatatattgagcggtttatgcgagcggcatggtatcaatggagccgccgccgatttatttctcgtgggaggcgacaagccactggtactgcaccaggactcaagtattctggaatctagggacctccgtctggaaaaacggactctattccgtctggacctggtaccaattaatcggagtgttggactcaaagcgaagcccacaaagcctgtgaccgaagtcttaaggccagttgtggcaaggtatggactggatctgtcaggcctcttagtccgtctgagcggggagaaggaaccgctggatcttggcgctcccatttctagtcttgatggtcagcgcgtggtacttgaggaaaaagatccttcacgtggaaaagcatctgctgataagcagaagggtgttcctgtgaagcaaaacacagctgtgaactcctctagccggaaccactccgcaactggcgaagagagaacactgggcaagagtaacagtattaagatcaagggtgaaaatggcaagaacgcacgcgacccaagactttctaagagagaggagagcattgctaagatcggcaaaaaaaagtatcaaaagataaacctcgacgaagccgaagagtttttcgaactgatctctaaggcacaatcaaaccgagcggacgatcagaggggcttacttaggaaagaggacttggttctccccgagtttttgcgactaccccccggcagcacagaattgacattgccaacgccggccgctgttgctaagggtttctccaagcgctcagcaacggggaacgggagggaaagcgccagtcaaccaggagagcaatgggagcctgttcaggaatctagtgacagtccatccacctcaccggggagtgcgagctcaccacccggccctcctggcacgacacctcccggacagaagagcccatctggccccttttgtacaccccagtcccctgtgagcctagctcaggaaggcaccgcacagatctggaagcgtcaatcccaggaggtggaggcagggggaatccagaccgtcgaggacgagcacgtcgcagaattaactctgatgggggaaggcgacatcagcagccccaacagcacgctgctaccccctccctccacgccgcaggaagttccaggcccctcccggcccggatcggggacacatggatcccgagaccttccggtgaatcgtattatagatgtggatcttgttacggggagcgctcccgggagggatggaggtatcgctggagctcaggccggcccaggaagatcccaagcgtctgggggtccacctacatccgacctcccaggcctggggcctgtccccggtgagccagcaaaacccaagacctccgcccatcacgccacattcgtctag

SEQ ID NO: 259358 - DNA, 2400 bp, Artificial Sequence
  derived and/or modified sequence
atgaacctgggcaaggagctgagcaatgagacccacgtgtccaatgaccagcagagcgccaccgtgtctgatggagagctgaccggggctgacctgaaggactgtgtgagcaacaacagcctgagcagcaatgccagcctgcccagcgtgcagagctgccggcggctgcgggagaggagagtggcctcctgggccgtgtcctttgagcggctgctgcaggaccctgtgggcgtgcgctacttcagtgacttcctgaggaaggagttcagcgaggagaacatcctcttctggcaggcctgtgagtacttcaaccacgtgcctgcccatgacaagaaggagctgagctaccgggcccgggagatcttcagcaagttcctgtgcagcaaggccaccacccctgtgaacatcgacagccaggcccagctggctgatgatgtgctgcgggccccccacccagacatgttcaaggagcagcagctgcagatcttcaacctgatgaagtttgacagctacacccgcttcctgaagagccccctgtaccaggagtgcatcctggccgaggtggagggccgggccctgcctgacagccagcaggtgcccagcagccctgccagcaagcacagcctgggcagtgaccacagctctgtgtccacccccaagaagctgagcggcaagagcaagagcggccgcagcctgaatgaggagctgggagatgaagattctgagaagaagaggaagggggccttcttctcctggagcaggaccaggagcacaggccgcagccagaagaagcgggagcacggggaccatgctgatgatgccctgcacgccaacggcggcctgtgcagaagagagagccagggctctgtgagcagcgctggcagcctggacctgtctgaggcctgcaggaccctggcccctgagaaggacaaggccaccaagcactgctgcatccacctgcctgatggcaccagctgtgtggtggccgtgaaggccggcttcagcatcaaggacatcctgagcggcctgtgtgaaagacatggcatcaacggggctgctgctgacctcttcctggtgggcggggacaagcccctggtgctgcaccaggacagcagcatcctggagagccgggacctgcggctggagaagaggaccctcttccggctggacctggtgcccatcaacagatctgtgggcctgaaggccaagcccaccaagcctgtgacagaggtgctgcggcctgtggtggcccgctatggcctggacctgagcggcctgctggtgcggctgtctggagagaaggagcccctggacctgggcgcccccatcagcagcctggatggccagagggtggtgctggaggagaaggaccccagccggggcaaggccagcgctgacaagcagaagggcgtgcctgtgaagcagaacacagctgtgaacagcagcagcaggaaccacagcgccactggagaggagaggaccctgggcaagagcaacagcatcaagatcaagggggagaatggcaagaatgcccgggacccccggctgagcaagcgggaggagagcatcgccaagattggcaagaagaagtaccagaagatcaacctggatgaagctgaggagttctttgagctgatcagcaaggcccagagcaacagagcagatgaccagaggggcctgctgaggaaggaggacctggtgctgcctgagttcctgcggctgcccccaggcagcacagagctgaccctgcccaccccagctgctgtggccaagggcttcagcaagaggtctgccactggaaatggccgggagagcgccagccagcctggagagcagtgggagcctgtgcaggagagcagtgacagccccagcaccagccctggcagcgccagcagccccccaggccccccaggcaccaccccacctggccagaagagccccagcggccccttctgcaccccccagagccctgtgtccctggcccaggagggcacagcccagatctggaagaggcagagccaggaggtggaggccggcggcatccagacagtggaggatgagcacgtggccgagctgaccctgatgggagagggggacatcagcagccccaacagcaccctgctgcccccacccagcaccccccaggaggtgcccggccccagcaggcctggcagcggcacccacggcagccgggacctgcctgtgaaccgcatcattgatgtggacctggtgactggaagtgcccctggaagagatggcggcattgctggggcccaggccggccctggccgcagccaggccagcggcggcccccccaccagtgacctgcccggcctgggccctgtgcctggagagcccgccaagcccaagaccagcgcccaccacgccacctttgtgtag

SEQ ID NO: 259359 - DNA, 2400 bp, Artificial Sequence
  derived and/or modified sequence
atgaacctgggcaaggagctgagcaacgagacccacgtgagcaacgaccagcaaagtgccacagtttctgatggcgaactcacaggggctgacttgaaggactgcgtctccaacaactcactgagttcaaatgccagcctgcctagcgtgcaatcttgcaggcgcttacgtgaacgccgagttgcttcatgggccgtgagtttcgagcgcttactgcaggaccccgtgggagtgcgatatttcagcgactttctgagaaaggagtttagcgaagaaaacattctgttttggcaggcatgcgagtacttcaaccacgtgcccgcacacgataaaaaggaactttcttacagggctagggaaatcttcagcaagttcctgtgtagcaaagcaacaacaccagtgaatatcgattcacaggcgcagctagctgatgacgtcctgcgcgccccgcacccggacatgtttaaagagcagcagcttcaaatctttaacctaatgaagtttgatagctacacacgatttctgaaatcgcccctgtatcaggaatgtatcctcgctgaggtggagggccgcgccctgcccgacagccagcaggtgccgtcttctcccgcttccaagcattccctgggctccgaccatagcagcgtgagcactcctaaaaagctaagtggcaaatcaaagtcaggcagatctctcaatgaagaacttggtgatgaggatagcgaaaaaaaacgaaagggcgctttcttcagctggtcccgaacccgttctacaggacggtcccagaaaaagcgtgagcatggcgaccacgccgatgatgccctgcacgccaatgggggtttatgtcgcagggagagccaggggagtgttagcagcgcaggcagccttgatctgtcagaagcatgtcgaaccctagcccccgagaaggataaagccacaaagcactgttgcatccacctgccggacggtacaagttgcgttgtcgccgtaaaagcaggtttttctatcaaagacattctgagcggcctttgtgagcgacacggtattaatggggccgcagccgacctgttcctggtcggaggcgataaaccactggttttgcatcaggacagttcgattttggagtcacgggatctgcgactcgagaaaaggaccttgttcagattagatttggtgccgatcaatcgcagtgttggcctgaaggccaagcccactaaaccagtgacagaagttctgagacccgtcgttgctagatacgggctagacctgtcaggcttattagtgcgactgagcggcgaaaaagaaccactggatctgggggccccaatctcctccttggacgggcagcgggttgtgctagaagaaaaagaccccagtcgaggcaaagcttccgctgacaaacagaaaggcgtgccggtcaagcagaacacagccgtgaacagctcaagcaggaaccactctgctaccggcgaggagaggacactgggaaagagcaatagcatcaaaatcaaaggggagaatgggaagaatgctcgcgacccacggttgagcaagcgtgaggagagtatcgccaagattggcaagaaaaaatatcaaaagattaatttggatgaggccgaagaattcttcgagctaatttctaaggcccaatcaaacagagctgacgaccagcgagggctcttgcgcaaagaggacctagtactgcccgaattcctccgcctgcctccaggcagcactgaattgactttgcccacgcccgcagcggtcgcaaaaggcttctcaaaaagatctgccaccggcaatggacgcgagtcagcatcacaaccaggagaacagtgggaacccgtgcaagaatcatcagacagccctagcacctcgccaggatccgcttcgtcccctccagggcctcctggtacaacaccccctgggcaaaagtccccctccggccccttctgtactccccagtcgcctgtctctctagcccaggaaggtactgcccagatttggaaaagacaatcccaagaggtcgaggctggtggaattcagactgtagaggatgaacatgtagccgaattgactcttatgggagagggagatatcagcagccccaactccactctcctgcctcctcccagtacacctcaggaggtacctggacctagtaggccgggcagtggcactcacggctccagggatctgccagttaatagaattattgacgtcgacctggtcacagggtccgcacctggccgggacgggggcattgcgggagcacaagccggaccagggaggtcacaagcgagtggaggacccccaacatccgatctcccagggctcggtccagttcctggcgaaccagccaaaccaaagaccagtgctcatcatgccacattcgtatag

SEQ ID NO: 259360 - DNA, 2400 bp, Artificial Sequence
  derived and/or modified sequence
atgaatctgggtaaagaactctcaaatgagacccacgtgagtaatgatcaacagagcgccaccgtctctgacggggagctgactggagctgatttgaaggactgtgtatcaaacaacagcctgtcctccaatgcaagcctgccatcagtccaatcatgtaggaggctccgcgaacgcagagtcgccagctgggcagtgagctttgagcggttgttgcaggatcccgtgggcgtgaggtattttagtgactttctgaggaaggaattttctgaagagaacattctattctggcaagcgtgcgagtatttcaaccacgtccccgctcacgataaaaaggagttgtcataccgggctagagagatcttctcaaagtttctgtgcagcaaagcgactacacccgttaacattgattcccaggctcagctggcagacgacgtcctgcgagcccctcacccggatatgttcaaggaacagcagctacagatcttcaacctcatgaaatttgacagctacacaagattcctaaagtcacccctgtaccaggagtgtatcttggcggaggtcgagggcagggccttacccgacagccagcaggtaccctcttccccagcttccaagcactcactgggatcggatcatagttctgtcagtacacccaagaaacttagtggtaagagtaagtcaggaaggtcactcaatgaagagttgggagacgaagattcagaaaagaaaagaaaaggcgcattcttttcttggagtagaacccggtccacaggtcgctctcagaagaagcgagagcacggagaccacgctgatgacgccctccatgccaacgggggtctttgtagacgggagtcacaaggtagcgttagctccgcaggatcactggacctttctgaggcttgtcgcacacttgcccctgaaaaggacaaagccaccaaacattgctgcatccatctccctgacggcacttcctgtgtcgtggccgtcaaagccggtttctctatcaaggatatactcagcggcctttgtgaaaggcatggcatcaatggtgccgcagcagacctctttctggttggtggtgataaaccattagttctgcaccaggattcttctatcctagaaagtcgggacttacggctagagaaaaggacactcttccggctggatctggttccaatcaatcggagcgtcggccttaaggctaaaccgaccaagcctgtgacagaggttctgcgccctgtggtagccaggtatggcctagacctgagtggcttactcgtcagactctccggagagaaagagccattggatttaggggcacccatatctagcctggacggccagagagtagtactcgaggaaaaagatccatccaggggaaaggcctctgcagacaagcaaaaaggcgtgcccgtgaaacagaacacggcggtgaatagcagctccagaaatcatagtgctactggcgaggagcggactcttggaaaaagcaactccataaaaatcaaaggcgaaaatgggaaaaacgccagagaccccagactgagcaaaagagaggagagcatcgcaaagattgggaagaagaaataccagaagatcaacttagacgaagcggaggagttcttcgagctgattagcaaagcccagagcaaccgagccgacgaccagaggggtttgctcagaaaggaagatctggttctgcccgagttccttcggctcccgcctggatccaccgagcttacactccctacacccgcagctgtggccaaagggtttagcaagagaagcgccactgggaacggtagggaaagcgcctcccagcccggagaacagtgggagccagtacaggaatcttctgacagtccgtccacatcacccggttctgcctctagcccacctgggcctccaggcaccactcctccgggtcagaagagcccctccggccctttctgtaccccgcaatcccctgtaagcttggcacaggaaggcactgcccagatatggaaaaggcagtctcaagaagtcgaggccggtggcatccagactgtagaggacgagcacgtcgcagaacttaccttgatgggagagggcgacatcagctcccctaattctacgctgctgcccccaccctccacccctcaggaggtccctggccctagtaggccagggagcgggacccatggctcccgtgatctgcccgtgaacaggataatcgatgtggacctagtcaccggtagcgccccaggtagagacggaggcattgctggagcacaggcagggccagggagatctcaggcctccgggggtcctccgactagcgatctgcccggtttgggtcccgttcccggagaacctgccaagcctaaaactagcgcacaccatgccacctttgtgtag

SEQ ID NO: 259361 - DNA, 3010 bp, Artificial Sequence
  derived and/or modified sequence
agaatagattcattggcagctgtaattaaggttgtgaactgcaccacgatgctaaaaaaaacaaattctctgcagctgttttactgactgagaaattacccctgtcggccgaagttttattcttctgatttggtagaggaaatagtttaaaaatgatctcacagcgtgatttatgtaaacggcgcttctttctttggatgagacaattgagatagagtctgaaaccctggcaagccacagcttcctgcagtgtcctgttgccatgggttacgaagggagcgagagggaacttcatcggaaatgcctttaaacttttctcacacgcacaagctgcggtgttgaatggtgtgtcttagacccgggtgcctagtgtggctcggtgccttacaatgaatttggggaaagagttgtcaaacgaaacccatgtttctaatgaccagcagtctgcaactgtgtctgatggcgagttgacgggcgccgacctgaaggactgcgtcagcaacaacagcctgagcagcaatgccagcctccccagcgtgcagagctgccggcgcctgcgtgagaggagggtcgccagctgggccgtgtcctttgagcgcctgctgcaggaccccgtcggtgtccgctacttctctgattttctaaggaaagaattcagtgaagaaaacattttattctggcaggcctgtgaatattttaatcatgttcctgcacatgacaaaaaggagctttcctacagggcccgggagattttcagtaagtttctctgcagcaaagccaccaccccggtcaacatcgacagccaggcccagctagcagacgacgtcctccgcgcacctcacccagacatgttcaaggagcagcagctgcagatcttcaatctcatgaagtttgatagctacactcgctttctgaagtccccgctgtaccaggaatgcatcctggcggaagtggagggccgtgcactcccggactcgcagcaggtccccagcagcccggcttccaagcacagcctcggttcagaccactccagtgtgtccacgccaaaaaagttaagtggaaaatcaaaatccggccgatccctgaatgaagagctgggggatgaggacagcgagaagaagcggaaaggcgcgtttttctcgtggtcgcggaccaggagcaccgggaggtcccagaaaaagagggagcacggggaccacgcagacgacgccctgcatgccaatggaggcctgtgtcgccgagagtcgcagggctctgtgtcctctgcggggagcctggacctgtcggaggcctgcaggactttggcacccgagaaggacaaggccaccaagcactgctgcattcatctcccggatgggacatcctgcgtggtggctgtcaaggcgggcttctccatcaaagacatcctgtccggactctgtgagcggcatggcatcaacggggcggccgcggacctcttcctggtgggcggggacaagcctctggtgctgcaccaagacagtagcatcttggagtcaagggacctgcgcctagaaaagcgcaccttgtttcggctggatcttgttccgattaaccggtcagtgggactcaaggccaagcccaccaagcccgtcacggaggtgctgcggcccgtggtggccagatacggcctggacctcagtggcctgctggtgaggctgagtggagagaaggagcccctggaccttggcgcccctatatcgagtctggacggacagcgggttgtcttggaggagaaggatccttccagaggaaaggcatccgcagataaacagaaaggtgtgccagtgaaacagaacacagctgtaaattccagctccagaaaccactcggctacgggagaggaaagaacactaggcaagtctaattctattaaaataaaaggagaaaatggaaaaaatgctagggatccccggctttcaaagagagaagaatctattgcaaagattgggaaaaaaaaatatcagaaaattaatttggacgaagcagaggagttttttgagcttatttccaaagctcagagcaacagagcagatgaccaacgtgggctgctaaggaaggaagacctggtgttgccagagttcctccgtttacctcctggttccacagaactcaccctccccactccagctgctgtggccaagggctttagcaagagaagcgccacaggcaacggccgggagagcgcctcccagcctggcgagcagtgggagccagtccaggagagcagcgacagcccgtccaccagcccgggctcagcctccagcccccctggacctcctgggacgaccccccccgggcagaagtctcccagcgggcccttctgcactccccagtcccccgtctccctcgcgcaggagggcaccgcccagatctggaagaggcagtctcaggaagtggaggccgggggcatccagacggtggaggatgagcacgtggccgagctgaccctgatgggggagggggacatcagcagccccaacagcaccttgctgccgccgccctccaccccccaggaagtgccaggaccttccagaccaggaagtgggacccatggcagccgagacctcccagtcaacagaatcatcgatgtggatcttgtaactggctcggcgcccgggcgggatggtggcatagcgggggcacaggctggccctgggaggtcgcaggccagtggtgggcctcctacatcagacctccctggcttgggccccgtcccgggtgagcctgctaagcccaagaccagcgctcaccacgccaccttcgtctgagctgccctggcctggccaactctcctgtggacatgtcggggtggggcagcccaggtggattctgtgggcctcaggggggccaccctggccaccacaccctcaggagcccagccaggagggcagggggtgacctcgctggaggcactggccccggacattcgccatgctggccatggggctccctggccctggcctcctgctgcccaataaagcatttctga

SEQ ID NO: 259362 - protein, 156 aa, Artificial Sequence
  derived and/or modified sequence
MALEKSLVRLLLLVLILLVLGWVQPSLGKESRAKKFQRQHMDSDSSPSSSSTYCNQMMRRRNMTQGRCKPVNTFVHEPLVDVQNVCFQEKVTCKNGQGNCYKSNSSMHITDCRLTNGSRYPNCAYRTSPKERHIIVACEGSPYVPVHFDASVEDST

SEQ ID NO: 259363 - DNA, 471 bp, Artificial Sequence
  derived and/or modified sequence
atggctcttgagaaatctctcgtgagactgctgctccttgtgctcattctcctggtacttgggtgggtgcagcccagcctgggtaaagaatcgcgggctaagaagttccagagacagcacatggactcggattccagtccttcgagctcttcaacttactgtaaccagatgatgcgacggcggaatatgacacaagggagatgcaagccagtcaacacctttgtccacgagcctctggttgatgttcaaaacgtttgtttccaagaaaaggtgacatgcaaaaacggtcagggaaactgttataagtccaattcttccatgcacatcactgattgcaggttaacaaatggtagccgctaccctaattgtgcctacagaactagccctaaggaaagacacatcatcgtggcttgtgaagggagcccctacgtcccagtccactttgatgcatccgtcgaagacagcacatag

SEQ ID NO: 259364 - DNA, 471 bp, Artificial Sequence
  derived and/or modified sequence
atggctctcgagaaatctctagtgaggctcttgcttctggtgttgattctcctggtactcggctgggtgcaaccgagcctaggcaaggagtctcgggctaagaagttccagcggcagcacatggattcagactctagcccttccagttcctccacatattgtaatcaaatgatgaggaggaggaacatgacacaggggcggtgtaagccagtgaacacgtttgtgcatgagcctctggtggatgtgcagaatgtatgctttcaggaaaaggtcacctgcaagaatggccaaggcaattgttacaaatctaactcgtccatgcatataactgactgccgcttgaccaacggctcccggtacccaaattgtgcttatcgtacatcccccaaggaaaggcacatcatcgtcgcatgcgagggctcaccttacgttccagtgcacttcgacgcgtcagtggaggattccacgtag

SEQ ID NO: 259365 - DNA, 471 bp, Artificial Sequence
  derived and/or modified sequence
atggcactggagaaatctctggtgagactcctgctgctcgtgctaatcctgcttgtcctgggatgggtgcaaccaagcttaggaaaggagtctagggcaaagaaattccagcggcagcacatggatagtgacagctccccttcaagtagtagtacttactgtaatcagatgatgcgaagacggaacatgactcaggggcggtgcaagccagtgaacactttcgttcatgaacctcttgtggatgtgcagaacgtttgtttccaggaaaaggtgacctgcaagaatggccaggggaattgttacaagagcaactcctctatgcacattaccgattgtcgcctcaccaacggatccaggtatcctaattgtgcataccgcaccagtcctaaggagcggcacatcatagtggcctgcgaggggtccccctatgtgcccgttcattttgacgcctctgttgaagactccacatag

SEQ ID NO: 259366 - DNA, 471 bp, Artificial Sequence
  derived and/or modified sequence
atggctctcgagaagagcctcgtcaggctgctgctgctggtgctgatactgttagtgctcggctgggtgcagccgagcttgggcaaggagagccgggctaaaaaattccagagacagcatatggattccgatagttctccatctagtagctccacttattgtaatcagatgatgcgcaggagaaacatgacgcagggcagatgtaaaccagtgaacaccttcgtacacgaaccattggtagacgtgcagaacgtgtgcttccaggagaaagtgacatgcaagaatgggcaaggcaactgttacaagtcaaactctagtatgcatattacagattgccgtctcactaatggatcacggtaccctaactgcgcttaccgcacttcgccaaaggagcgacacattatcgttgcatgcgaggggagtccgtatgtgccggtgcactttgacgcctccgtggaggacagtacatag

SEQ ID NO: 259367 - DNA, 471 bp, Artificial Sequence
  derived and/or modified sequence
atggccctggagaagagcctggtgcggctgctgctgctggtgctgatcctgctggtgctgggctgggtgcagcccagcctgggcaaggagagccgggccaagaagttccagaggcagcacatggacagcgacagcagccccagcagcagcagcacctactgcaaccagatgatgagaagaagaaacatgacccagggccgctgcaagcctgtgaacacctttgtgcatgagcccctggtggatgtgcagaatgtgtgcttccaggagaaggtgacctgcaagaatggccagggcaactgctacaagagcaacagctccatgcacatcacagactgccgcctgaccaacggcagccgctaccccaactgtgcctaccgcaccagccccaaggagcggcacatcatcgtggcctgtgagggcagcccctacgtgcctgtgcactttgatgcctctgtggaggacagcacctag

SEQ ID NO: 259368 - DNA, 471 bp, Artificial Sequence
  derived and/or modified sequence
atggccctggagaagagcctggtgcggctgctgctgctggtgctgatcctgctggtcctcggctgggtccagccctcactggggaaggaaagtcgggccaagaagtttcaacgccagcatatggactctgacagcagtcccagcagttcttcgacgtactgtaaccaaatgatgcggagaaggaatatgacacaaggccggtgtaaaccagttaacacgttcgtccatgagcctctggtggacgtccagaacgtttgtttccaggaaaaagtcacttgtaaaaacggacagggcaactgctacaagtccaacagttccatgcatatcaccgactgtcgactaacaaatggttctagataccctaattgcgcttacagaacctcacccaaggaacgccacatcatcgtagcctgcgaagggtccccttatgtgccggtccacttcgacgcttccgtcgaagattccacttag

SEQ ID NO: 259369 - DNA, 471 bp, Artificial Sequence
  derived and/or modified sequence
atggccctggagaagagcctggtgcggctgctgctgctggtgctgatcctgctggtcttggggtgggtacaaccatctctgggtaaagagagccgcgccaagaaatttcagcgccagcacatggacagcgatagtagtcctagttcctcgagtacgtactgcaaccagatgatgcggcgcaggaatatgactcaagggcggtgtaagcccgtgaacacctttgtccatgagcctcttgtggacgtccaaaacgtttgctttcaagaaaaggttacttgcaaaaacggccagggcaactgttacaagtctaactcatcaatgcacattacagattgtcgcctgacgaatggaagcagatacccaaactgtgcatacagaactagtcctaaggagcgtcacatcatagtggcgtgcgagggctccccatacgtgccggtccacttcgatgcctccgttgaagattccacctag

SEQ ID NO: 259370 - DNA, 471 bp, Artificial Sequence
  derived and/or modified sequence
atggccctggagaagagcctggtgcggctgctgctgctggtgctgattttactggtgctgggctgggtgcagccaagtctgggcaaagaatctagggctaaaaaattccagaggcagcatatggattccgatagctctccctcctctagcagcacatactgcaatcagatgatgcggaggcgaaacatgactcaggggcgctgcaagcccgtgaacacgttcgtgcatgaacccctggtcgatgtgcaaaacgtctgtttccaggagaaggtgacttgcaaaaacggccagggtaactgttataagagtaactcttccatgcacattaccgactgtcggctgacaaatggctcccggtatccgaactgcgcttaccggactagccccaaagagcggcacatcatcgttgcctgcgaaggctccccgtacgtgcctgtgcacttcgatgcttccgtggaagactctacttag

SEQ ID NO: 259371 - DNA, 471 bp, Artificial Sequence
  derived and/or modified sequence
atggccctggagaagagcctggtgcggctgctgctgctggtgctgatccttcttgtgctggggtgggtgcagccaagcctgggcaaagagtctcgagcgaagaagtttcagcgccaacatatggatagcgactcttcaccctcttcttcttctacatactgtaaccaaatgatgcggcggagaaacatgacacagggaagatgcaaaccagttaacacattcgtgcatgagcccctggtcgacgttcagaatgtttgtttccaggagaaggtgacgtgcaaaaacggacagggcaattgttacaaaagtaacagctcaatgcacataaccgactgtagactgaccaacggatccaggtacccaaactgcgcttataggacgagccccaaagagcggcacatcatcgtcgcgtgcgaaggaagcccttatgtacccgtgcacttcgacgcttccgttgaggactcaacatag

SEQ ID NO: 259372 - DNA, 471 bp, Artificial Sequence
  derived and/or modified sequence
atggccttggagaaatccctggttcgcttgctcttgctggtgctcatcctacttgtgcttgggtgggtccagcccagcctgggaaaggagtcccgcgctaaaaagttccagagacagcacatggattccgactcaagtccatcctccagctctacctactgtaaccagatgatgcggcgtcgcaacatgactcagggtaggtgtaagccagttaatactttcgtccacgagcctttggttgacgttcagaacgtctgctttcaagaaaaagtgacctgcaagaacggccaaggtaactgctacaaatctaacagttccatgcacatcactgattgtcggctgaccaacggaagcaggtatccgaactgcgcgtatcgcacgtcaccaaaagaacggcacatcatcgtcgcatgtgagggaagcccgtacgtgcctgtgcattttgacgcgagtgtcgaagatagtacctag

SEQ ID NO: 259373 - DNA, 471 bp, Artificial Sequence
  derived and/or modified sequence
atggccttagaaaaatcactcgtcagactattgctcctggttcttatactcctggttctgggttgggttcagccctccctcggcaaggaaagccgggcaaagaaattccagagacagcacatggatagcgactccagcccctcttctagctcaacatattgcaatcaaatgatgcggaggagaaatatgacccaggggaggtgcaaacccgtaaacacattcgtccacgagcctcttgtggacgtccagaatgtatgtttccaggaaaaagtgacttgcaagaacggtcaaggaaattgttacaagtctaattcttctatgcatatcacggattgtaggctcactaatggcagcaggtatcccaattgcgcctatcgaacttctccgaaagaacggcatattatcgtcgcctgtgaagggagcccatatgtgcccgtgcatttcgacgcgtccgtggaagactctacttag

SEQ ID NO: 259374 - DNA, 471 bp, Artificial Sequence
  derived and/or modified sequence
atggctctcgaaaagtccctagttagattgcttcttctggttcttatcttgctcgtgctagggtgggtgcagcccagcctcggaaaggaatctcgcgctaagaaattccaaagacagcatatggattcagattcgtctcctagcagctccagcacttactgcaatcaaatgatgagaagaagaaatatgactcaagggagatgcaagccagttaatacttttgtacacgagccactcgtcgacgtgcagaatgtgtgttttcaggagaaagtcacatgtaagaacggtcagggtaattgttataagagcaactcttccatgcacattacggactgccgcttgactaatgggtctcgatatccaaattgcgcctacaggacttctcccaaggagcggcatattattgtagcatgtgagggctccccctacgtgcccgtgcacttcgacgcaagcgtcgaggacagcacttag

SEQ ID NO: 259375 - DNA, 471 bp, Artificial Sequence
  derived and/or modified sequence
atggccctcgagaagagcttagtaaggttgctgctgttggtcttgatcttattggtacttggctgggttcagccaagcctcggcaaagaatcacgcgcaaaaaagtttcagcggcagcacatggactcagatagcagcccgagctctagtagcacttactgcaaccagatgatgcgtcggaggaacatgacacagggaagatgcaagccagtcaatacgttcgttcatgaacccctggtggacgtgcaaaacgtatgcttccaggaaaaggtgacttgcaagaatggtcagggcaactgctacaagagcaactcttctatgcacatcaccgattgccgattgaccaacgggtcacgataccccaattgcgcctacagaacaagtcctaaggagcgccacattatcgtggcatgtgagggctctccatacgtgcccgtgcactttgacgccagcgtggaggattctacgtag

SEQ ID NO: 259376 - DNA, 878 bp, Artificial Sequence
  derived and/or modified sequence
gctgagtgattgcagaaactggccttccatctctctcagacaccaagctgcagatccaggtcaccacctagaggggaggaagacctcgctttggagagtgggaataaaacgctcgtggaaaagggtacacgcttttctgggaaagtgaggccaccatggctctggagaagtctcttgtccggctccttctgcttgtcctgatactgctggtgctgggctgggtccagccttccctgggcaaggaatcccgggccaagaaattccagcggcagcatatggactcagacagttcccccagcagcagctccacctactgtaaccaaatgatgaggcgccggaatatgacacaggggcggtgcaaaccagtgaacacctttgtgcacgagcccctggtagatgtccagaatgtctgtttccaggaaaaggtcacctgcaagaacgggcagggcaactgctacaagagcaactccagcatgcacatcacagactgccgcctgacaaacggctccaggtaccccaactgtgcataccggaccagcccgaaggagagacacatcattgtggcctgtgaagggagcccatatgtgccagtccactttgatgcttctgtggaggactctacctaaggtcagagcagcgagataccccacctccctcaacctcatcctctccacagctgcctcttccctcttccttccctgctgtgaaagaagtaactacagttagggctcctattcaacacacacatgcttccctttcctgagtcccatccctgcgtgattttgggggtgaagagtgggttgtgaggtgggccccatgttaacccctccactctttctttcaataaaacgcagttgcaaacacctgatttctgaagc

SEQ ID NO: 259377 - DNA, 1348 bp, Artificial Sequence
  derived and/or modified sequence
agagacttgggttttgctccctaggagccctggaatagctttggccagaattccctatctcccattagaacctctcctttgcgtcctttgttaacctccaagtctacttggtgaaaacgcccacgaagaagtaacaaggactttgttcctagtgtgccaggtttgggcaccagtgctgtagtggctttctctgctgctccttgtgcatcagcagacagatgtggttcacataggaagaaagactaacgtaggcaaagatttgctctttcttcagcagccctagaaagacggcggcctgggtgattcaccactccttcctcacgtccttgattttatttgaactgagctccagatgctcctcccacccttttcctcttggaagccaaacccctttgtaatctgtataaggtccacaccccgggagctgagtgattgcagaaactggccttccatctctctcagacaccaagctgcagatccaggcttttctgggaaagtgaggccaccatggctctggagaagtctcttgtccggctccttctgcttgtcctgatactgctggtgctgggctgggtccagccttccctgggcaaggaatcccgggccaagaaattccagcggcagcatatggactcagacagttcccccagcagcagctccacctactgtaaccaaatgatgaggcgccggaatatgacacaggggcggtgcaaaccagtgaacacctttgtgcacgagcccctggtagatgtccagaatgtctgtttccaggaaaaggtcacctgcaagaacgggcagggcaactgctacaagagcaactccagcatgcacatcacagactgccgcctgacaaacggctccaggtaccccaactgtgcataccggaccagcccgaaggagagacacatcattgtggcctgtgaagggagcccatatgtgccagtccactttgatgcttctgtggaggactctacctaaggtcagagcagcgagataccccacctccctcaacctcatcctctccacagctgcctcttccctcttccttccctgctgtgaaagaagtaactacagttagggctcctattcaacacacacatgcttccctttcctgagtcccatccctgcgtgattttgggggtgaagagtgggttgtgaggtgggccccatgttaacccctccactctttctttcaataaaacgcagttgcaaacacctgatttctgaagcggttctgtctaggtactgtttctggcattgccttccagcaaggggtaagaactgtaaatctgattcactttggagaacggtgaatggagtaattaaatgccttcccttctgacttgga

SEQ ID NO: 259378 - DNA, 769 bp, Artificial Sequence
  derived and/or modified sequence
gattgcagaaactggccttccatctctctcagacaccaagctgcagatccaggtcactttgtaggtcaccacctagaggggaggaagacctcgctttggagagtgggaataaaacgctcgtggaaaagggtacacgcttttctgggaaagtgaggccaccatggctctggagaagtctcttgtccggctccttctgcttgtcctgatactgctggtgctgggctgggtccagccttccctgggcaaggaatcccgggccaagaaattccagcggcagcatatggactcagacagttcccccagcagcagctccacctactgtaaccaaatgatgaggcgccggaatatgacacaggggcggtgcaaaccagtgaacacctttgtgcacgagcccctggtagatgtccagaatgtctgtttccaggaaaaggtcacctgcaagaacgggcagggcaactgctacaagagcaactccagcatgcacatcacagactgccgcctgacaaacggctccaggtaccccaactgtgcataccggaccagcccgaaggagagacacatcattgtggcctgtgaagggagcccatatgtgccagtccactttgatgcttctgtggaggactctacctaaggtcagagcagcgagataccccacctccctcaacctcatcctctccacagctgcctcttccctcttccttccctgctgtgaaagaagtaactacagttagggctcctattcaacacacacatgcttccctttcctgag

SEQ ID NO: 259379 - DNA, 896 bp, Artificial Sequence
  derived and/or modified sequence
ttgagcactgggtacaaatgtattttggatcaaagaaactccagtattcaaagataggaactgacaggattttaggtcactttgtaggtcaccacctagaggggaggaagacctcgctttggagagtgggaataaaacgctcgtggaaaagggtacacgcttttctgggaaagtgaggccaccatggctctggagaagtctcttgtccggctccttctgcttgtcctgatactgctggtgctgggctgggtccagccttccctgggcaaggaatcccgggccaagaaattccagcggcagcatatggactcagacagttcccccagcagcagctccacctactgtaaccaaatgatgaggcgccggaatatgacacaggggcggtgcaaaccagtgaacacctttgtgcacgagcccctggtagatgtccagaatgtctgtttccaggaaaaggtcacctgcaagaacgggcagggcaactgctacaagagcaactccagcatgcacatcacagactgccgcctgacaaacggctccaggtaccccaactgtgcataccggaccagcccgaaggagagacacatcattgtggcctgtgaagggagcccatatgtgccagtccactttgatgcttctgtggaggactctacctaaggtcagagcagcgagataccccacctccctcaacctcatcctctccacagctgcctcttccctcttccttccctgctgtgaaagaagtaactacagttagggctcctattcaacacacacatgcttccctttcctgagtcccatccctgcgtgattttgggggtgaagagtgggttgtgaggtgggccccatgttaacccctccactctttctttcaataaaacgcagttgcaaacacctga

SEQ ID NO: 259380 - DNA, 471 bp, Artificial Sequence
  derived and/or modified sequence
atggccctggagaagagcctggtgagactgctgctgctggtgctgatcctgctggtgctgggctgggtgcagcccagcctgggcaaggagagcagagccaagaagttccagagacagcacatggacagcgacagcagccccagcagcagcagcacctactgcaaccagatgatgagaagaagaaacatgacccagggcagatgcaagcccgtgaacaccttcgtgcacgagcccctggtggacgtgcagaacgtgtgcttccaggagaaggtgacctgcaagaacggccagggcaactgctacaagagcaacagcagcatgcacatcaccgactgcagactgaccaacggcagcagataccccaactgcgcctacagaaccagccccaaggagagacacatcatcgtggcctgcgagggcagcccctacgtgcccgtgcacttcgacgccagcgtggaggacagcacctag

SEQ ID NO: 259381 - protein, 1562 aa, Artificial Sequence
  derived and/or modified sequence
MSVRLPQSIDRLSSLSSLGDSAPERKSPSHHRQPSDASETTGLVQRCVIIQKDQHGFGFTVSGDRIVLVQSVRPGGAAMKAGVKEGDRIIKVNGTMVTNSSHLEVVKLIKSGAYVALTLLGSSPSSMGISGLQQDPSPAGAPRITSVIPSPPPPPPLPPPQRITGPKPLQDPEVQKHATQILRNMLRQEEKELQRICEVYSRNPASLLEEQIEGARRRVTQLQLKIQQETGGSVDILPLYGDTSQRPSEGRLSLDSQEGDSGLDSGTERFPSLSESLMNRNSVLSDPGLDSPRTSPVIMARVAQHHRRQGSDAAVPSTGDQGVDQSPKPLIIGPEEDYDPGYFNNESDIIFQDLEKLKSRPAHLGVFLRYIFSQADPSPLLFYLCAEVYQQASPKDSRSLGKDIWNIFLEKNAPLRVKIPEMLQAEIDSRLRNSEDARGVLCEAQEAAMPEIQEQIHDYRTKRTLGLGSLYGENDLLDLDGDPLRERQVAEKQLAALGDILSKYEEDRSAPMDFALNTYMSHAGIRLREARPSNTAEKAQSAPDKDKWLPFFPKTKKSSNSKKEKDALEDKKRNPILKYIGKPKSSSQSTFHIPLSPVEVKPGNVRNIIQHFENNQQYDAPEPGTQRLSTGSFPEDLLESDSSRSEIRLGRSESLKGREEMKRSRKAENVPRSRSDVDMDAAAEATRLHQSASSSTSSLSTRSLENPTPPFTPKMGRRSIESPSLGFCTDTLLPHLLEDDLGQLSDLEPEPDAQNWQHTVGKDVVAGLTQREIDRQEVINELFVTEASHLRTLRVLDLIFYQRMKKENLMPREELARLFPNLPELIEIHNSWCEAMKKLREEGPIIKEISDLMLARFDGPAREELQQVAAQFCSYQSIALELIKTKQRKESRFQLFMQEAESHPQCRRLQLRDLIISEMQRLTKYPLLLESIIKHTEGGTSEHEKLCRARDQCREILKYVNEAVKQTENRHRLEGYQKRLDATALERASNPLAAEFKSLDLTTRKMIHEGPLTWRISKDKTLDLHVLLLEDLLVLLQKQDEKLLLKCHSKTAVGSSDSKQTFSPVLKLNAVLIRSVATDKRAFFIICTSKLGPPQIYELVALTSSDKNTWMELLEEAVRNATRHPGAAPMPVHPPPPGPREPAQQGPTPSRVELDDSDVFHGEPEPEELPGGTGSQQRVQGKHQVLLEDPEQEGSAEEEELGVLPCPSTSLDGENRGIRTRNPIHLAFPGPLFMEGLADSALEDVENLRHLILWSLLPGHTMETQAAQEPEDDLTPTPSVISVTSHPWDPGSPGQAPPGGEGDNTQLAGLEGERPEQEDMGLCSLEHLPPRTRNSGIWESPELDRNLAEDASSTEAAGGYKVVRKAEVAGSKVVPALPESGQSEPGPPEVEGGTKATGNCFYVSMPSGPPDSSTDHSEAPMSPPQPDSLPAGQTEPQPQLQGGNDDPRRPSRSPPSLALRDVGMIFHTIEQLTLKLNRLKDMELAHRELLKSLGGESSGGTTPVGSFHTEAARWTDGSLSPPAKEPLASDSRNSHELGPCPEDGSDAPLEDSTADAAASPGP

SEQ ID NO: 259382 - DNA, 4689 bp, Artificial Sequence
  derived and/or modified sequence
atgagcgtgagactgccccagagcatcgacagactgagcagcctgagcagcctgggcgacagcgcccccgagagaaagagccccagccaccacagacagcccagcgacgccagcgagaccaccggcctggtgcagagatgcgtgatcatccagaaggaccagcacggcttcggcttcaccgtgagcggcgacagaatcgtgctggtgcagagcgtgagacccggcggcgccgccatgaaggccggcgtgaaggagggcgacagaatcatcaaggtgaacggcaccatggtgaccaacagcagccacctggaggtggtgaagctgatcaagagcggcgcctacgtggccctgaccctgctgggcagcagccccagcagcatgggcatcagcggcctgcagcaggaccccagccccgccggcgcccccagaatcaccagcgtgatccccagcccccccccccccccccccctgccccccccccagagaatcaccggccccaagcccctgcaggaccccgaggtgcagaagcacgccacccagatcctgagaaacatgctgagacaggaggagaaggagctgcagagaatctgcgaggtgtacagcagaaaccccgccagcctgctggaggagcagatcgagggcgccagaagaagagtgacccagctgcagctgaagatccagcaggagaccggcggcagcgtggacatcctgcccctgtacggcgacaccagccagagacccagcgagggcagactgagcctggacagccaggagggcgacagcggcctggacagcggcaccgagagattccccagcctgagcgagagcctgatgaacagaaacagcgtgctgagcgaccccggcctggacagccccagaaccagccccgtgatcatggccagagtggcccagcaccacagaagacagggcagcgacgccgccgtgcccagcaccggcgaccagggcgtggaccagagccccaagcccctgatcatcggccccgaggaggactacgaccccggctacttcaacaacgagagcgacatcatcttccaggacctggagaagctgaagagcagacccgcccacctgggcgtgttcctgagatacatcttcagccaggccgaccccagccccctgctgttctacctgtgcgccgaggtgtaccagcaggccagccccaaggacagcagaagcctgggcaaggacatctggaacatcttcctggagaagaacgcccccctgagagtgaagatccccgagatgctgcaggccgagatcgacagcagactgagaaacagcgaggacgccagaggcgtgctgtgcgaggcccaggaggccgccatgcccgagatccaggagcagatccacgactacagaaccaagagaaccctgggcctgggcagcctgtacggcgagaacgacctgctggacctggacggcgaccccctgagagagagacaggtggccgagaagcagctggccgccctgggcgacatcctgagcaagtacgaggaggacagaagcgcccccatggacttcgccctgaacacctacatgagccacgccggcatcagactgagagaggccagacccagcaacaccgccgagaaggcccagagcgcccccgacaaggacaagtggctgcccttcttccccaagaccaagaagagcagcaacagcaagaaggagaaggacgccctggaggacaagaagagaaaccccatcctgaagtacatcggcaagcccaagagcagcagccagagcaccttccacatccccctgagccccgtggaggtgaagcccggcaacgtgagaaacatcatccagcacttcgagaacaaccagcagtacgacgcccccgagcccggcacccagagactgagcaccggcagcttccccgaggacctgctggagagcgacagcagcagaagcgagatcagactgggcagaagcgagagcctgaagggcagagaggagatgaagagaagcagaaaggccgagaacgtgcccagaagcagaagcgacgtggacatggacgccgccgccgaggccaccagactgcaccagagcgccagcagcagcaccagcagcctgagcaccagaagcctggagaaccccaccccccccttcacccccaagatgggcagaagaagcatcgagagccccagcctgggcttctgcaccgacaccctgctgccccacctgctggaggacgacctgggccagctgagcgacctggagcccgagcccgacgcccagaactggcagcacaccgtgggcaaggacgtggtggccggcctgacccagagagagatcgacagacaggaggtgatcaacgagctgttcgtgaccgaggccagccacctgagaaccctgagagtgctggacctgatcttctaccagagaatgaagaaggagaacctgatgcccagagaggagctggccagactgttccccaacctgcccgagctgatcgagatccacaacagctggtgcgaggccatgaagaagctgagagaggagggccccatcatcaaggagatcagcgacctgatgctggccagattcgacggccccgccagagaggagctgcagcaggtggccgcccagttctgcagctaccagagcatcgccctggagctgatcaagaccaagcagagaaaggagagcagattccagctgttcatgcaggaggccgagagccacccccagtgcagaagactgcagctgagagacctgatcatcagcgagatgcagagactgaccaagtaccccctgctgctggagagcatcatcaagcacaccgagggcggcaccagcgagcacgagaagctgtgcagagccagagaccagtgcagagagatcctgaagtacgtgaacgaggccgtgaagcagaccgagaacagacacagactggagggctaccagaagagactggacgccaccgccctggagagagccagcaaccccctggccgccgagttcaagagcctggacctgaccaccagaaagatgatccacgagggccccctgacctggagaatcagcaaggacaagaccctggacctgcacgtgctgctgctggaggacctgctggtgctgctgcagaagcaggacgagaagctgctgctgaagtgccacagcaagaccgccgtgggcagcagcgacagcaagcagaccttcagccccgtgctgaagctgaacgccgtgctgatcagaagcgtggccaccgacaagagagccttcttcatcatctgcaccagcaagctgggccccccccagatctacgagctggtggccctgaccagcagcgacaagaacacctggatggagctgctggaggaggccgtgagaaacgccaccagacaccccggcgccgcccccatgcccgtgcacccccccccccccggccccagagagcccgcccagcagggccccacccccagcagagtggagctggacgacagcgacgtgttccacggcgagcccgagcccgaggagctgcccggcggcaccggcagccagcagagagtgcagggcaagcaccaggtgctgctggaggaccccgagcaggagggcagcgccgaggaggaggagctgggcgtgctgccctgccccagcaccagcctggacggcgagaacagaggcatcagaaccagaaaccccatccacctggccttccccggccccctgttcatggagggcctggccgacagcgccctggaggacgtggagaacctgagacacctgatcctgtggagcctgctgcccggccacaccatggagacccaggccgcccaggagcccgaggacgacctgacccccacccccagcgtgatcagcgtgaccagccacccctgggaccccggcagccccggccaggccccccccggcggcgagggcgacaacacccagctggccggcctggagggcgagagacccgagcaggaggacatgggcctgtgcagcctggagcacctgccccccagaaccagaaacagcggcatctgggagagccccgagctggacagaaacctggccgaggacgccagcagcaccgaggccgccggcggctacaaggtggtgagaaaggccgaggtggccggcagcaaggtggtgcccgccctgcccgagagcggccagagcgagcccggcccccccgaggtggagggcggcaccaaggccaccggcaactgcttctacgtgagcatgcccagcggcccccccgacagcagcaccgaccacagcgaggcccccatgagccccccccagcccgacagcctgcccgccggccagaccgagccccagccccagctgcagggcggcaacgacgaccccagaagacccagcagaagcccccccagcctggccctgagagacgtgggcatgatcttccacaccatcgagcagctgaccctgaagctgaacagactgaaggacatggagctggcccacagagagctgctgaagagcctgggcggcgagagcagcggcggcaccacccccgtgggcagcttccacaccgaggccgccagatggaccgacggcagcctgagcccccccgccaaggagcccctggccagcgacagcagaaacagccacgagctgggcccctgccccgaggacggcagcgacgcccccctggaggacagcaccgccgacgccgccgccagccccggcccctag

SEQ ID NO: 259383 - DNA, 4689 bp, Artificial Sequence
  derived and/or modified sequence
atgtcagtgcggctccctcaaagcatagatagactgtcttctctctctagtctcggggatagcgctcctgagcgtaagtctccctcccatcacaggcagccttcagatgcatcagagacaaccgggctggtccagagatgcgtgattatccagaaagaccagcacggatttggcttcactgtgtctggtgatcggatcgtgttggtccaatccgtcaggcccggtggcgccgccatgaaagccggagtaaaggaaggagaccggatcataaaggtgaacggcacgatggtgaccaactccagtcatctcgaggtggtgaaactgatcaagtcaggggcttacgttgcactgactctgctgggtagttccccgagtagtatgggcatctccgggctccagcaggaccccagcccagccggtgcgccgaggataacaagtgtaattccttcacccccacctcctccaccactcccccctccccagcgaattaccggtccaaaacccttgcaggatccagaagtgcagaagcacgcgacacaaatcctgcgcaatatgctgagacaggaggagaaagaactgcaaagaatttgtgaggtctattcccgcaaccccgcttccctcctggaggagcaaattgagggagcccgaagacgggtcacacaactacaactgaaaatacaacaggagacaggcgggtccgtcgatattcttccactttacggcgatacgtctcagcggcctagtgaaggcagactgagccttgattctcaggaaggcgattcagggctggactctggcacggagagatttccatccctttccgagtccctgatgaacaggaattccgtgctctctgatcccgggctcgattcccctcgcacttcccctgtgattatggctcgggtggcacagcatcatcggaggcaaggctctgacgccgctgtcccttccaccggggaccagggagtggatcagtcccccaagcccctgatcatcgggccggaagaggactatgatcccggatactttaacaatgagagcgatataatctttcaggacctcgagaaactgaaatctcgcccggcgcacttaggagtttttcttcggtatattttttcccaagccgacccttctcccttgctattctacctgtgcgcggaagtgtatcagcaggcctctcccaaagattctaggtcgttgggcaaagatatctggaatatatttctcgagaaaaacgcaccgttgagagtaaagatccctgaaatgttgcaggcagaaatcgattccaggttgcggaatagtgaggacgcccggggcgtgctgtgcgaggcccaagaggctgccatgccggagattcaggagcagatccacgattaccgcacgaagaggaccctaggcctgggctctctctatggcgagaacgacctgcttgatctcgatggcgatcccctgagagagagacaagtggccgaaaaacagctggctgctctaggtgatattctcagtaaatacgaagaagaccggagcgcaccgatggacttcgccttgaacacctatatgtcccatgctggtatccggctgagggaagctagaccatcgaatactgcagagaaagcccagtcagcccccgataaagacaagtggttacccttttttcccaaaactaaaaaatccagcaacagcaagaaagagaaggacgcattggaggataaaaagaggaatccaatcctcaagtatataggcaagccaaaatcttccagccagagcacattccatattccgctgtccccagtggaggtgaagccaggaaatgtacgcaacataatccagcatttcgagaataatcaacagtacgacgctccagagcctggcacacagaggctgtccacaggatcatttccagaggatctgcttgagagcgactcttccagatcagaaatcaggcttgggcgcagcgagagtttgaagggaagagaggagatgaagcgatctcggaaggcagagaacgtccctagaagcaggagtgacgtggatatggatgctgctgcagaggccaccagactgcaccagtcagcatcttcttctacgtcgtctttgagtacccgaagcctcgagaatcccacacctccatttacgccaaagatgggaaggcgctcaattgagtctccatcactgggcttctgcactgatacccttctgccccacctgctggaggatgacctggggcagttgagcgacctcgaacctgagcccgacgcccagaattggcaacacacggttggcaaagatgtcgtcgccggattaacacaacgggagatagatagacaggaggttatcaacgaactgtttgtcacagaagccagccacctccgcaccctccgggtactagatctgatcttttatcagaggatgaagaaggaaaacttgatgccacgggaggaattagctagattatttcccaacttgcccgagcttatcgaaatccataactcgtggtgtgaagccatgaagaagctccgggaagaaggcccaattattaaggagatcagcgacctcatgctcgctagattcgacggtcccgctcgtgaggaactccagcaggtggctgcccagttctgttcgtatcagtcaatcgccttggagcttatcaaaaccaagcagcgtaaagagtctaggtttcagctgttcatgcaagaagcagagtcacacccgcaatgtcggaggctgcagctgcgggatctgattattagcgagatgcagagactgacaaagtatcccctgctgctggaaagcattatcaagcatacagaaggcgggacctcagagcacgagaagctgtgccgcgcgagggaccagtgtagagagattctgaagtacgtgaacgaggcagtgaagcaaactgagaatcgacaccggctcgaggggtatcagaagcggcttgacgctactgcactggagcgggcctcgaacccgctagccgcggagtttaaatcactggacctgacaacccgcaagatgatccacgaaggcccattgacttggagaatctcaaaagataagacccttgatctgcacgtgttgctcctcgaggacctgttggtcttattacagaaacaagatgagaaactactgttgaagtgtcattcaaaaaccgccgtaggatcaagcgacagtaagcagacgtttagcccggttcttaagcttaatgcagtactaatcaggagcgtggccactgataagagagcgttcttcataatttgcacgagcaagctcggcccgcctcagatctacgagctcgtggccttaacctcgtctgacaaaaacacatggatggagcttttagaagaggccgtgcggaatgcgacacgacacccgggtgccgctccgatgcctgtccaccccccaccacctggtcctagagagcctgcccaacagggacccaccccgtcaagggtcgagctcgacgactccgatgtgtttcacggggagcccgagcctgaggaattgccagggggaactgggtctcagcagagagtccagggaaagcaccaagttctgctggaggatcctgagcaggaagggtctgccgaggaagaagaactcggcgtgctcccatgcccttctacgagcttagacggagagaatcgcggaattcgcaccaggaatcccatccacctggcgtttcccggccctctttttatggaagggttggcggacagcgcactggaggacgtggagaatttaaggcacctgatactctggtcccttcttcccggccataccatggagacccaagcagcgcaagagcctgaggatgacttgacacctacgccctctgtgatcagtgtgactagccatccgtgggacccgggcagcccaggacaggccccaccaggcggagaaggggacaacacccagctcgctggtctggagggggagaggcccgaacaagaggacatgggactgtgctcgctggagcatttgcccccccggactcggaatagtggcatttgggagtcccctgagctggatcgcaatttggctgaggatgcctcttctactgaagcggcaggaggctacaaggtagttagaaaagcagaagtcgccggatccaaggtcgtcccggccctgccagaatcaggccagtccgagccaggtcctcctgaggttgaggggggcactaaggcgaccggcaattgcttttacgtgagtatgccttctggcccccctgacagttctactgatcattccgaggcccctatgagcccaccccagcccgacagcctgcccgctgggcagacagaacctcagccccagctccagggtgggaacgacgacccaagacgcccatccaggagccctccctctcttgcactgagggacgtgggaatgatctttcacactattgaacaactgacgctaaagttgaatagactgaaggatatggaattagcccacagggagctgttgaaaagcctgggaggagagtctagcggcgggacaacacccgtaggatcattccacacagaggctgccaggtggactgatggctcactaagcccacctgccaaggagcccttagccagcgatagtaggaattctcatgaattaggcccctgccctgaggatgggtccgacgccccactggaggactccaccgccgacgctgcagctagccctggcccttag

SEQ ID NO: 259384 - DNA, 4689 bp, Artificial Sequence
  derived and/or modified sequence
atgtctgtgcggctgccccagagcattgaccggctgagcagcctgagcagcctgggggacagcgcccctgagaggaagagccccagccaccaccggcagcccagtgatgccagcgagaccaccggcctggtgcagagatgtgtgatcatccagaaggaccagcacggcttcggcttcaccgtgtctggggaccgcatcgtgctggtgcagagcgtgcggcctgggggcgccgccatgaaggccggcgtgaaggagggggaccgcatcatcaaggtgaatggcaccatggtgaccaacagcagccacctggaggtggtgaagctgatcaagagcggggcctacgtggccctgaccctgctgggcagcagccccagctccatgggcatcagcggcctgcagcaggaccccagccctgctggggccccccgcatcaccagcgtcatccccagccccccacctcctccacccctgcccccaccccagaggatcaccggccccaagcccctgcaggaccctgaggtgcagaagcacgccacccagatcctgaggaacatgctgcggcaggaggagaaggagctgcagaggatctgtgaggtgtacagcaggaacccagccagcctgctggaggagcagatcgagggcgccaggagaagagtgacccagctgcagctgaagatccagcaggagaccggcggctctgtggacatcctgcccctgtatggagacaccagccagaggcccagcgagggccgcctgagcctggacagccaggagggggacagcggcctggacagcggcacagagcgcttccccagcctgtctgagagcctgatgaacagaaacagcgtgctgagtgaccccggcctggacagccccaggaccagccctgtgatcatggcccgggtggcccagcaccaccggcggcagggcagtgatgctgctgtgcccagcactggagaccagggcgtggaccagagccccaagcccctcatcatcggccctgaggaggactatgaccccggctacttcaacaatgaaagtgacatcatcttccaggacctggagaagctgaagagcaggcctgcccacctgggcgtcttcctgcgctacatcttcagccaggccgaccccagccccctgctcttctacctgtgtgccgaggtgtaccagcaggccagccccaaggacagccgcagcctgggcaaggacatctggaacatcttcctggagaagaatgcccccctgcgggtgaagatccctgagatgctgcaggccgagattgacagccggctgaggaacagtgaagatgcccggggcgtgctgtgtgaggcccaggaggccgccatgcctgagatccaggagcagatccatgactaccgcaccaagaggaccctgggcctgggcagcctgtatggagaaaatgacctgctggacctggatggagaccccctgcgggagcggcaggtggccgagaagcagctggccgccctgggggacatcctgagcaaatatgaggaggacagaagtgcccccatggactttgccctgaacacctacatgagccatgctggcatccggctgcgggaggcccggcccagcaacacagctgagaaggcccagagcgccccagacaaggacaagtggctgcccttcttccccaagaccaagaagagcagcaacagcaagaaggagaaggatgccctggaggacaagaagaggaaccccatcctgaagtacatcggcaagcccaagagcagcagccagagcaccttccacatccccctgagccctgtggaggtgaagccaggaaatgtgaggaacatcatccagcactttgagaacaaccagcagtatgatgcccctgagcccggcacccagaggctgagcacaggcagcttccctgaggacctgctggagagtgacagcagccgctctgagatccggctgggccgctctgagagcctgaagggccgggaggagatgaagaggagcaggaaggccgagaatgtgcccaggagcagaagtgatgtggacatggatgctgctgctgaggccacccggctgcaccagagcgccagcagcagcaccagcagcctgagcaccaggagcctggagaaccccaccccacccttcacccccaagatgggcagaagaagcattgagagccccagcctgggcttctgcacagacaccctgctgccccacctgctggaggatgacctgggccagctgagtgacctggagcctgagccagatgcccagaactggcagcacacagtgggcaaggatgtggtggccggcctgacccagcgggagattgaccggcaggaggtgatcaatgagctgtttgtgacagaggccagccacctgcggaccctgcgggtgctggacctgatcttctaccagaggatgaagaaggagaacctgatgccccgggaggagctggcccggctcttccccaacctgcctgagctgattgagatccacaacagctggtgtgaggccatgaagaagctgcgggaggagggccccatcatcaaggagatcagtgacctgatgctggccaggtttgatggccctgcccgggaggagctgcagcaggtggccgcccagttctgcagctaccagagcatcgccctggagctgatcaagaccaagcagaggaaggagagccgcttccagctgttcatgcaggaggccgagagccacccccagtgccggcggctgcagctgcgggacctgatcatcagcgagatgcagaggctgaccaagtaccccctgctgctggagagcatcatcaagcacacagagggcggcaccagcgagcacgagaagctgtgccgggcccgggaccagtgccgggagatcctgaagtatgtgaatgaagctgtgaagcagacagagaacagacaccggctggagggctaccagaagaggctggatgccacagccctggagcgggccagcaaccccctggccgctgagttcaagagcctggacctgaccaccaggaagatgatccacgagggccccctgacctggaggatcagcaaggacaagaccctggacctgcacgtgctgctgctggaggacctgctggtgctgctgcagaagcaggatgagaagctgctgctgaagtgccacagcaagacagctgtgggcagcagtgacagcaagcagaccttcagccctgtgctgaagctgaatgctgtgctgatccgctctgtggccacagacaagagggccttcttcatcatctgcaccagcaagctgggccccccccagatctatgagctggtggccctgaccagcagtgacaagaacacctggatggagctgctggaggaggccgtgagaaatgccaccaggcaccctggagctgcccccatgcctgtgcaccccccacctcctggcccccgggagcccgcccagcagggccccacccccagccgggtggagctggatgacagtgatgtgttccatggagagcctgagcctgaggagctgcccggcggcaccggcagccagcagagggtgcagggcaagcaccaggtgctgctggaggaccctgagcaggagggcagcgctgaggaggaggagctgggcgtgctgccctgccccagcaccagcctggatggagagaacagaggcatccgcaccaggaaccccatccacctggccttccctggccccctcttcatggagggcctggccgacagcgccctggaggatgtggagaacctgcggcacctgatcctgtggagcctgctgcccggccacaccatggagacccaggccgcccaggagccagaagatgacctgacccccaccccatctgtcatctctgtgaccagccacccctgggaccccggcagccctggccaggcccctcctggaggagagggggacaacacccagctggccggcctggagggggagaggcctgagcaggaggacatgggcctgtgcagcctggagcacctgccccccaggaccagaaattctggcatctgggagagccctgagctggacaggaacctggctgaagatgccagcagcacagaggccgccggcggctacaaggtggtgaggaaggccgaggtggccggcagcaaggtggtgcctgccctgcctgagagcggccagagcgagcccggccccccagaggtggagggcggcaccaaggccactggaaactgcttctacgtgtccatgcccagcggccccccagacagcagcacagaccacagcgaggcccccatgagccccccccagcctgacagcctgcctgctggccagacagagccccagccccagctgcagggcggcaatgatgacccccggcggcccagccgcagcccccccagcctggccctgagagatgtgggcatgatcttccacaccatcgagcagctgaccctgaagctgaaccggctgaaggacatggagctggcccaccgggagctgctgaagagcctgggcggggagagcagcggcggcaccacccctgtgggcagcttccacacagaagctgcccgctggacagatggcagcctgagccccccagccaaggagcccctggccagtgacagcaggaacagccatgagctgggcccctgcccagaagatggcagtgatgcccccctggaggacagcacagcagatgctgctgccagccctggcccctag

SEQ ID NO: 259385 - DNA, 4689 bp, Artificial Sequence
  derived and/or modified sequence
atgagcgtgcggctgccccagagcatcgaccggctgagcagcctgtcctccctcggcgattccgctccagaacgtaagtctcctagtcaccaccggcagccctccgacgccagcgagacaactggcttggtccagaggtgcgttatcatccagaaggatcaacatggctttggatttaccgtgtccggggacagaatcgtgctcgtgcagtccgtgcgacctggcggagcagctatgaaagcgggagtgaaggaaggcgacagaattattaaagtgaacggaacaatggtaacaaattccagccatttagaagtggttaagcttattaaaagcggcgcgtacgtggcactgaccctgctgggttccagcccaagctctatggggatctccggccttcagcaagaccccagccctgctggagcaccacgcataactagcgttatcccatcccctcctcctccccctcccctacctcccccacagcgaatcactggaccaaaaccgctgcaagacccggaggtgcagaagcatgcaactcagatacttcgaaacatgttgagacaggaggaaaaagaattacagaggatatgtgaggtttacagccggaatccagcgagtctacttgaggagcagatagaaggcgccagaaggcgggtgactcagcttcagctgaagattcagcaggagactggagggagtgtagacatactacctctgtatggcgacacctcccagcgcccttctgagggcaggctgagcctcgactcacaagaaggtgatagcggactggatagtggaaccgagcgctttcctagcctctccgagagccttatgaatagaaactcagtgctgagcgaccctggattggattctccccgcacgtctcctgtgattatggccagggtggctcaacaccaccggaggcaagggtcagacgccgcagttcctagcaccggagatcagggagtagaccaatctcccaaacccctgattataggcccggaggaggattacgaccccggttattttaataatgagagcgatatcatctttcaagacttagagaaattgaagtccaggcctgcacacttgggtgtgttcctgaggtatatcttcagtcaggccgatccttcccccctgcttttttacctttgcgcagaagtgtaccagcaggcgtccccaaaggactctagatccctgggcaaggatatctggaatatatttctggagaagaacgctccgctccgggtgaagataccagagatgctccaggctgaaatcgactctaggcttcggaattctgaagacgctagaggggtactctgcgaggcccaggaagctgccatgccggagatccaggagcagattcatgattaccggaccaagcgcacgctgggactgggcagcctttacggcgagaatgacctcttggaccttgacggagatccactaagagagaggcaggtagccgaaaaacagctagcagccctaggcgacatcttgtctaaatatgaggaagataggagcgccccaatggacttcgccctgaacacttacatgagtcacgctggcatacggttacgcgaggctcggccttcaaacactgctgaaaaagcccagtctgcaccggacaaggacaaatggctgccttttttccccaaaaccaagaaatcttcgaactccaagaaagagaaagatgcactggaagataagaaacggaaccctatcctgaagtatattggcaaacctaagtcctcatctcagtctactttccacatcccactttcacccgtcgaggtgaagcctggtaacgtgagaaatatcattcagcattttgagaataatcagcagtacgacgccccggagcccggaacgcaaaggctctccaccggcagttttcccgaggatctgctggaaagcgactcaagtaggtccgaaatcagactggggcggtcagaaagtctgaagggccgcgaagagatgaaaaggtccagaaaagctgaaaacgttcctagatcccgcagcgatgttgacatggatgccgcggccgaggctactaggctgcaccagagtgcaagctcctctactagttcactgtcaacccggagccttgagaatcctacccccccttttaccccaaaaatggggaggaggagcatcgagagccccagcttgggattctgcaccgatacacttctccctcatctgctcgaagacgacctgggacagctcagtgacctcgagccagaacctgatgcccagaactggcaacacaccgttggcaaggacgtcgtcgccggacttacccagagggaaatagacaggcaggaggtcattaacgagctgttcgtcaccgaagcaagccacctcagaacactgagagtcctggatctcatcttttatcagcggatgaagaaggagaatctcatgcctagagaagagttggcccgcctcttccccaacttacccgagctgattgaaatacacaactcctggtgtgaggctatgaaaaaactgagggaagaagggcccattataaaagagattagcgacctcatgctggctagatttgacggtccagctagagaagagctccagcaggtcgctgcccaattttgcagttaccagagcatcgccctggagttgatcaagacaaagcagcgcaaggaaagccggttccagctgttcatgcaggaagccgagagccatccccagtgccgccgcctgcagctacgtgacctgattatttcggaaatgcagcgacttactaaatatccgctgcttctggagtctattatcaagcatactgagggcggcacgagcgagcacgagaaattgtgtcgcgccagagatcaatgcagggaaattcttaaatatgtaaacgaagcagtgaagcagaccgagaatcgacacagactggaagggtatcaaaagaggctggatgcaaccgccctcgagcgggcatcaaatccactagcagccgaatttaagagccttgacctcaccacacgcaagatgatccacgagggccctttgacctggcgtatctccaaggataaaacccttgatctgcacgttctgctgttagaggacctgttggtgcttcttcagaagcaggatgaaaaacttctgctcaaatgccactccaagacagccgttggatcatctgactcaaaacagaccttctcccccgtattgaagctgaatgctgttctgataaggtctgtcgcaactgataaaagagcttttttcattatctgcaccagcaaattgggacctcctcagatatacgaactagtcgctttaacctcctccgataagaatacatggatggagctcctggaggaagctgtgaggaatgccacgcgtcacccaggcgccgctcccatgccagttcaccctcccccacctggtccaagggagccagctcagcaaggcccaaccccaagcagggtagaactggatgactctgatgtttttcacggggaacctgagccagaggaacttccaggagggacgggctcacagcagagggtgcagggcaagcatcaggtccttctcgaggatcctgagcaggagggctctgccgaggaggaagaactcggcgtgctgccctgtccaagcacatccttggatggcgaaaatagaggcatccgaactaggaaccccattcaccttgcttttccgggccccctgtttatggaaggtctcgcagacagcgcccttgaagacgtggaaaacctgagacatctgattctgtggagtttgctgcctggccacaccatggagacacaagccgcccaagagccggaggacgacctcaccccaacgccaagcgtcatctccgtcacttcccacccttgggaccctggttccccaggccaagcaccaccagggggggaaggtgacaatactcaactcgccggactggagggagagaggccagaacaggaggacatgggcctttgcagcctggaacacttaccccctcgcacccgcaattcagggatttgggaaagtccagagttggaccgaaacctcgcagaagacgcctcatccacggaagccgctggaggttataaggtcgtgcggaaagccgaggtggccggctctaaggtcgtccccgcccttcccgagtcaggacagtccgagccaggtccgccggaagttgaaggggggacaaaagccactggcaattgcttctacgtgagcatgcctagcgggccccccgacagctccactgaccacagtgaagctcctatgtcgcctccccagcctgattcgctgcctgccggtcaaaccgagcctcagccccagctgcagggtggtaacgacgaccctagacgcccttctagatcccccccttccctggctttgcgggacgtgggcatgattttccacactattgagcaactgacactcaaactgaaccgattgaaagacatggagctggcccatagagagctgctgaagagcctcggcggagagtcgagcggcggcaccactcccgtgggtagttttcatactgaggccgcccgctggacagatggttctctgagtcccccggcaaaggagcccctggcatcagactcccgcaattctcacgagctggggccatgcccggaagacgggtctgatgcgcctctggaggactccaccgccgacgctgctgcctctcccggtccttag

SEQ ID NO: 259386 - DNA, 4689 bp, Artificial Sequence
  derived and/or modified sequence
atgagtgttagacttccccagtcgatcgaccggctgtcctcgctttccagcctcggcgattctgccccagagcgcaaatctccttcgcatcaccggcagccatccgatgcctctgaaactacgggcttggtgcaacgatgcgtcattatacagaaggatcagcacgggtttgggtttaccgttagcggggacaggattgtcctagtccagagcgtccgccctggcggtgccgcaatgaaggctggggtgaaggaaggtgaccggattattaaagttaatggcacaatggtgacaaacagcagtcatctggaggtcgtgaagctcataaaaagtggcgcttatgtcgctctgactctgctgggcagtagccccagcagcatgggcatttcagggctgcagcaggaccccagccccgctggtgcaccaaggatcacgtcagttattccttccccacctccgcctcctcctctcccaccccctcaacgtatcacaggtcccaagccccttcaggatccagaagtccaaaagcatgccacgcagattctcagaaatatgctgcggcaggaggaaaaagagcttcaaaggatatgtgaagtttacagcaggaacccggcttccctccttgaagaacaaatcgagggtgcaagaagaagggtgacgcagctgcagttaaaaattcaacaggagactgggggttccgtggacatattgcccctctacggcgatactagccaacggccttccgaaggcaggctctccctcgacagtcaggagggtgattccggactcgattcagggaccgagcgatttccctcactgagcgagtcactgatgaaccggaacagtgtgctctcagacccaggactggactcccccagaacctccccagttataatggccagagttgcccagcaccataggaggcagggctcagacgccgctgtgccaagcaccggggaccaaggcgtggaccagagtccaaaaccactgattattggccctgaggaagactatgaccctggatatttcaataacgagagcgatatcatcttccaagacctggagaaactgaagagtaggcccgcacacttaggcgttttcttgagatatattttctcccaagcagatccaagccctctgttattttatctgtgtgctgaggtgtaccagcaagcttctccaaaagacagtaggagcctcggtaaggacatctggaatatcttcctggagaaaaatgccccactgagggtgaagatccccgaaatgctacaggctgagatcgacagtcgactgaggaatagtgaagacgcccgaggggttctttgcgaggcccaggaggcagccatgcctgagatccaagagcagattcacgactatagaacgaagcgcactctaggactgggaagcctttacggtgagaatgacctcttggacttggatggcgatccgctacgtgagcgacaagtggctgagaaacagcttgcggctctgggggacatattatctaagtatgaggaggataggagcgcacctatggattttgctctaaatacttacatgagccatgccggaatccggctccgggaagctagaccctccaatactgccgagaaggcgcagagtgctcccgacaaggataagtggttaccattcttccctaaaaccaaaaaatcaagtaactccaagaaggaaaaagacgccctcgaagataaaaaacggaaccccattcttaagtacatcggcaagccaaaatctagctcccagtcaaccttccatattcccctctcccctgtggaggttaagcccggaaacgtgaggaatattatacaacactttgagaataaccagcagtacgatgctcccgagcctgggacacaaaggctgtctacggggtcctttcctgaagatctgctcgaatctgacagttccagatccgagattcggttgggacggtccgaatctctaaagggaagagaggagatgaaacgcagccggaaggcagagaacgtacccagatccaggagtgatgtggatatggatgccgctgccgaggccacccggctgcatcaatctgcctcgtccagcacaagctccttgagtacgagatcgcttgagaaccctactccgccttttacccctaagatgggtaggagaagcattgaaagcccctccctgggcttttgtacagatacactgttgcctcaccttttggaggacgatctggggcaactctccgatctggaacctgaacctgacgcacagaactggcagcataccgtggggaaggatgtggtcgcagggcttacgcagcgtgaaatcgacaggcaggaggtgattaacgagctctttgtgactgaggcatcccacctgagaacactcagagtgttggatcttatcttctatcaacggatgaagaaggagaacttaatgcccagagaggagcttgcacgactgttcccaaaccttccggagctgatcgaaatacataacagttggtgcgaggctatgaagaaacttcgcgaggaaggccctatcatcaaggaaatcagtgatctaatgctggccagattcgacgggccagcacgggaggaattacagcaggtggccgcacaattttgttcttatcagtctatcgcattggagctcataaagacaaaacagcgaaaggagtctaggttccagttattcatgcaggaagccgagtctcacccccaatgcaggcgtttgcaactcagggacttgataatcagcgagatgcagcggctgactaagtaccctcttctgctggagtccatcatcaagcataccgagggaggcaccagcgagcacgagaaattgtgtcgcgcacgggaccaatgccgtgagattctcaagtacgttaacgaggccgtgaagcagaccgaaaataggcacagactggagggctaccagaaacgcctggacgccactgctctagagcgcgcaagcaacccactcgcagccgagttcaagtctctggatctcacaacccgtaaaatgatccatgaggggccactgacctggcgaatatctaaggacaaaactttggatctccacgtgttactgctggaggatcttctcgtcctgctgcagaagcaggatgagaagctcctgctgaaatgccatagcaagaccgcagtgggctcgtcagactcaaaacaaacattcagtcccgtattgaaactaaacgcggtattgatcagaagcgtagctaccgataaacgcgcattctttatcatctgcactagcaaactgggcccacctcaaatctacgaacttgtggccctcaccagcagtgataagaacacctggatggagttacttgaggaggctgtaagaaacgcaaccagacatccgggagctgctccaatgcctgtccatccaccaccaccgggtcccagagaacctgcgcagcaagggccaaccccatcccgcgtagaattggacgatagcgatgttttccacggggagccagaacccgaggagctacccggaggcacgggatctcagcagcgagtgcaggggaaacaccaggtgctcctggaagatcccgaacaagaaggatccgccgaggaggaggagctcggggtccttccgtgtccatcaaccagccttgacggggagaatagagggatcagaacaagaaatccaattcacctcgccttccctggtccattgtttatggaaggactggccgacagtgcgctcgaggatgttgagaacctgcgacacctcattctatggagcctcctacctggacacacaatggaaacccaggctgcccaggagccagaggacgacctcacgccgaccccatcagtgatttccgtcacatcccatccgtgggaccctggcagccccggacaggcacccccagggggtgagggcgataacactcagctggctggtttggaaggcgagcgcccagagcaggaggacatggggctgtgcagcctggaacacctgccaccccgtacgagaaattctgggatttgggaatcccctgagttagataggaacctggccgaggatgcttcaagcacagaggcagcaggtggatataaggtcgtgcggaaggctgaggtggctggcagcaaggtggtgcccgctcttccagaaagtgggcaaagtgagcccggaccacccgaggtagaaggcggaaccaaggccacgggtaattgcttctacgtgtctatgccctcagggccacccgacagttcaactgaccattccgaggctcccatgtccccaccccagcccgattcattgcctgccggacagaccgagccccagccccagctgcaagggggtaacgatgatcctcgcagaccctccagaagtcctccctctctggccctccgtgatgttggtatgattttccatactatcgagcagctgaccctcaagctcaacagacttaaggatatggaactcgctcatcgcgaactccttaaatcactcggaggcgagagctcaggaggcacaactccggtcgggtcatttcatactgaggcagctcggtggacagacggatccctctctccacctgcgaaggaacccctcgcctccgatagtcggaattcccacgagctgggtccatgtcccgaggatggctcagatgcgccactggaggactctaccgcagacgccgctgcttctccaggaccctag

SEQ ID NO: 259387 - DNA, 6889 bp, Artificial Sequence
  derived and/or modified sequence
agcgaaatctccgtttcatggaggctgaggcaagagaaaatttcggagcctggatgtggaggagcccaacagcagaactaactcaggaaattgtctttcagaaaaaggccgaacgtaggctgggtctgagaatcaggctggggtaggtggaggaacctgcaagtttaaaggaaaaagaaaaggagagaatattttcagagattatctctggtttgttatcattactaccatcttaaaggtaaaaagcattgcatttcaggtgttctttgatttttattttatttttttttttggtgcaattggctcatttaagaatttcaaaacatttaatgtaaaagcttttttttttttaaggaagtccataaattttggttcccagggttgcactggacttggaaggagtgctgttgtgtacatactattgtatggttttatttattattttactgtacaaatcagccgaaagaatttttccaagtgccatttcggatttattaatccttttttttttcctttcctcaaagatatttgctgttgtcatattaagcattggagactagaaaattactttccccctttgagctagagggtctcttgccaacagaaggacagctgagaaagctggatttaaaggatggttttatctgtactttgcagttaacagtgatattttgaaggcacatttttctgtgattcatttttttttggccatagtgctaaccttgaagagattcgtggctgggtttttggtttctgagaaggtcgtagtttttcctcttttcctttttttttcttttttcttttcttttctttttttttaaagcgggggaggggaagaggggctgagaaaggaaatcatgttcactggtagaagtagagtggagcatcagttaccagggtcctgagagctggaggagaaaggattctatcttcaagttgggaggccctcctctcaccttgctcaaaaattgcaagcgattcaatcctgatcaagacaccaaagctacaggattctggaaccgtggagacaccgagaaaccatgagtgtaaggttaccccagagtatagacaggttaagtagcctgtcttctctgggagattctgcaccagagcgcaagtccccttcccaccatcgccagccttcggatgcctctgagacaacaggtctcgttcaacgctgtgtcattatccaaaaggaccagcatggcttcggcttcacagtcagtggggatcgcattgttctggtgcagtctgtgcggcctggaggtgcagccatgaaggccggtgtgaaagagggcgaccggatcatcaaagtcaacggcaccatggtgaccaatagctcacacctggaagtggtaaagctgatcaaatctggcgcctatgtcgcactcaccctcctgggctcttcaccttcatccatgggcatctctgggctccagcaggacccatccccagcaggagctccccgaatcacgtcagtgatcccctcaccaccacctcctccacctctaccacctccacaacgcatcacaggacccaaacctctgcaggatcccgaagttcaaaaacatgccacccagatcctcaggaatatgctgaggcaggaagaaaaagaattacagcgtatctgtgaggtctatagccggaaccccgccagcctactggaagagcagatcgaaggtgcccggcggcgagtcactcagttacagctgaagatccagcaggagactggtggctcagtggacatacttccactatatggtgacaccagccagagaccatcagaaggccggctctctctggattcccaggagggggacagtggcttggactctgggacagaacgctttccttccctcagtgagtcattgatgaatcggaactcggtactgtcagaccctgggctagacagtcctcgaacctcccctgtgatcatggccagggtggcccagcaccacaggcggcagggctcggatgcagcagtcccctcaaccggtgaccagggtgtagatcaaagcccaaagcctttaattattggcccagaggaagactatgacccgggttatttcaacaacgagagcgacatcatattccaggatctggagaaactgaagtctcggccagctcacctgggggtttttctacgttacatcttctctcaggcggaccccagtccactgcttttttacctgtgtgcagaagtttatcagcaggcaagccccaaggattcccgaagcttggggaaagacatctggaatattttcctggagaaaaatgcgcctctgagagtgaagatccctgagatgctacaggctgaaattgactcgcgcctgcggaacagcgaagatgcccgtggtgttctctgtgaagctcaagaggcagccatgcctgagatccaagagcagatccacgactacagaacgaagcgcacactggggctgggcagcctgtatggtgaaaatgacctgctggacctggatggggaccctctccgagagcgccaagtggctgagaagcagctggctgcccttggagatattttgtccaagtatgaggaagacaggagcgcccccatggacttcgccctcaatacctacatgagccatgctgggatccgtcttcgagaggcacgaccttccaacacagctgaaaaggcccagtctgctcctgacaaggacaagtggctaccgttcttccctaagaccaagaagagcagcaattccaagaaagaaaaggatgccttggaggacaagaagcgaaaccctatcctcaaatacattgggaagcccaaaagctcttctcaaagcacatttcatattcccttgtcccctgtggaagtcaaaccaggcaatgtgaggaacatcattcagcactttgagaacaaccagcagtatgatgccccagaacctgggacacaacgactctcgaccggaagctttcctgaggacctgctggagagtgacagttcacgctcagagattcgcctgggccgctctgaaagcctcaagggccgggaagagatgaaacggtctcgaaaggcagagaacgtgccccgctctcgcagtgatgttgacatggatgctgctgcggaggctactcgcctgcaccagtcagcctcgtcctctacctccagcctctccaccaggtctcttgagaacccaacccctccattcactcccaaaatgggccgcaggagcattgagtcccccagtttggggttctgcacagataccctccttccccacctcctagaggatgatctgggccagctgtctgacctggagccagagccagatgcccaaaattggcagcatacagtgggcaaggatgtggtggctgggctaacccagcgggagattgaccggcaagaggtcatcaatgagctgtttgtgactgaagcttcccacctgcgcacactccgggtcctggacctgatcttctaccagcgaatgaagaaggagaacctgatgccccgggaggagctggcccggctcttcccgaacctgcctgaactcatagagattcacaattcctggtgtgaagccatgaagaagctccgggaggaaggccccatcatcaaagagatcagtgacctcatgctggcccggtttgatggccctgcccgagaggaactccagcaagtggctgcacagttctgttcctatcagtcaatagccctagagctaatcaagaccaagcaacgcaaggagagtcgattccagctcttcatgcaggaggctgagagccaccctcagtgtcggcggctgcagctgagagacctcatcatctctgagatgcagcggctcaccaagtacccgctgctgctggagagcatcatcaagcacacagagggtggcacctctgagcatgagaagctgtgccgggcccgggaccagtgccgggagattctcaagtatgtgaatgaagcggtaaaacaaacagagaaccgccaccgtttagagggctaccagaaacgcctggatgccaccgccctggagagggccagcaaccccctggcagcagagttcaagagcctggatcttacaaccagaaaaatgatccatgagggacccctgacctggaggatcagcaaggataagaccttggacctccacgtgctgctgctggaggacctcctagtgctgctacagaaacaggatgagaagctattgctgaagtgccacagcaagactgctgtgggctcctcagacagcaagcagaccttcagccccgtgctcaagctcaatgctgtgctcatccgctctgtggccacagataaacgggccttcttcatcatctgcacctccaagctgggcccaccccagatctatgagctggttgcattgacgtcatcagacaagaacacatggatggagctcttagaagaggccgtgcggaatgccaccaggcaccccggagctgccccaatgcccgtccatcctccacccccaggtccccgggagccagcccagcagggccccacacccagcagggtagaactggatgactcagacgtgttccatggtgaacctgaacctgaggagctgcctggaggcactgggtcccagcagagggtccaagggaagcaccaggtcctgctagaggaccctgagcaggagggcagtgcagaggaagaggaactgggtgtcctgccttgcccttccacatccctggatggagagaacaggggcatcaggacaaggaaccccatccacttggccttcccaggccctctgttcatggaagggctcgctgactccgctctggaagatgtggagaacctgcgacatctgatcctgtggagcctgctgccaggtcacaccatggaaactcaggctgcccaggagcccgaggacgacctgacacccacaccttctgtcatcagcgtcacctctcacccctgggacccaggctccccagggcaagcaccccctgggggtgaaggggacaacacccagcttgcagggctggagggggaacggccagagcaggaagacatgggtctctgttctctggaacacctacccccaaggaccagaaattctgggatatgggagtctccagaactggacaggaatctggctgaagatgcttcaagcacagaggcagcaggaggttacaaagttgtgagaaaagctgaggtggcaggcagcaaggttgtccctgcactaccagagagtggccagtcagagcctgggccacctgaagtggaaggcggaacaaaggctacggggaactgcttttatgtcagcatgccatcaggacccccggactcaagcaccgaccactcagaggcacccatgagcccccctcagcctgacagcctccctgcagggcagacagagcctcagcctcagctgcagggaggcaacgatgatccaagacgccccagccgctctcctccaagcctggccctcagggacgtgggcatgatcttccataccattgagcagctcactctcaagctcaacaggctcaaggatatggagctggcccacagagagctgctcaagtcccttgggggagagtcatctggtggcaccacgcctgtgggcagtttccacacagaagcagctagatggacagatggctccctctcacctcccgctaaggagcccctagcttctgactccaggaacagccatgaactggggccctgccctgaggatggctctgacgcccccctggaagacagcacagcagacgcagccgcgtcaccaggaccataaccgtacaaaccaccaaatcctctgcgtccccactcctccttcagggactggcctgagaccggggcacagggtaggggggatcccaacactcctccctgtggaggaggcagttagggaaactaggatccagccaaggcccggggggagacccgcatgttgcttggtctgctcaagtcggagtcaggtttcagtgtcttttccctcccttagcccaaccctccaaggcctcatgtctcctaagcatgctgactgcatccgaaaggcccccactcaccatggtctgccctcaccccacatatgtgtgtacacgcgcacgcctgtatgtgcgctgccctcagacatgcaagtgaaaggaggaggcttctgtgtaaatgcactttcttcctcccctctttctccataagaccccaggcagaggtgggtgcctcccctcccctctttgtcactttggtttcctataaatatgtatgtatcgtatgtgcatctttgctattgtaaataactttgaccttttttgttcctgttcctgaagtgctggaggcagttatggaaggagctgcttagggaagaggggtttcacttgtatctccttagttaacaacccagttccaggatcgagcctaaagcgggagccaggcctgagtgttcctgtccctgtgagtgggaaggtcttctggctccccatcccacctggctccagagcctgccctccacagcttgctgccaagctactccctccctccctggacttctcatcttcacaagatggggatcatgggggtttcttaccccacctatgtccccctcttccccaccctgtccctgtagaaaaccagtgaagcaggtacggagctgaggactgggccccaggaggtggggacaggggtctgaatgccgagtccctgaattcacccaggaccatccaaggggccaccgcagcattggccccatcaccacgtcctcacccaactctccctgatgaatagaatatacacactgtgctaggtgtatatatacatatatatatatataaatatatatataatatataaaatatagatatggaaatgactgttctgctgttaagataatgtatactcttttattttcttcctttcatggttaagattttttttttaagaaaagttaaatatccttca

SEQ ID NO: 259388 - protein, 354 aa, Artificial Sequence
  derived and/or modified sequence
MQGLLFSTLLLAGLAQFCCRVQGTGPLDTTPEGRPGEVSDAPQRKQFCHWPCKCPQQKPRCPPGVSLVRDGCGCCKICAKQPGEICNEADLCDPHKGLYCDYSVDRPRYETGVCAYLVAVGCEFNQVHYHNGQVFQPNPLFSCLCVSGAIGCTPLFIPKLAGSHCSGAKGGKKSDQSNCSLEPLLQQLSTSYKTMPAYRNLPLIWKKKCLVQATKWTPCSRTCGMGISNRVTNENSNCEMRKEKRLCYIQPCDSNILKTIKIPKGKTCQPTFQLSKAEKFVFSGCSSTQSYKPTFCGICLDKRCCIPNKSKMITIQFDCPNEGSFKWKMLWITSCVCQRNCREPGDIFSELKIL

SEQ ID NO: 259389 - protein, 372 aa, Artificial Sequence
  derived and/or modified sequence
MNKRRLLYPSGWLHGPSDMQGLLFSTLLLAGLAQFCCRVQGTGPLDTTPEGRPGEVSDAPQRKQFCHWPCKCPQQKPRCPPGVSLVRDGCGCCKICAKQPGEICNEADLCDPHKGLYCDYSVDRPRYETGVCAYLVAVGCEFNQVHYHNGQVFQPNPLFSCLCVSGAIGCTPLFIPKLAGSHCSGAKGGKKSDQSNCSLEPLLQQLSTSYKTMPAYRNLPLIWKKKCLVQATKWTPCSRTCGMGISNRVTNENSNCEMRKEKRLCYIQPCDSNILKTIKIPKGKTCQPTFQLSKAEKFVFSGCSSTQSYKPTFCGICLDKRCCIPNKSKMITIQFDCPNEGSFKWKMLWITSCVCQRNCREPGDIFSELKIL

SEQ ID NO: 259390 - protein, 331 aa, Artificial Sequence
  derived and/or modified sequence
MKISRGRVCLESENKDAGVAGRKQFCHWPCKCPQQKPRCPPGVSLVRDGCGCCKICAKQPGEICNEADLCDPHKGLYCDYSVDRPRYETGVCACKSVGCEFNQVHYHNGQVFQPNPLFSCLCVSGAIGCTPLFIPKLAGSHCSGAKGGKKSDQSNCSLEPLLQQLSTSYKTMPAYRNLPLIWKKKCLVQATKWTPCSRTCGMGISNRVTNENSNCEMRKEKRLCYIQPCDSNILKTIKIPKGKTCQPTFQLSKAEKFVFSGCSSTQSYKPTFCGICLDKRCCIPNKSKMITIQFDCPNEGSFKWKMLWITSCVCQRNCREPGDIFSELKIL

SEQ ID NO: 259391 - protein, 130 aa, Artificial Sequence
  derived and/or modified sequence
MGISNRVTNENSNCEMRKEKRLCYIQPCDSNILKTIKIPKGKTCQPTFQLSKAEKFVFSGCSSTQSYKPTFCGICLDKRCCIPNKSKMITIQFDCPNEGSFKWKMLWITSCVCQRNCREPGDIFSELKIL

SEQ ID NO: 259392 - DNA, 1235 bp, Artificial Sequence
  derived and/or modified sequence
cctgagtcccgggaggaaagtgctcgcccattcctgacctgtgacacgctcactgcgaaggcaggttattagaagagtcccatgaaaggtggctccacggtcccagcgacatgcaggggctcctcttctccactcttctgcttgctggcctggcacagttctgctgcagggtacagggcactggaccattagatacaacacctgaaggaaggcctggagaagtgtcagatgcacctcagcgtaaacagttttgtcactggccctgcaaatgccctcagcagaagccccgttgccctcctggagtgagcctggtgagagatggctgtggatgctgtaaaatctgtgccaagcaaccaggggaaatctgcaatgaagctgacctctgtgacccacacaaagggctgtattgtgactactcagtagacaggcctaggtacgagactggagtgtgtgcataccttgtagctgttgggtgcgagttcaaccaggtacattatcataatggccaagtgtttcagcccaaccccttgttcagctgcctctgtgtgagtggggccattggatgcacacctctgttcataccaaagctggctggcagtcactgctctggagctaaaggtggaaagaagtctgatcagtcaaactgtagcctggaaccattactacagcagctttcaacaagctacaaaacaatgccagcttatagaaatctcccacttatttggaaaaaaaaatgtcttgtgcaagcaacaaaatggactccctgctccagaacatgtgggatgggaatatctaacagggtgaccaatgaaaacagcaactgtgaaatgagaaaagagaaaagactgtgttacattcagccttgcgacagcaatatattaaagacaataaagattcccaaaggaaaaacatgccaacctactttccaactctccaaagctgaaaaatttgtcttttctggatgctcaagtactcagagttacaaacccactttttgtggaatatgcttggataagagatgctgtatccctaataagtctaaaatgattactattcaatttgattgcccaaatgaggggtcatttaaatggaagatgctgtggattacatcttgtgtgtgtcagagaaactgcagagaacctggagatatattttctgagctcaagattctgtaaaaccaagcaaatgggggaaaagttagtcaatcctgtcatataataaaaaaattagtgagt

SEQ ID NO: 259393 - DNA, 1119 bp, Artificial Sequence
  derived and/or modified sequence
atgaacaagagaagactgctgtaccccagcggctggctgcacggccccagcgacatgcagggcctgctgttcagcaccctgctgctggccggcctggcccagttctgctgcagagtgcagggcaccggccccctggacaccacccccgagggcagacccggcgaggtgagcgacgccccccagagaaagcagttctgccactggccctgcaagtgcccccagcagaagcccagatgcccccccggcgtgagcctggtgagagacggctgcggctgctgcaagatctgcgccaagcagcccggcgagatctgcaacgaggccgacctgtgcgacccccacaagggcctgtactgcgactacagcgtggacagacccagatacgagaccggcgtgtgcgcctacctggtggccgtgggctgcgagttcaaccaggtgcactaccacaacggccaggtgttccagcccaaccccctgttcagctgcctgtgcgtgagcggcgccatcggctgcacccccctgttcatccccaagctggccggcagccactgcagcggcgccaagggcggcaagaagagcgaccagagcaactgcagcctggagcccctgctgcagcagctgagcaccagctacaagaccatgcccgcctacagaaacctgcccctgatctggaagaagaagtgcctggtgcaggccaccaagtggaccccctgcagcagaacctgcggcatgggcatcagcaacagagtgaccaacgagaacagcaactgcgagatgagaaaggagaagagactgtgctacatccagccctgcgacagcaacatcctgaagaccatcaagatccccaagggcaagacctgccagcccaccttccagctgagcaaggccgagaagttcgtgttcagcggctgcagcagcacccagagctacaagcccaccttctgcggcatctgcctggacaagagatgctgcatccccaacaagagcaagatgatcaccatccagttcgactgccccaacgagggcagcttcaagtggaagatgctgtggatcaccagctgcgtgtgccagagaaactgcagagagcccggcgacatcttcagcgagctgaagatcctgtag

SEQ ID NO: 259394 - DNA, 1119 bp, Artificial Sequence
  derived and/or modified sequence
atgaataaacgccgccttttatatccatctggatggctgcacgggccctctgatatgcaaggtctgctgttcagcaccttactcctagctggcttggcacaattctgttgcagagtgcagggcactggaccactcgacactacaccagaaggacggccaggggaggtctccgacgcacctcagaggaaacaattctgccactggccttgcaaatgccctcaacaaaaaccacggtgtccacccggtgtttctttggttcgtgatggctgtggatgctgtaaaatatgcgccaagcagcctggcgagatctgtaacgaggccgacttgtgtgacccccacaagggtctgtattgtgattacagcgtcgatagaccacgctatgagacaggagtctgcgcgtatcttgtggctgtggggtgtgaatttaaccaggttcactaccataatggccaggtttttcagcccaatcctctgttctcatgcctgtgcgtgtcaggggcaattgggtgtacaccactcttcatacctaaactggctggcagccactgcagcggggcgaaaggcggcaaaaagagcgaccagagcaattgcagcctggagcccctgctgcagcagttgagcacctcttacaagactatgccggcttatcgcaacttgccattgatctggaaaaaaaagtgcctcgtgcaagctacgaaatggaccccttgttccagaacatgtggtatggggatctccaacagagtgaccaatgaaaatagtaattgcgagatgcgcaaggaaaaacgtctgtgctatattcagccatgcgactcgaatatcctgaagaccatcaagattccaaaagggaagacctgccagccaacttttcagctgagtaaggcagagaaattcgtcttctctggttgttcctccacccagtcatacaagccaacattctgcggaatctgcctcgacaagcgatgttgtatccctaacaagtctaagatgattacaatccagtttgactgccctaatgaaggctcattcaaatggaaaatgctgtggatcaccagctgcgtttgccagcgaaattgccgcgagcccggggacatttttagcgaactgaaaattctgtag

SEQ ID NO: 259395 - DNA, 1119 bp, Artificial Sequence
  derived and/or modified sequence
atgaacaagaggcggctgctgtaccccagcggctggctgcacggccccagcgacatgcagggcctgctcttcagcaccctgctgctggccggcctggcccagttctgctgccgggtgcagggcaccggccccctggacaccaccccagagggccggcctggagaggtgtctgatgccccccagaggaagcagttctgccactggccctgcaagtgcccccagcagaagccccgctgccccccaggagtgtccctggtgagagatggctgcggctgctgcaagatctgtgccaagcagcccggggagatctgcaatgaagctgacctgtgtgacccccacaagggcctgtactgtgactacagcgtggaccggcccaggtatgaaacaggagtgtgtgcctacctggtggccgtgggctgtgagttcaaccaggtgcactaccacaacggccaggtgttccagcccaaccccctcttcagctgcctgtgtgtgtctggggccatcggctgcacccccctcttcatccccaagctggccggcagccactgcagcggggccaagggcggcaagaagagtgaccagagcaactgcagcctggagcccctgctgcagcagctgagcaccagctacaagaccatgcctgcctacagaaacctgcccctcatctggaagaagaagtgcctggtgcaggccaccaagtggaccccctgcagcaggacctgtggcatgggcatcagcaacagagtgaccaatgaaaacagcaactgtgagatgaggaaggagaagaggctgtgctacatccagccctgtgacagcaacatcctgaagaccatcaagatccccaagggcaagacctgccagcccaccttccagctgagcaaggccgagaagtttgtgttttctggctgcagcagcacccagagctacaagcccaccttctgtggcatctgcctggacaagcgctgctgcatccccaacaagagcaagatgatcaccatccagtttgactgccccaatgaaggcagcttcaagtggaagatgctgtggatcaccagctgtgtgtgccagaggaactgccgggagcccggggacatcttcagcgagctgaagatcctgtag

SEQ ID NO: 259396 - DNA, 1119 bp, Artificial Sequence
  derived and/or modified sequence
atgaacaagcggcggctgctgtaccccagcggctggctgcacggccctagcgacatgcaaggcctcctgttctctaccctgctgcttgcaggcctggcccaattctgctgcagagtgcagggcaccggcccactggataccaccccggagggcagaccgggcgaggtttcagacgccccacaaaggaaacagttttgtcactggccttgtaaatgtccacagcagaaacctaggtgcccccccggcgtgtcactcgttcgcgacggttgtggctgttgtaaaatttgcgctaagcaaccaggggaaatctgcaatgaagccgacctgtgcgacccacataaaggactttattgtgactattccgtggacagaccaaggtatgagacaggagtgtgcgcgtatctggtggccgtgggctgcgagttcaaccaggtgcactatcacaatggccaggtgtttcaacctaacccactcttctcctgcctttgcgtgtcgggggctatagggtgcacacccctgtttattccaaaactggccggaagccattgtagcggcgccaagggcggaaagaagtctgatcaaagcaattgctccctcgagcctctcttacagcaactcagcacctcctacaaaaccatgccagcataccggaaccttccattaatctggaagaaaaagtgcctggttcaggccaccaagtggacgccatgctctcgtacttgcggcatggggatctcaaacagggtgactaacgagaatagcaattgcgaaatgaggaaagagaagcggttatgttacattcagccctgtgactccaacattctcaaaaccataaagattccaaaggggaagacatgccagccgaccttccagctcagtaaagcggagaagttcgtgttttccgggtgtagcagtactcagagctacaaaccgacattctgcggcatctgtcttgacaaaaggtgctgcatacccaacaagtcaaaaatgattacaatccagtttgattgccctaatgagggtagtttcaaatggaagatgctgtggattactagctgcgtgtgccagaggaattgtcgcgaaccaggggatatcttttctgaacttaagattctctag

SEQ ID NO: 259397 - DNA, 1119 bp, Artificial Sequence
  derived and/or modified sequence
atgaataagcgtaggctgttatacccgtctggatggctccatgggcctagcgatatgcagggactgctattttcaactctccttctggctgggctcgcccaattctgctgccgcgtgcaaggtacaggacctctggataccacacccgaggggaggccaggcgaggtttctgatgcaccccagcgcaaacagttctgtcattggccatgcaaatgtccccaacagaaaccacggtgcccaccaggcgtgagcctggttcgcgacggttgtggttgttgtaagatctgcgccaaacagccaggcgaaatttgtaatgaagccgacctttgcgacccacacaaggggctgtattgtgattactcggtcgatagacctcgctacgagaccggagtgtgtgcttatcttgttgctgtgggctgcgagttcaatcaggtgcattaccacaatgggcaggtgttccaaccaaaccccctgttttcatgcctctgtgtttcaggagccatcggatgtaccccactctttattcccaagctcgctggctcacactgcagtggcgctaaaggcggaaaaaagagcgatcagtccaactgcagcctggagcctttgctacagcaactgtcaacctcttacaaaacaatgccggcttatcgaaatcttcccctaatctggaagaagaaatgtctggtgcaggccactaaatggactccttgtagtcggacatgtggcatgggcatttccaatagagtgacaaatgaaaacagcaattgtgagatgaggaaagaaaagaggctctgttacatacagccctgcgattccaatatccttaagaccatcaaaatccccaaggggaaaacgtgtcaacccacttttcagcttagcaaggctgagaagtttgttttttccggctgctctagcacccagagttataaacccaccttctgtgggatatgcctggataaaagatgctgtatcccgaacaaaagtaagatgataactatacagttcgactgccccaacgaaggtagctttaagtggaaaatgctgtggatcacaagctgcgtctgtcagaggaactgtagggagcccggagacatcttcagtgaactgaagattttgtag

SEQ ID NO: 259398 - DNA, 1119 bp, Artificial Sequence
  derived and/or modified sequence
atgaacaaaaggcggcttctatatcctagtggatggctgcatggccccagtgacatgcagggcctcttatttagcacactcttattagctggattggcacaattttgctgccgggtccaaggcactggaccccttgacactactccggaaggacgccctggcgaggtatctgatgcacctcagagaaagcagttttgtcattggccatgcaaatgccctcagcaaaaaccgcggtgccccccaggggttagcctcgtaagagacggctgtgggtgttgtaaaatatgtgccaagcaaccaggagaaatttgcaacgaggcagatctgtgcgatccccataaaggcttatattgcgactacagcgtggaccgcccacgctacgaaactggagtttgtgcctatctggtcgcagtgggctgcgaatttaaccaggtgcactatcacaacggacaagtgttccaacccaatcccttgtttagctgcttgtgtgtctcaggcgccattggctgcacgccactgttcatacccaagcttgccggctcccactgctcgggagcaaaagggggcaagaaatccgatcagtctaactgttctctggagcccctgctccagcagctctctaccagctacaaaacgatgccagcctatcgaaacctccccctgatttggaagaaaaaatgcctagtgcaggcgaccaagtggactccatgtagtcggacctgtgggatgggtatctccaaccgggtcacgaacgagaattccaactgcgagatgagaaaagagaagcgactgtgctacattcaaccctgcgattctaacatactcaagaccatcaagatacccaagggaaagacttgccagcccacgttccagctgtccaaggccgagaaatttgtcttttccggttgtagcagtactcagtcctataaacctactttctgcggaatctgtttagacaaaaggtgttgcatacctaataaatccaaaatgatcaccatccagttcgattgtcccaatgaggggagcttcaagtggaaaatgctttggatcacttcatgtgtgtgtcaaagaaactgccgcgagccaggagacatcttttctgaattgaagatcctttag

SEQ ID NO: 259399 - DNA, 1119 bp, Artificial Sequence
  derived and/or modified sequence
atgaacaagcggcgcctcctatacccaagcggctggctgcacggcccaagcgatatgcagggacttcttttctccaccctcctcctggccggcttggcccagttttgttgtagggttcagggcaccggcccccttgacactacccctgaaggaagaccaggagaagttagtgatgcacctcagagaaagcagttctgtcattggccctgcaagtgtccacagcagaaaccaagatgtccccctggcgtctctctcgtgagagacggctgcggttgttgcaagatctgcgcaaaacaaccaggcgaaatttgcaatgaggctgatttgtgtgatcctcataaaggcttatactgcgactactcagtcgaccggcctaggtatgaaacaggcgtgtgcgcttatcttgtcgctgtcggctgcgagtttaatcaggttcattaccacaacggccaagtttttcaacctaatccactcttctcctgtctctgcgtgtccggcgccatcggctgcaccccactattcattccaaaactggctgggtctcactgttcaggtgcaaagggaggcaaaaaatccgaccagagcaattgttcactcgagccactactccagcaattgagcacgtcctataaaaccatgcctgcctacaggaacttacctctgatctggaagaaaaagtgcctggtgcaagcaacaaagtggaccccttgttcccggacctgcggtatgggcatttccaatagggtcaccaatgagaattctaactgcgagatgagaaaagagaagagactgtgttacatccaaccatgtgactccaacatcctgaaaaccattaaaatacctaaaggaaaaacatgtcagcccacatttcaattaagcaaggcagagaaattcgtatttagcggctgtagttctacccagtcatataaacctactttctgcgggatctgcctggacaaacgctgttgcattcctaacaagtcaaagatgatcacgattcagttcgactgccccaacgagggttccttcaagtggaagatgctgtggataactagctgtgtgtgccaacgaaattgcagagaacccggcgacatcttctcagaactcaagattctctag

SEQ ID NO: 259400 - DNA, 2512 bp, Artificial Sequence
  derived and/or modified sequence
gtggggtttgcagaggagacaggggagctttgtgtacccggagcaatgaacaagcggcgacttctctacccctcagggtggctccacggtcccagcgacatgcaggggctcctcttctccactcttctgcttgctggcctggcacagttctgctgcagggtacagggcactggaccattagatacaacacctgaaggaaggcctggagaagtgtcagatgcacctcagcgtaaacagttttgtcactggccctgcaaatgccctcagcagaagccccgttgccctcctggagtgagcctggtgagagatggctgtggatgctgtaaaatctgtgccaagcaaccaggggaaatctgcaatgaagctgacctctgtgacccacacaaagggctgtattgtgactactcagtagacaggcctaggtacgagactggagtgtgtgcataccttgtagctgttgggtgcgagttcaaccaggtacattatcataatggccaagtgtttcagcccaaccccttgttcagctgcctctgtgtgagtggggccattggatgcacacctctgttcataccaaagctggctggcagtcactgctctggagctaaaggtggaaagaagtctgatcagtcaaactgtagcctggaaccattactacagcagctttcaacaagctacaaaacaatgccagcttatagaaatctcccacttatttggaaaaaaaaatgtcttgtgcaagcaacaaaatggactccctgctccagaacatgtgggatgggaatatctaacagggtgaccaatgaaaacagcaactgtgaaatgagaaaagagaaaagactgtgttacattcagccttgcgacagcaatatattaaagacaataaagattcccaaaggaaaaacatgccaacctactttccaactctccaaagctgaaaaatttgtcttttctggatgctcaagtactcagagttacaaacccactttttgtggaatatgcttggataagagatgctgtatccctaataagtctaaaatgattactattcaatttgattgcccaaatgaggggtcatttaaatggaagatgctgtggattacatcttgtgtgtgtcagagaaactgcagagaacctggagatatattttctgagctcaagattctgtaaaaccaagcaaatgggggaaaagttagtcaatcctgtcatataataaaaaaattagtgagtataaaatggtggcaaatctactttgtttaaaacagtatgaatgcctattctcagatcactacatttaaggcattagaaacttttaaaaagttatcttaaaaatatacataaaatttgaacaacttaaaaattgaactaatttctaaaatatatcctataattatataatacacagacatttgttaccatctaagcattttgtatatgaaaaaattatgcaatttacaagaaaatattttacaaaataatctggaatacttgctaaagctgtataaaaagtatactaaattttaggctgggcgcagtggttcatgtctgtaatcccagcacttcgggaggccaaggtgggcagatcatttgaggtcaggagtttgagaccagcctggccaacatggtgaaaccctgtctgtaattaaaaaaatacaaaaattagccaagtgtggtggcatgcgcctgtaatcccagctactcgggaggctgagtcagaagaattgcttgaacccaggtggtggaggttgcagtgggtcaagattgcaccactgcactggcacggagaagcgagactcctttgggggagaaaaaaacatactcaatttaaaaaatttaatctatatttgacaatgtagcctaaggtgcccattagttgatacatcattatagggcaagtgaaattctagattaattcttgaacagaaataagattaagctgtaaatatatttagacttttcactgcctgatcttgaatatcagtttcttttggaaaggagaaaatgcaacttttctggccactgttaacaactgcaatctaaaattttttacatcaaatattgtaaaaagttaaatttccaagacaaagaccaagaacagtatcattactttgcaaaggaaagaaatataaagaatacaacttaaaattaacctgtggatctgaaatataaaatgttattaaaaataaattaatgttaaggctagaactgaagattatagtaaccggaacaattatagccatttattgcaaagtttggaagatatcaagcttagtaacattctgttcatttgcataaatgtcatgcagaacaataacaagtagcactgttgaaaaatatagacatttattataaaatcaattggtttgataagaaagcaattatttaaaaagtttaatacaaatacatgttaagtgtacaaattaggattcttttgggcaaacaagttgttatctaaagaagaagcaaaacctccttaacagttgtaataaaacctatgcctgaaaagttggtggctatt

SEQ ID NO: 259401 - DNA, 1417 bp, Artificial Sequence
  derived and/or modified sequence
cctcctgagtcccgggaggaaagtgctcgcccattcctgacctgtgacacgctcactgcgaaggcaggttattagaagagtcccatgaaagtaaacagggtattaaaacggatccttaaaaatgaaagtgcaggctgaaagttggtagtgtgggaggtagagggtgtgtgttcttgtgcagaggagcgtggggtttgcagaggagacaggggagctttgtgtacccggagcaatgaacaagcggcgacttctctacccctcagggtggctccacggtcccagcgacatgcaggggctcctcttctccactcttctgcttgctggcctggcacagttctgctgcagggtacagggcactggaccattagatacaacacctgaaggaaggcctggagaagtgtcagatgcacctcagcgtaaacagttttgtcactggccctgcaaatgccctcagcagaagccccgttgccctcctggagtgagcctggtgagagatggctgtggatgctgtaaaatctgtgccaagcaaccaggggaaatctgcaatgaagctgacctctgtgacccacacaaagggctgtattgtgactactcagtagacaggcctaggtacgagactggagtgtgtgcataccttgtagctgttgggtgcgagttcaaccaggtacattatcataatggccaagtgtttcagcccaaccccttgttcagctgcctctgtgtgagtggggccattggatgcacacctctgttcataccaaagctggctggcagtcactgctctggagctaaaggtggaaagaagtctgatcagtcaaactgtagcctggaaccattactacagcagctttcaacaagctacaaaacaatgccagcttatagaaatctcccacttatttggaaaaaaaaatgtcttgtgcaagcaacaaaatggactccctgctccagaacatgtgggatgggaatatctaacagggtgaccaatgaaaacagcaactgtgaaatgagaaaagagaaaagactgtgttacattcagccttgcgacagcaatatattaaagacaataaagattcccaaaggaaaaacatgccaacctactttccaactctccaaagctgaaaaatttgtcttttctggatgctcaagtactcagagttacaaacccactttttgtggaatatgcttggataagagatgctgtatccctaataagtctaaaatgattactattcaatttgattgcccaaatgaggggtcatttaaatggaagatgctgtggattacatcttgtgtgtgtcagagaaactgcagagaacctggagatatattttctgagctcaagattctgtaaaaccaagcaaatgggggaaaagttagtcaatcctgtcatataataaaaaaattagtgagtataaaa

SEQ ID NO: 259402 - protein, 1392 aa, Artificial Sequence
  derived and/or modified sequence
MSMLKPSGLKAPTKILKPGSTALKTPTAVVAPVEKTISSEKASSTPSSETQEEFVDDFRVGERVWVNGNKPGFIQFLGETQFAPGQWAGIVLDEPIGKNDGSVAGVRYFQCEPLKGIFTRPSKLTRKVQAEDEANGLQTTPASRATSPLCTSTASMVSSSPSTPSNIPQKPSQPAAKEPSATPPISNLTKTASESISNLSEAGSIKKGERELKIGDRVLVGGTKAGVVRFLGETDFAKGEWCGVELDEPLGKNDGAVAGTRYFQCQPKYGLFAPVHKVTKIGFPSTTPAKAKANAVRRVMATTSASLKRSPSASSLSSMSSVASSVSSRPSRTGLLTETSSRYARKISGTTALQEALKEKQQHIEQLLAERDLERAEVAKATSHVGEIEQELALARDGHDQHVLELEAKMDQLRTMVEAADREKVELLNQLEEEKRKVEDLQFRVEEESITKGDLEVATVSEKSRIMELEKDLALRVQEVAELRRRLESNKPAGDVDMSLSLLQEISSLQEKLEVTRTDHQREITSLKEHFGAREETHQKEIKALYTATEKLSKENESLKSKLEHANKENSDVIALWKSKLETAIASHQQAMEELKVSFSKGLGTETAEFAELKTQIEKMRLDYQHEIENLQNQQDSERAAHAKEMEALRAKLMKVIKEKENSLEAIRSKLDKAEDQHLVEMEDTLNKLQEAEIKVKELEVLQAKCNEQTKVIDNFTSQLKATEEKLLDLDALRKASSEGKSEMKKLRQQLEAAEKQIKHLEIEKNAESSKASSITRELQGRELKLTNLQENLSEVSQVKETLEKELQILKEKFAEASEEAVSVQRSMQETVNKLHQKEEQFNMLSSDLEKLRENLADMEAKFREKDEREEQLIKAKEKLENDIAEIMKMSGDNSSQLTKMNDELRLKERDVEELQLKLTKANENASFLQKSIEDMTVKAEQSQQEAAKKHEEEKKELERKLSDLEKKMETSHNQCQELKARYERATSETKTKHEEILQNLQKTLLDTEDKLKGAREENSGLLQELEELRKQADKAKAAQTAEDAMQIMEQMTKEKTETLASLEDTKQTNAKLQNELDTLKENNLKNVEELNKSKELLTVENQKMEEFRKEIETLKQAAAQKSQQLSALQEENVKLAEELGRSRDEVTSHQKLEEERSVLNNQLLEMKKRESKFIKDADEEKASLQKSISITSALLTEKDAELEKLRNEVTVLRGENASAKSLHSVVQTLESDKVKLELKVKNLELQLKENKRQLSSSSGNTDTQADEDERAQESQIDFLNSVIVDLQRKNQDLKMKVEMMSEAALNGNGDDLNNYDSDDQEKQSKKKPRLFCDICDCFDLHDTEDCPTQAQMSEDPPHSTHHGSRGEERPYCEICEMFGHWATNCNDDETF

SEQ ID NO: 259403 - protein, 1159 aa, Artificial Sequence
  derived and/or modified sequence
MVSSSPSTPSNIPQKPSQPAAKEPSATPPISNLTKTASESISNLSEAGSIKKGERELKIGDRVLVGGTKAGVVRFLGETDFAKGEWCGVELDEPLGKNDGAVAGTRYFQCQPKYGLFAPVHKVTKIGFPSTTPAKAKANAVRRVMATTSASLKRSPSASSLSSMSSVASSVSSRPSRTGLLTETSSRYARKISGTTALQEALKEKQQHIEQLLAERDLERAEVAKATSHVGEIEQELALARDGHDQHVLELEAKMDQLRTMVEAADREKVELLNQLEEEKRKVEDLQFRVEEESITKGDLETQTKLEHARIKELEQSLLFEKTKADKLQRELEDTRVATVSEKSRIMELEKDLALRVQEVAELRRRLESNKPAGDVDMSLSLLQEISSLQEKLEVTRTDHQREITSLKEHFGAREETHQKEIKALYTATEKLSKENESLKSKLEHANKENSDVIALWKSKLETAIASHQQAMEELKVSFSKGLGTETAEFAELKTQIEKMRLDYQHEIENLQNQQDSERAAHAKEMEALRAKLMKVIKEKENSLEAIRSKLDKAEDQHLVEMEDTLNKLQEAEIKKEKFAEASEEAVSVQRSMQETVNKLHQKEEQFNMLSSDLEKLRENLADMEAKFREKDEREEQLIKAKEKLENDIAEIMKMSGDNSSQLTKMNDELRLKERDVEELQLKLTKANENASFLQKSIEDMTVKAEQSQQEAAKKHEEEKKELERKLSDLEKKMETSHNQCQELKARYERATSETKTKHEEILQNLQKTLLDTEDKLKGAREENSGLLQELEELRKQADKAKAAQTAEDAMQIMEQMTKEKTETLASLEDTKQTNAKLQNELDTLKENNLKNVEELNKSKELLTVENQKMEEFRKEIETLKQAAAQKSQQLSALQEENVKLAEELGRSRDEVTSHQKLEEERSVLNNQLLEMKKRESKFIKDADEEKASLQKSISITSALLTEKDAELEKLRNEVTVLRGENASAKSLHSVVQTLESDKVKLELKVKNLELQLKENKRQLSSSSGNTDTQADEDERAQESQNQIDFLNSVIVDLQRKNQDLKMKVEMMSEAALNGNGDDLNNYDSDDQEKQSKKKPRLFCDICDCFDLHDTEDCPTQAQMSEDPPHSTHHGSRGEERPYCEICEMFGHWATNCNDDETF

SEQ ID NO: 259404 - DNA, 4179 bp, Artificial Sequence
  derived and/or modified sequence
atgagcatgctgaagcccagcggcctgaaggcccccaccaagatcctgaagcccggcagcaccgccctgaagacccccaccgccgtggtggcccccgtggagaagaccatcagcagcgagaaggccagcagcacccccagcagcgagacccaggaggagttcgtggacgacttcagagtgggcgagagagtgtgggtgaacggcaacaagcccggcttcatccagttcctgggcgagacccagttcgcccccggccagtgggccggcatcgtgctggacgagcccatcggcaagaacgacggcagcgtggccggcgtgagatacttccagtgcgagcccctgaagggcatcttcaccagacccagcaagctgaccagaaaggtgcaggccgaggacgaggccaacggcctgcagaccacccccgccagcagagccaccagccccctgtgcaccagcaccgccagcatggtgagcagcagccccagcacccccagcaacatcccccagaagcccagccagcccgccgccaaggagcccagcgccaccccccccatcagcaacctgaccaagaccgccagcgagagcatcagcaacctgagcgaggccggcagcatcaagaagggcgagagagagctgaagatcggcgacagagtgctggtgggcggcaccaaggccggcgtggtgagattcctgggcgagaccgacttcgccaagggcgagtggtgcggcgtggagctggacgagcccctgggcaagaacgacggcgccgtggccggcaccagatacttccagtgccagcccaagtacggcctgttcgcccccgtgcacaaggtgaccaagatcggcttccccagcaccacccccgccaaggccaaggccaacgccgtgagaagagtgatggccaccaccagcgccagcctgaagagaagccccagcgccagcagcctgagcagcatgagcagcgtggccagcagcgtgagcagcagacccagcagaaccggcctgctgaccgagaccagcagcagatacgccagaaagatcagcggcaccaccgccctgcaggaggccctgaaggagaagcagcagcacatcgagcagctgctggccgagagagacctggagagagccgaggtggccaaggccaccagccacgtgggcgagatcgagcaggagctggccctggccagagacggccacgaccagcacgtgctggagctggaggccaagatggaccagctgagaaccatggtggaggccgccgacagagagaaggtggagctgctgaaccagctggaggaggagaagagaaaggtggaggacctgcagttcagagtggaggaggagagcatcaccaagggcgacctggaggtggccaccgtgagcgagaagagcagaatcatggagctggagaaggacctggccctgagagtgcaggaggtggccgagctgagaagaagactggagagcaacaagcccgccggcgacgtggacatgagcctgagcctgctgcaggagatcagcagcctgcaggagaagctggaggtgaccagaaccgaccaccagagagagatcaccagcctgaaggagcacttcggcgccagagaggagacccaccagaaggagatcaaggccctgtacaccgccaccgagaagctgagcaaggagaacgagagcctgaagagcaagctggagcacgccaacaaggagaacagcgacgtgatcgccctgtggaagagcaagctggagaccgccatcgccagccaccagcaggccatggaggagctgaaggtgagcttcagcaagggcctgggcaccgagaccgccgagttcgccgagctgaagacccagatcgagaagatgagactggactaccagcacgagatcgagaacctgcagaaccagcaggacagcgagagagccgcccacgccaaggagatggaggccctgagagccaagctgatgaaggtgatcaaggagaaggagaacagcctggaggccatcagaagcaagctggacaaggccgaggaccagcacctggtggagatggaggacaccctgaacaagctgcaggaggccgagatcaaggtgaaggagctggaggtgctgcaggccaagtgcaacgagcagaccaaggtgatcgacaacttcaccagccagctgaaggccaccgaggagaagctgctggacctggacgccctgagaaaggccagcagcgagggcaagagcgagatgaagaagctgagacagcagctggaggccgccgagaagcagatcaagcacctggagatcgagaagaacgccgagagcagcaaggccagcagcatcaccagagagctgcagggcagagagctgaagctgaccaacctgcaggagaacctgagcgaggtgagccaggtgaaggagaccctggagaaggagctgcagatcctgaaggagaagttcgccgaggccagcgaggaggccgtgagcgtgcagagaagcatgcaggagaccgtgaacaagctgcaccagaaggaggagcagttcaacatgctgagcagcgacctggagaagctgagagagaacctggccgacatggaggccaagttcagagagaaggacgagagagaggagcagctgatcaaggccaaggagaagctggagaacgacatcgccgagatcatgaagatgagcggcgacaacagcagccagctgaccaagatgaacgacgagctgagactgaaggagagagacgtggaggagctgcagctgaagctgaccaaggccaacgagaacgccagcttcctgcagaagagcatcgaggacatgaccgtgaaggccgagcagagccagcaggaggccgccaagaagcacgaggaggagaagaaggagctggagagaaagctgagcgacctggagaagaagatggagaccagccacaaccagtgccaggagctgaaggccagatacgagagagccaccagcgagaccaagaccaagcacgaggagatcctgcagaacctgcagaagaccctgctggacaccgaggacaagctgaagggcgccagagaggagaacagcggcctgctgcaggagctggaggagctgagaaagcaggccgacaaggccaaggccgcccagaccgccgaggacgccatgcagatcatggagcagatgaccaaggagaagaccgagaccctggccagcctggaggacaccaagcagaccaacgccaagctgcagaacgagctggacaccctgaaggagaacaacctgaagaacgtggaggagctgaacaagagcaaggagctgctgaccgtggagaaccagaagatggaggagttcagaaaggagatcgagaccctgaagcaggccgccgcccagaagagccagcagctgagcgccctgcaggaggagaacgtgaagctggccgaggagctgggcagaagcagagacgaggtgaccagccaccagaagctggaggaggagagaagcgtgctgaacaaccagctgctggagatgaagaagagagagagcaagttcatcaaggacgccgacgaggagaaggccagcctgcagaagagcatcagcatcaccagcgccctgctgaccgagaaggacgccgagctggagaagctgagaaacgaggtgaccgtgctgagaggcgagaacgccagcgccaagagcctgcacagcgtggtgcagaccctggagagcgacaaggtgaagctggagctgaaggtgaagaacctggagctgcagctgaaggagaacaagagacagctgagcagcagcagcggcaacaccgacacccaggccgacgaggacgagagagcccaggagagccagatcgacttcctgaacagcgtgatcgtggacctgcagagaaagaaccaggacctgaagatgaaggtggagatgatgagcgaggccgccctgaacggcaacggcgacgacctgaacaactacgacagcgacgaccaggagaagcagagcaagaagaagcccagactgttctgcgacatctgcgactgcttcgacctgcacgacaccgaggactgccccacccaggcccagatgagcgaggaccccccccacagcacccaccacggcagcagaggcgaggagagaccctactgcgagatctgcgagatgttcggccactgggccaccaactgcaacgacgacgagaccttctag

SEQ ID NO: 259405 - DNA, 252 bp, Artificial Sequence
  derived and/or modified sequence
atgagcatgctgaagcccagcggcctgaaggcccccaccaagatcctgaagcccggcagcaccgccctgaagacccccaccgccgtggtggcccccgtggagaagaccatcagcagcgagaaggccagcagcacccccagcagcgagacccaggaggagttcgtggacgacttcagagtgggcgagagagtgtgggtgaacggcaacaagcccggcttcatccagttcctgggcgagacccagttcgcctag

SEQ ID NO: 259406 - DNA, 3480 bp, Artificial Sequence
  derived and/or modified sequence
atggtgagcagcagccccagcacccccagcaacatcccccagaagcccagccagcccgccgccaaggagcccagcgccaccccccccatcagcaacctgaccaagaccgccagcgagagcatcagcaacctgagcgaggccggcagcatcaagaagggcgagagagagctgaagatcggcgacagagtgctggtgggcggcaccaaggccggcgtggtgagattcctgggcgagaccgacttcgccaagggcgagtggtgcggcgtggagctggacgagcccctgggcaagaacgacggcgccgtggccggcaccagatacttccagtgccagcccaagtacggcctgttcgcccccgtgcacaaggtgaccaagatcggcttccccagcaccacccccgccaaggccaaggccaacgccgtgagaagagtgatggccaccaccagcgccagcctgaagagaagccccagcgccagcagcctgagcagcatgagcagcgtggccagcagcgtgagcagcagacccagcagaaccggcctgctgaccgagaccagcagcagatacgccagaaagatcagcggcaccaccgccctgcaggaggccctgaaggagaagcagcagcacatcgagcagctgctggccgagagagacctggagagagccgaggtggccaaggccaccagccacgtgggcgagatcgagcaggagctggccctggccagagacggccacgaccagcacgtgctggagctggaggccaagatggaccagctgagaaccatggtggaggccgccgacagagagaaggtggagctgctgaaccagctggaggaggagaagagaaaggtggaggacctgcagttcagagtggaggaggagagcatcaccaagggcgacctggagacccagaccaagctggagcacgccagaatcaaggagctggagcagagcctgctgttcgagaagaccaaggccgacaagctgcagagagagctggaggacaccagagtggccaccgtgagcgagaagagcagaatcatggagctggagaaggacctggccctgagagtgcaggaggtggccgagctgagaagaagactggagagcaacaagcccgccggcgacgtggacatgagcctgagcctgctgcaggagatcagcagcctgcaggagaagctggaggtgaccagaaccgaccaccagagagagatcaccagcctgaaggagcacttcggcgccagagaggagacccaccagaaggagatcaaggccctgtacaccgccaccgagaagctgagcaaggagaacgagagcctgaagagcaagctggagcacgccaacaaggagaacagcgacgtgatcgccctgtggaagagcaagctggagaccgccatcgccagccaccagcaggccatggaggagctgaaggtgagcttcagcaagggcctgggcaccgagaccgccgagttcgccgagctgaagacccagatcgagaagatgagactggactaccagcacgagatcgagaacctgcagaaccagcaggacagcgagagagccgcccacgccaaggagatggaggccctgagagccaagctgatgaaggtgatcaaggagaaggagaacagcctggaggccatcagaagcaagctggacaaggccgaggaccagcacctggtggagatggaggacaccctgaacaagctgcaggaggccgagatcaagaaggagaagttcgccgaggccagcgaggaggccgtgagcgtgcagagaagcatgcaggagaccgtgaacaagctgcaccagaaggaggagcagttcaacatgctgagcagcgacctggagaagctgagagagaacctggccgacatggaggccaagttcagagagaaggacgagagagaggagcagctgatcaaggccaaggagaagctggagaacgacatcgccgagatcatgaagatgagcggcgacaacagcagccagctgaccaagatgaacgacgagctgagactgaaggagagagacgtggaggagctgcagctgaagctgaccaaggccaacgagaacgccagcttcctgcagaagagcatcgaggacatgaccgtgaaggccgagcagagccagcaggaggccgccaagaagcacgaggaggagaagaaggagctggagagaaagctgagcgacctggagaagaagatggagaccagccacaaccagtgccaggagctgaaggccagatacgagagagccaccagcgagaccaagaccaagcacgaggagatcctgcagaacctgcagaagaccctgctggacaccgaggacaagctgaagggcgccagagaggagaacagcggcctgctgcaggagctggaggagctgagaaagcaggccgacaaggccaaggccgcccagaccgccgaggacgccatgcagatcatggagcagatgaccaaggagaagaccgagaccctggccagcctggaggacaccaagcagaccaacgccaagctgcagaacgagctggacaccctgaaggagaacaacctgaagaacgtggaggagctgaacaagagcaaggagctgctgaccgtggagaaccagaagatggaggagttcagaaaggagatcgagaccctgaagcaggccgccgcccagaagagccagcagctgagcgccctgcaggaggagaacgtgaagctggccgaggagctgggcagaagcagagacgaggtgaccagccaccagaagctggaggaggagagaagcgtgctgaacaaccagctgctggagatgaagaagagagagagcaagttcatcaaggacgccgacgaggagaaggccagcctgcagaagagcatcagcatcaccagcgccctgctgaccgagaaggacgccgagctggagaagctgagaaacgaggtgaccgtgctgagaggcgagaacgccagcgccaagagcctgcacagcgtggtgcagaccctggagagcgacaaggtgaagctggagctgaaggtgaagaacctggagctgcagctgaaggagaacaagagacagctgagcagcagcagcggcaacaccgacacccaggccgacgaggacgagagagcccaggagagccagaaccagatcgacttcctgaacagcgtgatcgtggacctgcagagaaagaaccaggacctgaagatgaaggtggagatgatgagcgaggccgccctgaacggcaacggcgacgacctgaacaactacgacagcgacgaccaggagaagcagagcaagaagaagcccagactgttctgcgacatctgcgactgcttcgacctgcacgacaccgaggactgccccacccaggcccagatgagcgaggaccccccccacagcacccaccacggcagcagaggcgaggagagaccctactgcgagatctgcgagatgttcggccactgggccaccaactgcaacgacgacgagaccttctag

SEQ ID NO: 259407 - DNA, 4179 bp, Artificial Sequence
  derived and/or modified sequence
atgtctatgctgaaaccaagtggtcttaaggctccgactaagattctcaagcccgggtccaccgctcttaaaacaccaaccgcagtggttgcccctgtcgagaaaactatttcgagtgagaaagcttctagtactcctagttctgaaacacaggaagagtttgtggatgatttccgcgtgggggagcgagtctgggttaatggcaataagccggggttcattcagtttctcggcgagacacagtttgcacctggtcagtgggctggaatcgtcctcgatgaacctatcgggaagaacgacggtagcgtggcgggtgttcgctactttcagtgtgaaccacttaagggtatattcacaagaccttccaaacttacacgtaaagtccaggcggaggatgaggccaacggcctccagaccaccccagcctcaagggccacaagtccgttatgtacctctaccgctagtatggtgtcctctagcccctctacaccctcaaacattccccagaaacctagccaacctgcggcaaaagagcctagtgcaaccccccctatttccaatctgactaagaccgcctccgagtcaattagtaaccttagcgaggctgggagcattaagaagggcgaacgggaattgaaaatcggagatcgagtgcttgtaggaggaacgaaggcgggagtcgtacgctttttgggagagactgacttcgccaaaggtgagtggtgtggcgtcgagctggacgaaccgctgggaaagaacgatggggcagtcgctggaactaggtatttccagtgtcagccaaaatacggcctgtttgccccagtgcataaggtgacaaagatcgggttcccatctacaacccctgccaaggcaaaggccaatgccgttcgacgcgtcatggccacaaccagcgcgagccttaaacggagccccagcgcctcttccttaagcagcatgtcctcagtggcttcctcagtgagcagccggcccagtcgtacgggcttgctgacagaaacatccagccggtacgcgaggaaaatttccggcacaaccgccctgcaggaagcgctgaaagagaaacagcaacacatagagcagctcctcgccgagagggatcttgagagggccgaagtggccaaggcaacttcgcatgtgggtgagatagagcaggaactggccctcgcacgagacggacacgaccagcacgtcctggagctggaggctaagatggaccaattgcgcactatggtcgaggcagcagatcgggagaaggtcgaactcctgaaccagctggaagaagaaaagcggaaagtggaggacttgcagttcagagtcgaggaagagtcaattacaaaaggagatctggaggtggccactgtttcggagaagtcgagaatcatggaactcgaaaaagatctggccttgcgagtacaggaggtcgcagagctcagacgaagactggaaagcaacaagcctgctggcgacgttgatatgagtctatcactgctgcaggaaatctctagcctgcaggaaaaactagaggtaacacgaaccgaccatcagcgggaaattacctctttaaaagagcactttggggcacgggaagagacccaccagaaagagatcaaagctttgtatacagctacagagaagctcagcaaagagaacgagtctttaaaaagtaagcttgaacacgccaataaggagaattccgacgttattgctctgtggaaatcgaagctggagaccgcgatagcttcccaccagcaagcaatggaggagcttaaggtgtcattttcaaagggcttgggaacagaaactgctgagtttgccgagctcaagacccagatcgagaagatgagattggactaccaacatgaaatagagaacttacagaaccagcaggacagtgagagagcagcacacgccaaggagatggaagccctcagggccaaactgatgaaggtgataaaggagaaagagaattctctcgaggccatcaggtccaagctcgataaagctgaggaccagcacctggtagagatggaagacacactgaataagctccaggaagctgagatcaaggtcaaggaacttgaagtgttacaggcaaaatgcaacgagcagacaaaggtgattgataacttcaccagccagttaaaggccaccgaagagaagctgcttgatctggatgcactgaggaaggcctcctcggaaggtaagagtgaaatgaagaagctgaggcaacagctggaggcggctgaaaaacagatcaagcatctcgagatcgagaagaatgcagaatcttcaaaggcctccagcatcactcgggaactacaggggagagagttgaagctgacaaatctccaggaaaatctcagtgaggtgagtcaagtcaaggagacgctggagaaagagctacagatactgaaggagaagtttgctgaagcatctgaggaggctgtctcagtgcagagatcgatgcaggagacagttaacaagctgcaccagaaggaggaacagttcaacatgctgtctagcgatttggaaaaattacgagagaacttggccgatatggaagcgaagttccgggaaaaggacgaaagagaagagcagctgatcaaggccaaggagaagttggaaaatgacatcgcagagattatgaagatgtcgggggataactccagtcagttgaccaagatgaatgatgagctgcgcctcaaggaaagagatgtggaggaactgcaactgaaactgacgaaagccaatgaaaacgcatcatttctacaaaaaagcatcgaggatatgactgtgaaggctgaacagtcacaacaagaggctgctaagaagcacgaagaagagaaaaaagagctcgagcgaaaactcagcgatctggagaagaagatggagacttcgcataatcagtgtcaggaactgaaggctagatacgagagagcaacaagcgaaactaaaacaaagcacgaagagattctccagaacttgcaaaagactcttctggatactgaagataagctgaaaggcgcaagggaggaaaacagtggtcttctccaagagctggaagagcttcggaagcaggcagataaagccaaagccgcgcagaccgcagaggacgccatgcagattatggagcagatgaccaaagaaaaaacggagacactggctagcctcgaagacaccaaacagacgaatgcaaagctgcagaacgagctagatactctcaaggaaaacaacttaaaaaacgtggaggagctgaataagagtaaggaattgctgaccgttgagaaccagaagatggaggagtttagaaaggaaatcgaaactttgaagcaggctgccgctcagaaatcacagcaactatcagccctacaagaagagaacgtaaagttggccgaagagctaggtcgcagcagggatgaggtgacatctcatcaaaagctagaagaggagcgctccgtgctgaacaaccagctcctggagatgaagaagcgcgaatcaaagttcatcaaagatgccgatgaggagaaggcgtctctgcaaaagtcgattagcattacctccgcattgctgacggaaaaggatgcggaactggaaaagttgcggaacgaggttaccgtgctgagaggcgagaacgcaagcgctaagtcgcttcacagcgtggttcagactctggaatcagacaaagtgaaacttgagctcaaggtaaaaaatctagaactccagctcaaggagaacaagaggcaactctccagttcaagtggcaataccgacacgcaagccgacgaagatgaaagagcccaagaatcccagatcgattttctcaatagcgtcattgtggacctccaaaggaagaaccaggatctcaagatgaaagtcgaaatgatgtctgaagctgccctgaatggaaacggggacgacctcaataactacgacagtgatgatcaggagaaacagtctaaaaaaaagcctagattgttttgcgatatttgcgattgctttgacctccacgatacagaggactgtccgactcaagctcaaatgtccgaggaccctcctcactcaactcaccacgggtcgcggggcgaggaacgcccatactgtgagatatgtgaaatgttcggccactgggcaactaactgcaacgacgacgaaacattctag

SEQ ID NO: 259408 - DNA, 252 bp, Artificial Sequence
  derived and/or modified sequence
atgtcaatgctgaagccttccgggctgaaggcccctacaaaaattctcaaacccggttccaccgctctgaagacccctaccgcagtcgtggccccggtggagaagaccatcagcagtgagaaggcctctagcacgccctcttccgagactcaggaggaattcgtggatgactttcgggttggagaacgcgtctgggtaaacgggaacaagcctggttttatccagtttctcggagaaacccagttcgcctag

SEQ ID NO: 259409 - DNA, 3480 bp, Artificial Sequence
  derived and/or modified sequence
atggtatcgtcttctccctccacaccctccaatattcctcagaaaccctcacaaccagctgccaaggaacccagtgctacgccacccatttccaacctaacaaaaaccgcaagtgaatccatcagtaatctcagcgaggctggttcaattaagaagggggaacgagagctcaaaattggagacagagtgctggtgggcggcaccaaggccggcgtagtgagattcctgggagagaccgacttcgccaaaggtgagtggtgcggggtcgaactcgatgagcctctaggtaagaacgacggcgccgtagctggaaccagatatttccagtgccagccaaagtatggtttgtttgcccccgtccataaagtcacaaagattggcttcccatcgacaacaccagcaaaggctaaggctaatgcagttcgacgggtcatggcgacaacgtctgcaagcttgaagcgctctccgtctgcatcatctctgagttctatgagctccgtggcctctagcgtgtcatctaggcctagcagaactgggttgctgacggaaacttccagccgctacgcaagaaaaatttccggtaccacagccctgcaggaagccctcaaggagaaacagcagcacattgagcaactgctggctgaacgcgatttggagagagccgaggtggccaaggcgacctcacatgttggggagatagaacaagaattagccctggcccgggacggccatgaccagcacgtgcttgaacttgaagccaagatggatcagctgcgcacgatggtcgaagccgcagatcgcgaaaaggtggagctgctcaatcaactcgaggaggagaagaggaaagtcgaggacttgcagtttagggtcgaagaggaaagtattaccaagggggacctcgagactcagaccaagttagagcatgctcgcatcaaggagctggaacagtcccttctgttcgagaagacaaaagccgataagttacagagggaacttgaggacacgagagtcgctaccgtgagtgaaaaatctaggattatggaattagaaaaggacttagccctcagggtgcaagaggttgcagaactgaggagaagactcgagtctaataagccagctggagatgtggatatgagccttagtcttctgcaggagatctcatctcttcaggagaaattagaggtgaccaggaccgatcaccagagagaaatcacgtccctgaaagagcacttcggcgcccgggaagagacccaccagaaggagatcaaagctttatacacggccacagagaaacttagcaaggagaatgagtcactcaagtcaaagctggaacatgccaataaggagaacagcgacgtgattgctctctggaagtctaagctggagactgcgattgcttcacatcaacaggctatggaagaactgaaagtaagcttttcaaagggcctgggtactgagaccgcagagtttgccgagctgaaaacacagatagaaaagatgagacttgattaccagcacgaaatagagaacctccaaaatcagcaggactctgagagggcagcacatgcaaaagagatggaagctttgcgagcaaagttgatgaaggttatcaaggagaaggagaattccttggaggctatccggagcaagctcgataaggcggaggatcagcatttggttgagatggaggacaccctcaacaagttacaggaagctgaaattaaaaaggaaaagttcgctgaagcctctgaagaggcggtgtctgtccaacgttctatgcaggagaccgttaataagctacaccaaaaggaggagcaattcaacatgctgtcctccgatctcgagaagctccgagagaacttggccgacatggaagcaaaatttcgcgaaaaggatgagcgggaagagcaactaataaaagcaaaggagaagctcgagaatgacatcgccgagatcatgaaaatgtccggtgacaactcttcacaattgaccaaaatgaacgacgaactgcgactgaaagagagagacgttgaggagctgcagctcaaattgacaaaggccaacgaaaacgccagcttcctacagaagagcatcgaggacatgaccgtcaaagcggaacagtctcagcaggaggccgcaaagaaacatgaggaggagaagaaggaattagagcgtaagctctccgatctggagaaaaagatggagacgagccataaccagtgtcaggagctgaaggccaggtatgaacgggcgacttccgagactaagactaagcatgaggaaatcttgcagaatctgcagaagacacttctggacactgaggacaaactcaagggcgctagggaggagaacagtggcctactgcaggaactggaagagttacggaaacaggccgacaaggctaaggctgcccagacggcggaagacgcaatgcagataatggagcagatgacaaaagaaaagacggaaacccttgcatccctggaggacacgaagcagacgaacgctaaacttcaaaatgaactagacaccttgaaagagaacaatctaaagaacgtagaggagctgaataagagcaaggaacttctgacggtagagaaccagaagatggaggaatttaggaaagaaatcgagacattgaaacaggccgctgcacagaagtctcaacagttatcggcactgcaggaggagaatgtcaaactggccgaggagctgggccgctcccgggatgaagtgaccagtcatcaaaagctcgaggaggagagatccgtccttaacaatcagctccttgaaatgaaaaagagagaatctaaattcatcaaggacgccgatgaggagaaagccagtttacagaaaagcatttcaatcacctccgccctgttaacggaaaaagacgcagagcttgagaagcttaggaacgaagtaactgtgctgagaggagaaaatgcatccgcgaagtcgctccatagcgtggttcagactctggaatctgacaaggttaagctagagttgaaagtcaaaaatctagaactgcagctgaaagaaaataagcgccagctgtccagttcctcaggcaacaccgatactcaggcggatgaagacgagagagctcaggaatcacaaaaccagatcgattttttaaactctgtgattgtggatctccagcgaaagaatcaagacctcaagatgaaagtcgaaatgatgtccgaggccgccttgaatggaaatggcgacgacttaaataactatgacagtgatgaccaggagaagcagtccaagaagaaaccccgtttattttgcgacatttgcgattgttttgacctgcacgatactgaggactgcccaacacaggcccagatgtccgaagatccaccccacagtacacatcacgggtccaggggcgaagagaggccctactgcgagatctgcgagatgttcggccattgggctaccaactgcaatgatgatgagactttttag

SEQ ID NO: 259410 - DNA, 4179 bp, Artificial Sequence
  derived and/or modified sequence
atgtccatgctgaagcccagcggcctgaaggcccccaccaagatcctgaagccaggcagcacagccctgaagacccccacagctgtggtggcccctgtggagaagaccatcagcagcgagaaggccagcagcacccccagcagcgagacccaggaggagtttgtggatgacttccgggtgggggagcgggtgtgggtgaatggaaacaagccaggcttcatccagttcctgggggagacccagtttgcccctggccagtgggccggcatcgtgctggatgagcccatcggcaagaatgatggctctgtggccggcgtgcgctacttccagtgtgagcccctgaagggcatcttcacccggcccagcaagctgaccaggaaggtgcaggctgaagatgaggccaacggcctgcagaccaccccagccagccgggccaccagccccctgtgcaccagcacagcctccatggtgagcagcagccccagcacccccagcaacatcccccagaagcccagccagcctgctgccaaggagcccagcgccaccccacccatcagcaacctgaccaagacagccagcgagagcatcagcaacctgtctgaggccggcagcatcaagaagggggagcgggagctgaagatcggggacagagtgctggtgggcggcaccaaggccggcgtggtgcgcttcctgggggagacagactttgccaagggggagtggtgtggggtggagctggatgagcccctgggcaagaatgatggagctgtggccggcacccgctacttccagtgccagcccaagtatggcctgtttgcccctgtgcacaaggtgaccaagattggcttccccagcaccaccccagccaaggccaaggccaatgctgtgagaagagtgatggccaccaccagcgccagcctgaagaggagccccagcgccagcagcctgagctccatgagctctgtggccagctctgtgagcagccggcccagcaggacaggcctgctgacagagaccagcagccgctatgccaggaagatcagcggcaccacagccctgcaggaggccctgaaggagaagcagcagcacatcgagcagctgctggccgagcgggacctggagcgggcagaggtggccaaggccaccagccacgtgggggagattgagcaggagctggccctggccagagatggccatgaccagcacgtgctggagctggaggccaagatggaccagctgcggaccatggtggaggccgctgaccgggagaaggtggagctgctgaaccagctggaggaggagaagaggaaggtggaggacctgcagttccgggtggaggaggagagcatcaccaagggggacctggaggtggccaccgtgtctgagaagagccgcatcatggagctggagaaggacctggccctgcgggtgcaggaggtggccgagctgcggcggcggctggagagcaacaagccagctggagatgtggacatgagcctgagcctgctgcaggagatcagcagcctgcaggagaagctggaggtgaccaggacagaccaccagcgggagatcaccagcctgaaggagcactttggagcccgggaggagacccaccagaaggagatcaaggccctgtacacagccacagagaagctgagcaaagaaaatgaaagcctgaagagcaagctggagcacgccaacaaggaaaattctgatgtgattgccctgtggaagagcaagctggagacagccatcgccagccaccagcaggccatggaggagctgaaggtgtccttcagcaagggcctgggcacagaaacagctgagtttgctgagctgaagacccagatcgagaagatgaggctggactaccagcacgagattgagaacctgcagaaccagcaggacagcgagcgggccgcccacgccaaggagatggaggccctgcgggccaagctgatgaaggtgatcaaggagaaggagaacagcctggaggccatccgcagcaagctggacaaggccgaggaccagcacctggtggagatggaggacaccctgaacaagctgcaggaggccgagatcaaggtgaaggagctggaggtgctgcaggccaagtgcaatgagcagaccaaggtgattgacaacttcaccagccagctgaaggccacagaggagaagctgctggacctggatgccctgaggaaggccagcagcgagggcaagtctgagatgaagaagctgcggcagcagctggaggccgctgagaagcagatcaagcacctggagattgagaagaatgctgagagcagcaaggccagcagcatcacccgggagctgcagggccgggagctgaagctgaccaacctgcaggagaacctgtctgaggtgtcccaggtgaaggagaccctggagaaggagctgcagatcctgaaggagaagtttgctgaggccagcgaggaggccgtgtctgtgcagaggtccatgcaggagaccgtgaacaagctgcaccagaaggaggagcagttcaacatgctgagcagtgacctggagaagctgcgggagaacctggccgacatggaggccaagttccgggagaaggatgagcgggaggagcagctgatcaaggccaaggagaagctggagaatgacattgctgagatcatgaagatgtctggggacaacagcagccagctgaccaagatgaatgatgagctgcggctgaaggagagagatgtggaggagctgcagctgaagctgaccaaggccaatgaaaatgccagcttcctgcagaagagcattgaggacatgacagtgaaggccgagcagagccagcaggaggccgccaagaagcatgaggaggagaagaaggagctggagaggaagctgagtgacctggagaagaagatggagaccagccacaaccagtgccaggagctgaaggcccgctatgagcgggccaccagcgagaccaagaccaagcatgaggagatcctgcagaacctgcagaagaccctgctggacacagaggacaagctgaagggggcccgggaggagaacagcggcctgctgcaggagctggaggagctgaggaagcaggccgacaaggccaaggccgcccagacagcagaagatgccatgcagatcatggagcagatgaccaaggagaagacagagaccctggccagcctggaggacaccaagcagaccaatgccaagctgcagaatgagctggacaccctgaaggagaacaacctgaagaatgtggaggagctgaacaagagcaaggagctgctgactgtggagaaccagaagatggaggagttcaggaaggagattgagaccctgaagcaggccgccgcccagaagagccagcagctgagcgccctgcaggaggagaatgtgaagctggccgaggagctgggccgcagcagagatgaggtgaccagccaccagaagctggaggaggagaggtctgtgctgaacaaccagctgctggagatgaagaagcgggagagcaagttcatcaaggatgctgatgaggagaaggccagcctgcagaagagcatcagcatcaccagcgccctgctgacagagaaggatgctgagctggagaagctgagaaatgaggtgacagtgctgcggggggagaatgccagcgccaagagcctgcacagcgtggtgcagaccctggagagtgacaaggtgaagctggagctgaaggtgaagaacctggagctgcagctgaaggagaacaagaggcagctgagcagcagcagcggcaacacagacacccaggctgatgaagatgagcgggcccaggagagccagattgacttcctgaacagcgtcatcgtggacctgcagaggaagaaccaggacctgaagatgaaggtggagatgatgtctgaggccgccctgaatggaaatggagatgacctgaacaactatgacagtgatgaccaggagaagcagagcaagaagaagcccaggctcttctgtgacatctgtgactgctttgacctgcatgacacagaggactgccccacccaggcccagatgtctgaagatcctccccacagcacccaccacggcagcagaggagaggagcggccctactgtgagatctgtgagatgtttggccactgggccaccaactgcaatgatgatgagaccttctag

SEQ ID NO: 259411 - DNA, 252 bp, Artificial Sequence
  derived and/or modified sequence
atgtccatgctgaagcccagcggcctgaaggcccccaccaagatcctgaagccaggcagcacagccctgaagacccccacagctgtggtggcccctgtggagaagaccatcagcagcgagaaggccagcagcacccccagcagcgagacccaggaggagtttgtggatgacttccgggtgggggagcgggtgtgggtgaatggaaacaagccaggcttcatccagttcctgggggagacccagtttgcctag

SEQ ID NO: 259412 - DNA, 3480 bp, Artificial Sequence
  derived and/or modified sequence
atggtgagcagcagccccagcacccccagcaacatcccccagaagcccagccagcctgctgccaaggagcccagcgccaccccacccatcagcaacctgaccaagacagccagcgagagcatcagcaacctgtctgaggccggcagcatcaagaagggggagcgggagctgaagattggagacagagtgctggtgggcggcaccaaggccggcgtggtgcgcttcctgggggagacagactttgccaagggggagtggtgtggggtggagctggatgagcccctgggcaagaatgatggagctgtggccggcacccgctacttccagtgccagcccaagtatggcctgtttgcccctgtgcacaaggtgaccaagattggcttccccagcaccaccccagccaaggccaaggccaatgctgtgcggcgggtgatggccaccaccagcgccagcctgaagaggagccccagcgccagcagcctgagctccatgagctctgtggccagctctgtgagcagccggcccagcaggacaggcctgctgacagagaccagcagccgctatgccaggaagatcagcggcaccacagccctgcaggaggccctgaaggagaagcagcagcacatcgagcagctgctggccgagcgggacctggagagagctgaggtggccaaggccaccagccacgtgggggagattgagcaggagctggccctggccagagatggccatgaccagcacgtgctggagctggaggccaagatggaccagctgcggaccatggtggaggccgctgaccgggagaaggtggagctgctgaaccagctggaggaggagaagaggaaggtggaggacctgcagttccgggtggaggaggagagcatcaccaagggggacctggagacccagaccaagctggagcacgcccgcatcaaggagctggagcagagcctgctgtttgagaagaccaaggctgacaagctgcagcgggagctggaggacaccagggtggccaccgtgtctgagaagagccgcatcatggagctggagaaggacctggccctgcgggtgcaggaggtggccgagctgcggcggcggctggagagcaacaagccagctggagatgtggacatgagcctgagcctgctgcaggagatcagcagcctgcaggagaagctggaggtgaccaggacagaccaccagcgggagatcaccagcctgaaggagcactttggagcccgggaggagacccaccagaaggagatcaaggccctgtacacagccacagagaagctgagcaaagaaaatgaaagcctgaagagcaagctggagcacgccaacaaggaaaattctgatgtgattgccctgtggaagagcaagctggagacagccatcgccagccaccagcaggccatggaggagctgaaggtgtccttcagcaagggcctgggcacagaaacagctgagtttgctgagctgaagacccagatcgagaagatgaggctggactaccagcacgagattgagaacctgcagaaccagcaggacagcgagcgggccgcccacgccaaggagatggaggccctgcgggccaagctgatgaaggtgatcaaggagaaggagaacagcctggaggccatccgcagcaagctggacaaggccgaggaccagcacctggtggagatggaggacaccctgaacaagctgcaggaggccgagatcaagaaggagaagtttgctgaggccagcgaggaggccgtgtctgtgcagaggtccatgcaggagaccgtgaacaagctgcaccagaaggaggagcagttcaacatgctgagcagtgacctggagaagctgcgggagaacctggccgacatggaggccaagttccgggagaaggatgagcgggaggagcagctgatcaaggccaaggagaagctggagaatgacattgctgagatcatgaagatgtctggggacaacagcagccagctgaccaagatgaatgatgagctgcggctgaaggagagagatgtggaggagctgcagctgaagctgaccaaggccaatgaaaatgccagcttcctgcagaagagcattgaggacatgacagtgaaggccgagcagagccagcaggaggccgccaagaagcatgaggaggagaagaaggagctggagaggaagctgagtgacctggagaagaagatggagaccagccacaaccagtgccaggagctgaaggcccgctatgaaagagccaccagcgagaccaagaccaagcatgaggagatcctgcagaacctgcagaagaccctgctggacacagaggacaagctgaagggggcccgggaggagaacagcggcctgctgcaggagctggaggagctgaggaagcaggccgacaaggccaaggccgcccagacagcagaagatgccatgcagatcatggagcagatgaccaaggagaagacagagaccctggccagcctggaggacaccaagcagaccaatgccaagctgcagaatgagctggacaccctgaaggagaacaacctgaagaatgtggaggagctgaacaagagcaaggagctgctgactgtggagaaccagaagatggaggagttcaggaaggagattgagaccctgaagcaggccgccgcccagaagagccagcagctgagcgccctgcaggaggagaatgtgaagctggccgaggagctgggccgcagcagagatgaggtgaccagccaccagaagctggaggaggagaggtctgtgctgaacaaccagctgctggagatgaagaagcgggagagcaagttcatcaaggatgctgatgaggagaaggccagcctgcagaagagcatcagcatcaccagcgccctgctgacagagaaggatgctgagctggagaagctgagaaatgaggtgacagtgctgcggggagaaaatgccagcgccaagagcctgcacagcgtggtgcagaccctggagagtgacaaggtgaagctggagctgaaggtgaagaacctggagctgcagctgaaggagaacaagaggcagctgagcagcagcagcggcaacacagacacccaggctgatgaagatgagcgggcccaggagagccagaaccagattgacttcctgaacagcgtgattgtggacctgcagaggaagaaccaggacctgaagatgaaggtggagatgatgtctgaggccgccctgaatggaaatggagatgacctgaacaactatgacagtgatgaccaggagaagcagagcaagaagaagcccaggctcttctgtgacatctgtgactgctttgacctgcatgacacagaggactgccccacccaggcccagatgtctgaggaccccccccacagcacccaccacggcagcagaggagaggagcggccctactgtgagatctgtgagatgtttggccactgggccaccaactgcaatgatgatgagaccttctag

SEQ ID NO: 259413 - DNA, 4179 bp, Artificial Sequence
  derived and/or modified sequence
atgagcatgctgaagcccagcggcctgaaggcccccaccaagatccttaagccaggctcgacggccttgaaaacgcccacggcggtagtcgcaccagtagagaaaaccattagtagcgagaaggctagctctactccttcaagcgagacgcaagaggagtttgttgacgattttcgggtaggggagagggtgtgggtcaacggaaataaacccggatttatacaatttttgggtgagacacagttcgccccaggacagtgggccggcattgtcttggatgagcccattgggaagaatgacgggtcagtggctggggttagatatttccagtgtgagccacttaaaggcattttcacaaggccttctaaactcacacgaaaagttcaggctgaggatgaggcaaatggcctgcagactactccggctagcagggctacgtcccccctctgtacgagcactgcttccatggtctctagcagcccctccacacctagtaatatacctcagaagccgtcccagcccgcggcgaaggagccttcagcaaccccccccatcagtaaccttaccaaaacagcgagcgaatctatatcaaacctgagcgaagccgggagcatcaaaaagggcgaaagagagcttaaaatcggcgatcgcgtcctggtaggcggtacgaaggccggcgtcgtccgatttttaggcgaaacagattttgcaaagggtgaatggtgtggtgtcgaattggacgagccactgggaaaaaatgacggcgccgttgcaggaactagatactttcagtgtcagcccaaatatggtctgttcgcaccagtgcataaggtgactaagataggattcccttctactaccccagcaaaagcaaaggccaacgctgtcagacgggtcatggccacaaccagtgcaagtctcaaacgcagtccatcagcatcaagtctctctagcatgagctcagttgcttctagcgtctcctctcgtccttccaggaccggactcttgacggaaaccagctcccggtacgcccgcaaaatttcaggcacaacggctctgcaggaagctctcaaagaaaaacagcagcacattgaacagctgctggcagagagagatctggagcgtgccgaagttgctaaggccacttcccacgtcggggagattgaacaggaactcgccttggcacgtgacggacacgaccaacatgttctggagctcgaggcaaaaatggatcagcttagaacaatggtcgaggccgcggaccgagaaaaagtagaactcctgaaccagctggaggaggagaagcgtaaggttgaagatttgcaatttagggttgaagaggaaagtatcaccaagggcgatctcgaggtggctaccgtgagtgaaaagtctcggatcatggaacttgaaaaagatcttgcattgcgtgtccaggaggtcgcggagcttagacgccggctcgagtctaacaaacctgccggagatgtggacatgagtttgagcctactccaggagatcagctccctgcaggagaagttggaggttaccagaaccgaccatcagagagaaattacctcacttaaggaacactttggagcgcgcgaagagacccaccagaaggagataaaggcgttatacactgcgaccgagaagctttctaaagaaaacgagtccctgaagtcaaagctggagcacgctaataaagagaattctgatgtgatcgctctctggaaatccaaactcgaaaccgccattgccagtcaccagcaagctatggaggagctcaaggtaagcttctccaaaggattgggcaccgagaccgctgaattcgctgagctcaagacacaaatcgagaaaatgaggctggattaccagcatgaaattgaaaatttgcagaatcagcaggactccgaacgggccgcccacgccaaggagatggaggctctcagagccaaactcatgaaggttatcaaggagaaagagaactccctggaagctatccggtctaaacttgataaagctgaggatcagcaccttgtagaaatggaggataccctgaataagttgcaggaggcagaaattaaggtgaaagaattagaggttcttcaggcaaagtgcaatgagcagacaaaggtcatcgacaacttcacttctcagcttaaggccactgaggagaagctgctcgacttggatgccctgaggaaagcatcatccgaaggcaagagcgaaatgaagaaactgcgccagcagctcgaagctgcagagaaacagatcaagcacctggagatcgaaaagaacgccgagagttctaaagcttcgtcgatcacccgagaacttcaaggcagggaactcaagctgacaaatttgcaggaaaacctgtccgaggtgagccaggttaaagagacattggaaaaggagctccaaattctgaaggaaaagttcgccgaagcctccgaggaggcagtgtccgtgcagaggtccatgcaggagacagttaataagctgcaccagaaagaggaacagtttaacatgctctccagtgatctcgaaaagctccgcgaaaatctggccgacatggaagccaagttcagagagaaagatgagcgagaagaacagctcatcaaagctaaggaaaagctggagaatgacatagctgagataatgaaaatgagcggcgacaatagcagtcaactgactaaaatgaacgacgagcttagactaaaggagcgagacgtcgaggaactgcagctcaaattgacaaaagctaatgaaaacgctagcttcctgcaaaagtccattgaagacatgaccgtcaaggctgagcagtcacaacaggaggcagccaaaaagcatgaggaggagaagaaagaattggagaggaagctctccgatctcgagaagaaaatggagaccagtcacaaccaatgtcaggaactaaaggctcggtatgaacgagcaacttcagaaaccaaaacaaaacatgaggaaattctgcagaatctgcagaaaacccttctggacacagaagacaagctcaaaggggcgcgtgaggagaactcaggtctcctgcaagagcttgaagagctgcgcaagcaggcagataaagccaaagccgcccagacagccgaagatgcgatgcagatcatggagcaaatgaccaaagagaagaccgagacacttgcaagtctggaggataccaagcagacgaacgcaaaactgcagaatgaactggatacattaaaggaaaacaacttgaagaatgttgaggaactcaacaaaagtaaggagctattgaccgtggagaatcagaagatggaggagtttaggaaagagattgaaactttgaagcaggccgccgctcagaagagccaacagttatcggccttacaggaggaaaatgtgaaactcgctgaagaactgggtcgcagtagagacgaagttaccagtcaccagaagctcgaagaagaacgaagcgtgctgaataatcagctgctggagatgaagaaacgagagagcaagttcattaaagatgctgacgaggagaaagcatcccttcaaaaatctatttctattactagcgctttgcttaccgaaaaggatgccgagcttgagaagctcagaaacgaggtgactgtgttgagaggagaaaatgcttctgccaagtccttacattccgttgtacagaccttagagtcggataaggttaagctggaactgaaggttaagaacttggaactgcaacttaaggaaaacaaaaggcaattgtcctctagctcggggaacacggacacacaagccgatgaggacgaacgggcccaggagagtcaaattgactttttgaactcagtcattgtggacctccagcggaagaatcaagacctgaagatgaaggttgagatgatgagcgaggcggcactaaacggaaacggagatgacctaaataactatgactcagatgaccaggaaaagcagagtaaaaaaaagccacggctattctgcgacatctgtgattgcttcgatctgcacgacactgaggactgccctactcaggcacagatgagcgaagaccccccacactcaactcaccatggctctcggggggaggagcgaccatactgcgagatctgtgaaatgtttgggcactgggccacaaactgcaacgatgacgagaccttttag

SEQ ID NO: 259414 - DNA, 252 bp, Artificial Sequence
  derived and/or modified sequence
atgagcatgctgaagcccagcggcctgaaggcccccaccaagatccttaagcctggatctacggcgcttaagactccgacggcagtcgtggcccctgttgaaaagacgatctcttctgagaaagcaagcagcacaccatcatccgagacccaggaggaattcgtggacgactttagagtgggcgagagggtgtgggtgaacggtaataaaccaggttttatccaatttctgggggagacccagttcgcatag

SEQ ID NO: 259415 - DNA, 3480 bp, Artificial Sequence
  derived and/or modified sequence
atggtgagcagcagccccagcacccccagcaacatcccccagaagccctcacaacccgctgcaaaggagccgtccgccacccctcccatctcaaacctcactaaaacagcaagcgaatccatatccaatctttcagaagccggatctatcaagaagggagaaagagaactgaagattggggaccgtgtcctggtgggagggacaaaggccggtgttgtgagattcctgggcgagacggattttgcaaagggtgaatggtgcggcgtggagcttgacgaaccactcggcaagaatgacggagctgtcgctggaacacgctatttccagtgccaacctaagtacgggctgtttgcacctgtccacaaggtcactaagatcggattcccgagcacaacccctgcaaaggctaaagcaaacgctgtccgtagggtgatggccaccactagtgccagcttaaagaggtctccttccgcgagctctctgagtagcatgtcaagtgtagcctcttcggtctcttctcgcccatctcgcaccggactgttgacagagaccagcagccgatacgcccgaaaaatcagcggaaccacggccttgcaagaagctctcaaggaaaaacagcagcatatcgaacagctgctcgcagaaagggatttggaacgcgcggaagtggctaaggcaaccagccacgtcggagagatagaacaggagctggcccttgcccgcgacggacacgatcagcacgtgctggaactcgaagctaaaatggaccaattacggactatggtggaagcagccgacagggaaaaagtggaactcctgaatcaactggaagaagaaaagcgcaaggtcgaggatctccagttccgggttgaggaggagtcaatcaccaaaggcgacttggagactcagacaaagctcgaacacgctaggattaaagaattggagcagtccctcctgtttgaaaaaaccaaggctgacaagttgcagcgggagttagaagacacaagagtagccaccgtgagtgagaagtcccgaatcatggagctggagaaggacttggctctcagagtccaggaggttgctgaactgaggagaaggctagaatccaataagcctgcaggtgatgtcgacatgagcctgagtctgctgcaagaaatttcttccttgcaggagaaactggaggtgacaaggacagatcatcagcgagagattaccagcttaaaagaacattttggagcacgggaggagacccatcagaaagagatcaaggcgctgtatacagctacggagaaactgtctaaggagaatgagtccctgaagtcaaagttagagcatgccaataaagagaactccgacgtgatcgctctatggaagtccaaattggaaacggccatcgcatctcaccagcaggccatggaggagttgaaagtgagtttctcaaaaggcctgggaacagagacagcggagtttgccgaactcaaaacccagattgaaaaaatgagactagactaccagcacgagatcgagaacctccaaaatcagcaagactcagaacgggctgctcatgctaaggaaatggaagccctgcgagcgaaactgatgaaagtgattaaagagaaggagaactccctggaggctatcagatccaagctggataaggccgaggaccagcaccttgtggagatggaggataccctgaataagctccaggaggctgaaatcaaaaaggaaaagtttgctgaagcgtccgaggaagctgtttcagtgcagcgatccatgcaggagacagtcaataagctgcatcagaaggaagaacagttcaatatgcttagctctgacctcgaaaagctgagagagaatttggcagatatggaggccaagttcagggagaaggacgagagagaagaacagctgattaaagcgaaggagaagttagaaaacgatatcgcggagataatgaaaatgtcaggggataacagttctcagctcactaagatgaatgacgaattaaggctcaaagagagagacgtcgaggagctgcagctaaagctgacgaaggctaacgagaacgcgagctttttgcagaagtccattgaagacatgactgtcaaagcagaacagtcccagcaagaagctgccaagaaacacgaagaagaaaaaaaagagttagaaaggaaactatcggatctcgagaaaaagatggaaacgtctcacaatcagtgccaagagcttaaggctcgctacgagagagccacgagcgagaccaaaactaaacacgaggaaatattacagaatcttcagaaaaccctgttggataccgaggacaaacttaagggcgcccgcgaagaaaactccggtctgctgcaggagctggaggagctcaggaagcaagctgataaagccaaagctgcccagacagcagaggacgccatgcagattatggaacagatgactaaagagaagaccgaaaccttggcctctttggaggacacgaagcagacgaacgcaaaactgcaaaacgaactggacactctgaaggagaacaatctgaaaaatgtcgaagaactaaacaagagtaaggagttattgacagttgaaaaccaaaaaatggaagagttccgaaaggagatagagacactgaagcaggccgctgcacagaagagtcagcaattaagcgctcttcaggaagagaacgtcaaattggccgaagaacttggtcgatctcgggacgaggtcacgtctcatcagaagttagaggaggagcggagcgtgcttaataaccagctccttgagatgaagaagagagaaagcaaatttattaaagacgcagacgaggagaaggcatcactgcagaaatccatcagtatcacatcggctctgctgactgagaaagatgcagagctggagaaactgagaaacgaggtgacagtgttgcggggagaaaacgcatctgctaagtctctccactctgtcgttcaaacccttgaatctgacaaagttaagctcgagctgaaagttaaaaacctggagctccaacttaaagagaataaacggcaattaagctcatccagcggcaacactgatacacaggctgacgaggacgagagggctcaagagagtcagaaccaaatcgactttctaaactctgttatcgtggatctacaacgcaaaaaccaggacctcaaaatgaaagtggagatgatgagtgaagctgctctaaacgggaatggcgacgatctgaacaactatgatagtgatgatcaggaaaaacagtccaagaagaagccccgcctgttttgtgacatttgcgactgcttcgatttgcacgacaccgaggactgtcccacacaggctcaaatgagtgaggatccgccccactccacacaccacggatctaggggggaagagaggccctactgcgaaatatgcgagatgttcggtcattgggcaaccaactgtaatgacgacgagactttttag

SEQ ID NO: 259416 - DNA, 4179 bp, Artificial Sequence
  derived and/or modified sequence
atgtcgatgctaaaacccagcggattaaaggcccctaccaaaatcctgaaacctggtagcacagcactgaaaactccaacagccgtggtcgctccagtcgagaagacaattagcagtgagaaggcttccagcacaccctcttccgagacccaggaggagtttgtggatgatttccgcgtcggagagcgagtatgggtgaacggcaataaaccgggatttatccaattcctgggggaaactcagttcgctcccggtcagtgggccggtattgtgctcgacgagccaatcggcaaaaacgatggatccgtcgccggagtgcggtacttccagtgtgagcccctgaaggggattttcacgcgaccctctaaactcactagaaaggtccaagccgaagatgaggcaaacggccttcagacaacgccagccagtcgcgctacctcacctttgtgcacttcaactgcttccatggtgtccagttcacccagcaccccatctaacatacctcagaaaccctcacagcctgccgctaaagagccttcagcaactccaccaatcagtaatctaaccaagacagcctcagaaagcatatccaacctcagcgaagccggtagtataaagaaaggcgagcgcgagctgaaaatcggagacagagtattggtggggggtacaaaggcaggcgtcgttcggttcctgggggagaccgactttgctaagggggagtggtgtggagtagagctggatgagcccttaggtaaaaacgatggcgcagttgcaggaacccgttactttcagtgccagccaaagtacgggctgtttgctcccgtgcacaaagtgactaagatagggttccccagtacgaccccagcaaaagcaaaagctaacgccgtgaggagagtgatggctaccacaagcgcatcgttgaaaaggtcaccaagtgcttcttcactttcctctatgagcagcgtggcgtctagcgtctcaagcagaccctctcggacaggactgctgacggaaacttcgtcccgctacgctagaaaaatttccggcaccacagctttacaagaggccttgaaagaaaagcaacagcatatcgaacagttgttagcggaaagagatctggaaagagccgaagtggctaaggcaacaagccacgttggcgagatcgagcaggagctggcactggccagagatggccatgaccagcatgtgctggagcttgaggccaagatggaccagctgcggaccatggttgaagcagcggatcgcgaaaaagtggagttgttaaaccagcttgaagaagagaagcgcaaggtggaggatctgcagtttcgggtggaggaggaatccataacgaagggagatctcgaagtcgccacggtgtctgaaaagagtaggattatggagctggaaaaagatctggcattgagggtccaagaagtcgcggagcttaggcgccgactggagagcaataagccagcaggggacgtggacatgtcgctgagcctgctccaggaaatcagctcccttcaggagaaattggaggtgacccgcactgaccatcaacgggagattactagtctgaaagaacacttcggggcacgggaagaaacccaccagaaggagattaaggctctatatacggccactgaaaaactctcgaaggaaaacgagagtcttaagtccaagcttgaacatgctaataaggaaaacagcgatgttatcgcactgtggaagagtaaactggaaactgctatcgcctcccatcagcaggccatggaggagctgaaggtgagcttttcaaaaggcctcgggacagaaacagctgaattcgctgaattaaaaacccagattgagaagatgaggcttgactatcagcacgaaatcgagaaccttcagaaccagcaagactctgaacgagccgctcatgccaaagaaatggaggctcttcgtgcaaaacttatgaaagtcattaaagagaaggaaaactccctggaagccatccggtccaaattagataaggctgaggaccaacacctggttgagatggaagatactcttaacaaattgcaggaagctgagattaaggtcaaagaacttgaagttttacaagcgaaatgcaacgagcaaacaaaggtgatagacaactttacctcacaactgaaggctaccgaggaaaagcttttggacttggatgcgttgagaaaagcatcctctgaaggcaagtcagagatgaaaaagctgaggcaacagttagaagctgccgagaagcagattaaacacttagagattgagaagaacgctgaatccagtaaggcaagtagtatcacgcgtgagctccagggcagggagttaaagctgactaatttacaggaaaatttaagcgaggtgtcccaggtgaaagagacactcgagaaagagctgcaaatcctgaaggaaaagttcgccgaggcatctgaggaggctgtgtctgttcaaaggagcatgcaggagacagtcaacaagctccatcagaaggaggaacagttcaacatgctctcgagcgaccttgagaagctccgcgaaaacctcgccgacatggaggctaaattcagagagaaggacgagagggaggagcagctaatcaaagctaaggagaaattggaaaatgacatcgcagagataatgaagatgagcggcgacaattcgagccagttgacaaaaatgaacgacgaactaaggttgaaggaaagggacgttgaagagctgcagctgaagctcactaaggccaatgagaatgcctctttcctgcagaaatctattgaagacatgaccgtgaaagccgaacaatcccagcaggaagccgctaagaagcacgaggaggaaaagaaggaacttgaaagaaaactttcagatctcgaaaagaaaatggagaccagtcataatcagtgccaagagctcaaggccaggtacgaacgtgcaactagtgaaactaagaccaaacacgaggaaattctacaaaacctgcaaaagaccctcctcgacacagaagacaagctcaagggcgctcgggaggagaactccggtctgttgcaggaattggaggaactccgcaagcaggctgacaaagccaaggcagctcagactgccgaagatgccatgcagatcatggagcagatgacgaaagagaagaccgagacattggctagcctggaagacaccaaacagaccaatgcaaaactgcagaacgagctggatacactcaaggagaataacctcaagaatgtggaagagcttaacaagtctaaggagctgttgaccgtggaaaaccaaaagatggaggagttccgaaaggaaatcgagactttgaagcaggccgctgctcaaaaatcccagcagctgagcgccttgcaggaggagaacgtaaaactggcggaggagctggggaggagtcgtgacgaggtcaccagccatcaaaagctcgaggaagaaaggtccgttctgaataaccagctactggaaatgaagaagcgtgagagtaaatttatcaaggatgccgacgaagagaaagctagtttacagaagtccatttccatcacttcagccttgctgactgaaaaagatgccgagcttgagaaactgaggaacgaggtgacagttcttcgcggtgaaaacgcttctgccaagagcctgcattcggtggtccaaactttagagtcggacaaagtgaaactggaactgaaggtgaaaaacctggaactgcagctgaaagaaaataaaagacagctcagttcgtccagtggaaataccgacacccaggcagacgaagacgagcgcgcacaggagtcccaaatcgattttttaaacagtgtgattgtcgatttgcagcggaagaaccaggacctgaagatgaaggtagagatgatgtctgaagctgcactgaacggaaatggtgacgatctgaacaactacgacagcgacgaccaagaaaaacaatcgaagaagaagccacgtcttttctgcgacatctgcgactgttttgacttgcatgacaccgaggactgccctacccaagcccaaatgtccgaagatccgcctcatagtactcaccacgggtctaggggcgaggagaggccgtattgtgagatctgcgaaatgttcgggcattgggcgaccaactgtaacgacgacgagacattttag

SEQ ID NO: 259417 - DNA, 252 bp, Artificial Sequence
  derived and/or modified sequence
atgtccatgctgaagccctccggtctgaaggcaccgactaagattctaaagcctggcagcactgcactgaagacccccacggctgtcgtggctcctgtggagaaaacgattagctctgagaaagcctcatccacccccagcagcgaaacccaggaagagtttgtagatgacttccgggtcggagagagagtgtgggtgaacggaaacaagcctggttttatccagttcctcggcgaaacccagttcgcatag

SEQ ID NO: 259418 - DNA, 3480 bp, Artificial Sequence
  derived and/or modified sequence
atggtgtcctcttctcctagtaccccgtctaatatcccccagaaaccttcacagccagcagcgaaggagccgtctgccacaccgcctattagcaatttaaccaaaacggctagtgagtctatatccaacctgagcgaagcagggtcaattaagaagggcgagcgtgaactgaagataggcgatcgggtgctggtagggggtaccaaggcgggagtagtgagattcctaggagagaccgattttgcaaaaggcgaatggtgcggtgtcgagttggatgaacctcttggcaagaatgatggcgctgttgccggtacacggtattttcagtgtcagcctaagtatggtctcttcgcccctgtacataaggtgacaaaaattggctttccatcaaccacgccggcaaaggccaaggccaacgcggtgcggcgagtaatggccactacgtcagcgagcctgaagaggtctccgagcgcttcatcgctgtcatcaatgagttcagtggcttccagtgtgagttccagaccaagtagaaccgggctactgacagagacatccagcaggtacgccaggaaaatcagtggtacaaccgctcttcaggaagctctgaaggagaagcaacagcacatcgagcagctcctggctgagcgtgacttggaacgcgctgaagtcgccaaggcaactagtcacgttggcgaaattgaacaggaactcgcattagctcgagacggacacgatcagcacgttctcgagctcgaggccaagatggaccagctccgaactatggttgaggcagcggacagagagaaggtggaattattgaaccagctcgaggaggaaaagcgtaaagtggaggaccttcagtttagggttgaagaggagtcaatcacaaagggagatctggagacacagacaaaactggagcatgctcggattaaggagctggaacaaagcttattgtttgaaaagacaaaggcagataaactacagcgagaactggaggatacacgggttgccacagtcagtgaaaaatctagaataatggaactagagaaagatctggccctgagagtgcaggaggtggccgagctgcgccgacggctggaatcaaacaagcccgctggcgacgttgacatgtctctctcactactgcaagaaatcagtagtctgcaggagaaactggaggtgaccaggaccgatcatcagcgggaaataaccagtcttaaagagcactttggcgcaagggaggaaactcaccagaaagaaattaaagctctgtatactgccacagaaaagctgagcaaagagaatgagagcctgaagagcaagttggagcatgcaaataaggagaattccgatgtcattgctctttggaaatccaagctggagaccgcaattgccagccaccagcaggccatggaggagctgaaggtgagcttctcaaagggcctaggaactgagactgctgagttcgccgagctgaaaactcagatcgaaaagatgcgtcttgattaccagcatgagatcgagaacctccagaatcaacaggacagcgagagagctgcacacgcaaaggaaatggaggcgctacgggctaagctgatgaaagtaataaaggaaaaggagaattctctggaggctattcgctcaaaactcgacaaggccgaggatcagcacctagtggaaatggaagacacgttaaacaaactccaggaggccgagattaagaaagaaaagttcgcagaagcttccgaagaagctgtatcagttcaacgctccatgcaggaaacggtgaacaagctccatcagaaggaggaacagtttaacatgctatcatccgatctggaaaaattaagagagaaccttgccgatatggaagccaaattccgggagaaagatgagagggaggaacagttaattaaagccaaggagaagttagaaaacgacatagccgaaatcatgaaaatgtccggagacaatagctcgcagctaactaagatgaacgatgagctgcgcttgaaggagcgcgacgtcgaagaactgcagctgaaactgacaaaggctaacgaaaacgcgtccttcctgcaaaaatcaatcgaagatatgactgtcaaagctgaacaaagtcagcaagaggcggctaaaaaacacgaagaggagaagaaggagctggagaggaagctgagtgaccttgaaaaaaaaatggaaactagccacaaccaatgtcaggaactgaaggcaagatatgagagggccaccagcgagactaaaacgaaacacgaggaaatcctgcagaaccttcagaagactttactagatacagaggataagctgaaaggagctcgcgaggaaaattctgggctgctgcaggaacttgaggagctgcgcaaacaggccgataaagctaaggcagctcagacggctgaagacgcaatgcagataatggaacagatgactaaggagaaaaccgagactttggccagcctggaggacactaagcagacgaacgctaagctgcagaatgagctggacactctgaaagaaaacaacttaaagaacgtagaagaattgaataaatctaaggagctcctgacagtggaaaatcagaagatggaagaatttcgcaaagaaattgagacactgaaacaagccgctgcacagaaatcccagcaactttctgctctgcaggaggaaaacgtgaagctggcggaggagttggggcgaagtagggacgaggttacctcccaccagaagttggaggaggagcgctcagtcttgaacaaccagctgctggagatgaaaaaaagggagtccaaatttattaaggacgctgatgaagaaaaggcttctctgcagaagtcaatctccatcacctcagccctgttgacggagaaagatgctgaacttgagaagctacgaaacgaggtgaccgtacttaggggcgaaaatgcttctgccaagtcgctccactccgtcgtgcagaccctagagtctgacaaagtcaaacttgagctgaaggtgaagaatctcgaacttcagctaaaggaaaacaagaggcagctgagctctagttctgggaatacagacacccaggccgatgaggatgaaagagcccaggaatcccagaatcagatcgactttttaaattctgtgatcgttgacctgcaacggaaaaaccaggatctaaagatgaaagttgagatgatgagcgaagccgctttaaatggtaacggtgatgatctaaacaactatgattctgacgaccaagaaaaacagagtaagaagaaaccaagactgttctgcgacatctgtgactgcttcgatttgcatgacacagaagactgtcctacacaggctcagatgagcgaggacccaccccactctacccaccatgggagtcggggtgaggagcgcccatactgtgaaatttgcgaaatgttcgggcattgggccactaattgcaacgacgacgaaacattctag

SEQ ID NO: 259419 - DNA, 665 bp, Artificial Sequence
  derived and/or modified sequence
attaagctgtgaatgaacctcccaaacccaggaatatgatatgagaacatagcctttgaatttctctctcaagtttgacttgaaaaatcagcctcagaaacatctttatcttaagatagatttccgttgctctcagaacgtctctcccctgaccttctgttattaagttcatggacatacagcattttagaattaggtgggggctccgaagtctgcgagtgcagctgtgcacagatttaatccagagactgacttcactatagaacccacagttgtatcaatggttggggaaagatagtggcaacaggcaaaggagaaacagctctgacatacaaagaaaatgagtatgctaaagccaagtgggcttaaggcccccaccaagatcctgaagcctggaagcacagctctgaagacacctacggctgttgtagctccagtagaaaaaaccatatccagtgaaaaagcatcaagcactccatcatctgagactcaggaggaatttgtggatgactttcgagttggggagcgagtttgggtgaatggaaataagcctggatttatccagtttcttggagaaacccagtttgcaccaggccagtgggctggaattgttttagatgaacccataggcaagaacgatggttcggtggcaggagttcggtatt

SEQ ID NO: 259420 - DNA, 5229 bp, Artificial Sequence
  derived and/or modified sequence
gtcacgctctcccccgccccgagccgacgagccgggaggcgggaggcggcggccgcggcggctgctgctgctgcagtgggacaggtggcggcgaccggcggcgtccgaggagatttaatccagagactgacttcactatagaacccacagttgtatcaatggttggggaaagatagtggcaacaggcaaaggagaaacagctctgacatacaaagaaaatgagtatgctaaagccaagtgggcttaaggcccccaccaagatcctgaagcctggaagcacagctctgaagacacctacggctgttgtagctccagtagaaaaaaccatatccagtgaaaaagcatcaagcactccatcatctgagactcaggaggaatttgtggatgactttcgagttggggagcgagtttgggtgaatggaaataagcctggatttatccagtttcttggagaaacccagtttgcaccaggccagtgggctggaattgttttagatgaacccataggcaagaacgatggttcggtggcaggagttcggtatttccagtgtgaacctttaaagggcatatttacccgaccttcaaagttaacaaggaaggtgcaagcagaagatgaagctaatggcctgcagacaacgcccgcctcccgagctacttcaccgctgtgcacttctacggccagcatggtgtcttcctccccctccaccccttcaaacatccctcagaaaccatcacagccagcagcaaaggaaccttcagctacgcctccgatcagcaaccttacaaaaactgccagtgaatctatctccaacctttcagaggctggctcaatcaagaaaggagaaagagagctcaaaatcggagacagagtattggttggtggcactaaggctggtgtagtccggtttcttggggagaccgactttgccaagggggagtggtgtggcgtggagttagatgagccacttgggaagaatgatggcgctgttgctggaacaaggtattttcagtgtcaacccaaatatggcttgttcgctcctgtccacaaagttaccaagattggcttcccttccactacaccagccaaagccaaggccaacgcagtgaggcgagtgatggcgaccacgtccgccagcctgaagcgcagcccttctgcctcttccctcagctccatgagctcagtggcctcctctgtgagcagcaggcccagtcggacaggactattgactgaaacctcctcccgttacgccaggaagatctccggtaccactgccctccaggaggccctgaaggagaagcagcagcacattgagcagctgctggcggaacgggatctggagagggcggaggtggccaaggccacgagccacgtgggggagatagagcaggagctagctctggcccgggacggacatgaccagcatgtcctggaattggaagccaaaatggaccagctgcgaacaatggtggaagctgctgacagggagaaggtggagcttctcaaccagcttgaagaggagaaaaggaaggttgaggaccttcagttccgggttgaagaagaatcaattaccaaaggtgatcttgaggtggctacagtttcagaaaagtcacgtataatggaactggagaaagacctagcattgagagtacaggaagtagctgagctccgaagaaggctagagtccaataagcctgctggggatgtggacatgtcactttcccttttgcaagagataagctctttgcaagaaaagttagaagtcacccgtactgaccaccagagagaaataacttctctgaaggagcattttggagcccgggaagaaactcatcagaaggagataaaggctctgtataccgccacggaaaagctttccaaagagaacgagtcattgaaaagcaagctggagcatgccaacaaagagaactcagatgtgatagctctatggaagtccaaactggagactgccatcgcatcccaccagcaggcgatggaagaactgaaggtatctttcagcaaagggcttggaacagagacggcagaatttgctgaactaaaaacacaaatagagaaaatgagactagattaccaacacgaaatagaaaatttgcagaatcaacaagactctgaacgggctgcccatgctaaagagatggaagccttgagggctaaactgatgaaagttattaaagaaaaggaaaacagtctggaagccatcaggtcgaaactggacaaagcagaagaccagcatctcgtagaaatggaagacacgttaaacaaattacaggaagctgaaataaaggtaaaggagctagaggtactgcaagccaaatgcaatgaacaaaccaaggttattgataattttacatcacagctcaaggctactgaagaaaagctcttggatcttgatgcacttcggaaagccagttccgaaggtaaatcggaaatgaagaaacttagacagcagcttgaggcagctgagaaacagattaaacatttagagattgaaaagaatgctgaaagtagcaaggctagtagcattaccagagagctccaggggagagagctaaagcttactaaccttcaggaaaatttgagtgaagtcagtcaagtgaaagagactttggaaaaagaacttcagattttgaaagaaaagtttgctgaagcttcagaggaggcagtctctgttcagagaagtatgcaagaaactgtaaataagttacaccaaaaggaggaacagtttaacatgctgtcttctgacttggagaagctgagagaaaacttagcagatatggaggcaaaatttagagagaaagatgagagagaagagcagctgataaaggcaaaggaaaaactggaaaatgacattgcagaaataatgaagatgtcaggagataactcttctcagctgacaaaaatgaacgatgaattacgtctgaaagaaagagatgtagaagaattacagctaaaacttacaaaggctaatgaaaatgcaagttttctgcaaaaaagtattgaggacatgactgtcaaagctgaacagagccagcaagaagcagctaaaaagcatgaggaagaaaagaaagaattggagaggaaattgtcggacctggaaaagaaaatggaaacaagccacaaccagtgtcaggagctgaaagccaggtatgagagagccacttctgagacaaaaaccaagcatgaagaaatcctacagaacctccagaagacgctgctggacacagaggacaagctgaagggcgcacgggaggagaacagtggcttgctgcaggagctggaggagctgagaaagcaagccgacaaagccaaagctgctcaaacagcggaagatgccatgcagataatggaacagatgaccaaagagaagactgagactctggcctccttggaggacaccaagcaaacaaatgcaaaactacagaatgaattggacacacttaaagaaaacaacttgaaaaatgtggaagagctgaacaaatcaaaagaactcctgactgtagagaatcaaaaaatggaagaatttaggaaagaaatagaaaccctaaagcaggcagcagctcagaagtcccagcagctttcagcgttgcaagaagagaacgttaaacttgctgaggagctggggagaagcagggacgaagtcacaagtcatcaaaagctggaagaagaaagatctgtgctcaataatcagttgttagaaatgaaaaaaagagaatccaagttcataaaagacgcagatgaagagaaagcttccttgcagaaatccatcagtataactagtgccttactcacagaaaaggatgccgagctggagaaactgagaaatgaggtcacagtgctcaggggagaaaacgcctctgccaagtccttgcattcagttgttcagactctagagtctgataaggtgaagctcgagctcaaggtaaagaacttggagcttcaactcaaagaaaacaagaggcagctcagcagctcctcaggtaatacagacactcaggcagacgaggatgaaagagcccaggagagtcagattgatttcctaaattcagtaatagtggaccttcaaaggaagaatcaagacctcaagatgaaggtggagatgatgtcagaagcagccctgaatgggaacggggatgacctaaacaattatgacagtgatgatcaggagaaacagtccaagaagaaacctcgcctcttctgtgacatttgtgactgctttgatctccacgacacagaggattgtcctacccaggcacagatgtcagaggaccctccccattccacacaccatggcagtcggggtgaggaacgcccatactgtgaaatctgtgagatgtttggacactgggccaccaactgcaatgacgacgaaaccttctgatgaagcctccagtggagaactgggcttgctcagacgcactcgcattgacacaacgtaacaccagcattgtgtgtgcagacttcaggagaactcatgttattttttaaccccgtcaacaaatctaggaaaatattttgatcttcaacaaattgccctttagtctccccgtatgagttagaataataaatatttagtaggtgagttttcacctcgaattttgttttcttgatttttacgtttgaagacattgcaccagatgccattacatttattggccccccgaccttgtagaaaaacccctaccctcacaataccttatttaagtaactttaaattatgccgttacttttcatatttgcactaagatatttccaggctgcatttgtatatttagattttttggttaagctttgacactggaatgagttgaaaaaatgtgccattttgcattttcatctactcatttaaagtattttattcttattcaaagaaatatctgagctctttgcactacctgttatcagtagtgcctttacttcaggcttgataatacttaggtgtgattataaaatcatgaagcaggtaaagggaggggcaagcccccaaactgctgtggggacattttataatctatatgctgcacccacttaatctactgtggtgttttgtttattagttttgcataatttcagcttctatatattgtatgtatatattttttaaaaatctatattttgggaaaaaaacatacacaatgtgtctttctttttggacatttacctttttgaaaaagaaaacacttaaaatgatcattaggacataacagactagg

SEQ ID NO: 259421 - DNA, 560 bp, Artificial Sequence
  derived and/or modified sequence
gagccgacgagccgggaggcgggaggcggcggccgcggcggctgctgctgctgcagtgggacaggtggcggcgaccggcggcgtccgaggagtctcttctgtatatacagaaatatgaatgtgaatgaagtggaaggaagaaaatcaaatagcttgccctttcttaaggggaaacaagtcaatttggaaaggtcccagcgttgtatttaatccagagactgacttcactatagaacccacagttgtatcaatggttggggaaagatagtggcaacaggcaaaggagaaacagctctgacatacaaagaaaatgagtatgctaaagccaagtgggcttaaggcccccaccaagatcctgaagcctggaagcacagctctgaagacacctacggctgttgtagctccagtagaaaaaaccatatccagtgaaaaagcatcaagcactccatcatctgagactcaggaggaatttgtggatgactttcgagttggggagcgagtttgggtgaatggaaataagcctggatttatccagtttcttggagaaacccagtttgcac

SEQ ID NO: 259422 - DNA, 5541 bp, Artificial Sequence
  derived and/or modified sequence
gctgctgctgcagtgggacaggtggcggcgaccggcggcgtccgaggagatttaatccagagactgacttcactatagaacccacagttgtatcaatggttggggaaagatagtggcaacaggcaaaggagaaacagctctgacatacaaagaaaatgagtatgctaaagccaagtgggcttaaggcccccaccaagatcctgaagcctggaagcacagctctgaagacacctacggctgttgtagctccagtagaaaaaaccatatccagtgaaaaagcatcaagcactccatcatctgagactcaggaggaatttgtggatgactttcgagttggggagcgagtttgggtgaatggaaataagcctggatttatccagtttcttggagaaacccagtttgcaccaggccagtgggctggaattgttttagatgaacccataggcaagaacgatggttcggtggcaggagttcggtatttccagtgtgaacctttaaagggcatatttacccgaccttcaaagttaacaaggaaggtgcaagcagaagatgaagctaatggcctgcagacaacgcccgcctcccgagctacttcaccgctgtgcacttctacggccagcatggtgtcttcctccccctccaccccttcaaacatccctcagaaaccatcacagccagcagcaaaggaaccttcagctacgcctccgatcagcaaccttacaaaaactgccagtgaatctatctccaacctttcagaggctggctcaatcaagaaaggagaaagagagctcaaaatcggagacagagtattggttggtggcactaaggctggtgtagtccggtttcttggggagaccgactttgccaagggggagtggtgtggcgtggagttagatgagccacttgggaagaatgatggcgctgttgctggaacaaggtattttcagtgtcaacccaaatatggcttgttcgctcctgtccacaaagttaccaagattggcttcccttccactacaccagccaaagccaaggccaacgcagtgaggcgagtgatggcgaccacgtccgccagcctgaagcgcagcccttctgcctcttccctcagctccatgagctcagtggcctcctctgtgagcagcaggcccagtcggacaggactattgactgaaacctcctcccgttacgccaggaagatctccggtaccactgccctccaggaggccctgaaggagaagcagcagcacattgagcagctgctggcggaacgggatctggagagggcggaggtggccaaggccacgagccacgtgggggagatagagcaggagctagctctggcccgggacggacatgaccagcatgtcctggaattggaagccaaaatggaccagctgcgaacaatggtggaagctgctgacagggagaaggtggagcttctcaaccagcttgaagaggagaaaaggaaggttgaggaccttcagttccgggttgaagaagaatcaattaccaaaggtgatcttgagacgcagaccaaactggagcatgcccgcattaaggagcttgaacagagcctgctctttgaaaagaccaaagctgacaaactccagagggagttagaagacactagggtggctacagtttcagaaaagtcacgtataatggaactggagaaagacctagcattgagagtacaggaagtagctgagctccgaagaaggctagagtccaataagcctgctggggatgtggacatgtcactttcccttttgcaagagataagctctttgcaagaaaagttagaagtcacccgtactgaccaccagagagaaataacttctctgaaggagcattttggagcccgggaagaaactcatcagaaggagataaaggctctgtataccgccacggaaaagctttccaaagagaacgagtcattgaaaagcaagctggagcatgccaacaaagagaactcagatgtgatagctctatggaagtccaaactggagactgccatcgcatcccaccagcaggcgatggaagaactgaaggtatctttcagcaaagggcttggaacagagacggcagaatttgctgaactaaaaacacaaatagagaaaatgagactagattaccaacacgaaatagaaaatttgcagaatcaacaagactctgaacgggctgcccatgctaaagagatggaagccttgagggctaaactgatgaaagttattaaagaaaaggaaaacagtctggaagccatcaggtcgaaactggacaaagcagaagaccagcatctcgtagaaatggaagacacgttaaacaaattacaggaagctgaaataaagaaagaaaagtttgctgaagcttcagaggaggcagtctctgttcagagaagtatgcaagaaactgtaaataagttacaccaaaaggaggaacagtttaacatgctgtcttctgacttggagaagctgagagaaaacttagcagatatggaggcaaaatttagagagaaagatgagagagaagagcagctgataaaggcaaaggaaaaactggaaaatgacattgcagaaataatgaagatgtcaggagataactcttctcagctgacaaaaatgaacgatgaattacgtctgaaagaaagagatgtagaagaattacagctaaaacttacaaaggctaatgaaaatgcaagttttctgcaaaaaagtattgaggacatgactgtcaaagctgaacagagccagcaagaagcagctaaaaagcatgaggaagaaaagaaagaattggagaggaaattgtcggacctggaaaagaaaatggaaacaagccacaaccagtgtcaggagctgaaagccaggtatgagagagccacttctgagacaaaaaccaagcatgaagaaatcctacagaacctccagaagacgctgctggacacagaggacaagctgaagggcgcacgggaggagaacagtggcttgctgcaggagctggaggagctgagaaagcaagccgacaaagccaaagctgctcaaacagcggaagatgccatgcagataatggaacagatgaccaaagagaagactgagactctggcctccttggaggacaccaagcaaacaaatgcaaaactacagaatgaattggacacacttaaagaaaacaacttgaaaaatgtggaagagctgaacaaatcaaaagaactcctgactgtagagaatcaaaaaatggaagaatttaggaaagaaatagaaaccctaaagcaggcagcagctcagaagtcccagcagctttcagcgttgcaagaagagaacgttaaacttgctgaggagctggggagaagcagggacgaagtcacaagtcatcaaaagctggaagaagaaagatctgtgctcaataatcagttgttagaaatgaaaaaaagagaatccaagttcataaaagacgcagatgaagagaaagcttccttgcagaaatccatcagtataactagtgccttactcacagaaaaggatgccgagctggagaaactgagaaatgaggtcacagtgctcaggggagaaaacgcctctgccaagtccttgcattcagttgttcagactctagagtctgataaggtgaagctcgagctcaaggtaaagaacttggagcttcaactcaaagaaaacaagaggcagctcagcagctcctcaggtaatacagacactcaggcagacgaggatgaaagagcccaggagagtcagaatcagattgatttcctaaattcagtaatagtggaccttcaaaggaagaatcaagacctcaagatgaaggtggagatgatgtcagaagcagccctgaatgggaacggggatgacctaaacaattatgacagtgatgatcaggagaaacagtccaagaagaaacctcgcctcttctgtgacatttgtgactgctttgatctccacgacacagaggattgtcctacccaggcacagatgtcagaggaccctccccattccacacaccatggcagtcggggtgaggaacgcccatactgtgaaatctgtgagatgtttggacactgggccaccaactgcaatgacgacgaaaccttctgatgaagcctccagtggagaactgggcttgctcagacgcactcgcattgacacaacgtaacaccagcattgtgtgtgcagacttcaggagaactcatgttattttttaaccccgtcaacaaatctaggaaaatattttgatcttcaacaaattgccctttagtctccccgtatgagttagaataataaatatttagtaggtgagttttcacctcgaattttgttttcttgatttttacgtttgaagacattgcaccagatgccattacatttattggccccccgaccttgtagaaaaacccctaccctcacaataccttatttaagtaactttaaattatgccgttacttttcatatttgcactaagatatttccaggctgcatttgtatatttagattttttggttaagctttgacactggaatgagttgaaaaaatgtgccattttgcattttcatctactcatttaaagtattttattcttattcaaagaaatatctgagctctttgcactacctgttatcagtagtgcctttacttcaggcttgataatacttaggtgtgattataaaatcatgaagcaggtaaagggaggggcaagcccccaaactgctgtggggacattttataatctatatgctgcacccacttaatctactgtggtgttttgtttattagttttgcataatttcagcttctatatattgtatgtatatattttttaaaaatctatattttgggaaaaaaacatacacaatgtgtctttctttttggacatttacctttttgaaaaagaaaacacttaaaatgatcattaggacataacagactaggccagacatagcatcttgtggctttgcaaccattttcatttgtttgttttccttttatttcttcaccagatttaaataactggaggaattttctccaatttttttttccttctctggcaggtatccccagcagtcaattaacaataagccagtataaaacacctaaataaccaatctacaatctcccttcacaagtttttttactgtttttagatgaatgtacgatgagaaattcaacgttaataattctggattttcttatcacaaaaaagaaaatgaaggacctcaaagcacctgaacagtttatcgaccagtttgaatctatttatcttcatttgaatgtcttctagaatatgtaaaaagtcataaaatgtatcttccatgctacatgtacaataagaacttctataattgtatatatgcctttgatgtattttcccctcaagattatcaactgtgtgttcgacagtgaatattcaatctggtaccagttgaaatttttggttataaatgtaatacgaattgtttcacaaacagaaaacatgtaaagcagtattaaaatttggccaaacaagtgttctgtatctactttaataaatggttattcttt

SEQ ID NO: 259423 - protein, 1599 aa, Artificial Sequence
  derived and/or modified sequence
MNKAPQSTGPPPAPSPGLPQPAFPPGQTAPVVFSTPQATQMNTPSQPRQHFYPSRAQPPSSAASRVQSAAPARPGPAAHVYPAGSQVMMIPSQISYPASQGAYYIPGQGRSTYVVPTQQYPVQPGAPGFYPGASPTEFGTYAGAYYPAQGVQQFPTGVAPTPVLMNQPPQIAPKRERKTIRIRDPNQGGKDITEEIMSGARTASTPTPPQTGGGLEPQANGETPQVAVIVRPDDRSQGAIIADRPGLPGPEHSPSESQPSSPSPTPSPSPVLEPGSEPNLAVLSIPGDTMTTIQMSVEESTPISRETGEPYRLSPEPTPLAEPILEVEVTLSKPVPESEFSSSPLQAPTPLASHTVEIHEPNGMVPSEDLEPEVESSPELAPPPACPSESPVPIAPTAQPEELLNGAPSPPAVDLSPVSEPEEQAKEVTASMAPPTIPSATPATAPSATSPAQEEEMEEEEEEEEGEAGEAGEAESEKGGEELLPPESTPIPANLSQNLEAAAATQVAVSVPKRRRKIKELNKKEAVGDLLDAFKEANPAVPEVENQPPAGSNPGPESEGSGVPPRPEEADETWDSKEDKIHNAENIQPGEQKYEYKSDQWKPLNLEEKKRYDREFLLGFQFIFASMQKPEGLPHISDVVLDKANKTPLRPLDPTRLQGINCGPDFTPSFANLGRTTLSTRGPPRGGPGGELPRGPAGLGPRRSQQGPRKEPRKIIATVLMTEDIKLNKAEKAWKPSSKRTAADKDRGEEDADGSKTQDLFRRVRSILNKLTPQMFQQLMKQVTQLAIDTEERLKGVIDLIFEKAISEPNFSVAYANMCRCLMALKVPTTEKPTVTVNFRKLLLNRCQKEFEKDKDDDEVFEKKQKEMDEAATAEERGRLKEELEEARDIARRRSLGNIKFIGELFKLKMLTEAIMHDCVVKLLKNHDEESLECLCRLLTTIGKDLDFEKAKPRMDQYFNQMEKIIKEKKTSSRIRFMLQDVLDLRGSNWVPRRGDQGPKTIDQIHKEAEMEEHREHIKVQQLMAKGSDKRRGGPPGPPISRGLPLVDDGGWNTVPISKGSRPIDTSRLTKITKPGSIDSNNQLFAPGGRLSWGKGSSGGSGAKPSDAASEAARPATSTLNRFSALQQAVPTESTDNRRVVQRSSLSRERGEKAGDRGDRLERSERGGDRGDRLDRARTPATKRSFSKEVEERSRERPSQPEGLRKAASLTEDRDRGRDAVKREAALPPVSPLKAALSEEELEKKSKAIIEEYLHLNDMKEAVQCVQELASPSLLFIFVRHGVESTLERSAIAREHMGQLLHQLLCAGHLSTAQYYQGLYEILELAEDMEIDIPHVWLYLAELVTPILQEGGVPMGELFREITKPLRPLGKAASLLLEILGLLCKSMGPKKVGTLWREAGLSWKEFLPEGQDIGAFVAEQKVEYTLGEESEAPGQRALPSEELNRQLEKLLKEGSSNQRVFDWIEANLSEQQIVSNTLVRALMTAVCYSAIIFETPLRVDVAVLKARAKLLQKYLCDEQKELQALYALQALVVTLEQPPNLLRMFFDALYDEDVVKEDAFYSWESSKDPAEQQGKGVALKSVTAFFKWLREAEEESDHN

SEQ ID NO: 259424 - protein, 1403 aa, Artificial Sequence
  derived and/or modified sequence
MSGARTASTPTPPQTGGGLEPQANGETPQVAVIVRPDDRSQGAIIADRPGLPGPEHSPSESQPSSPSPTPSPSPVLEPGSEPNLAVLSIPGDTMTTIQMSVEESTPISRETGEPYRLSPEPTPLAEPILEVEVTLSKPVPESEFSSSPLQAPTPLASHTVEIHEPNGMVPSEDLEPEVESSPELAPPPACPSESPVPIAPTAQPEELLNGAPSPPAVDLSPVSEPEEQAKEVTASMAPPTIPSATPATAPSATSPAQEEEMEEEEEEEEGEAGEAGEAESEKGGEELLPPESTPIPANLSQNLEAAAATQVAVSVPKRRRKIKELNKKEAVGDLLDAFKEANPAVPEVENQPPAGSNPGPESEGSGVPPRPEEADETWDSKEDKIHNAENIQPGEQKYEYKSDQWKPLNLEEKKRYDREFLLGFQFIFASMQKPEGLPHISDVVLDKANKTPLRPLDPTRLQGINCGPDFTPSFANLGRTTLSTRGPPRGGPGGELPRGPAGLGPRRSQQGPRKEPRKIIATVLMTEDIKLNKAEKAWKPSSKRTAADKDRGEEDADGSKTQDLFRRVRSILNKLTPQMFQQLMKQVTQLAIDTEERLKGVIDLIFEKAISEPNFSVAYANMCRCLMALKVPTTEKPTVTVNFRKLLLNRCQKEFEKDKDDDEVFEKKQKEMDEAATAEERGRLKEELEEARDIARRRSLGNIKFIGELFKLKMLTEAIMHDCVVKLLKNHDEESLECLCRLLTTIGKDLDFEKAKPRMDQYFNQMEKIIKEKKTSSRIRFMLQDVLDLRGSNWVPRRGDQGPKTIDQIHKEAEMEEHREHIKVQQLMAKGSDKRRGGPPGPPISRGLPLVDDGGWNTVPISKGSRPIDTSRLTKITKPGSIDSNNQLFAPGGRLSWGKGSSGGSGAKPSDAASEAARPATSTLNRFSALQQAVPTESTDNRRVVQRSSLSRERGEKAGDRGDRLERSERGGDRGDRLDRARTPATKRSFSKEVEERSRERPSQPEGLRKAASLTEDRDRGRDAVKREAALPPVSPLKAALSEEELEKKSKAIIEEYLHLNDMKEAVQCVQELASPSLLFIFVRHGVESTLERSAIAREHMGQLLHQLLCAGHLSTAQYYQGLYEILELAEDMEIDIPHVWLYLAELVTPILQEGGVPMGELFREITKPLRPLGKAASLLLEILGLLCKSMGPKKVGTLWREAGLSWKEFLPEGQDIGAFVAEQKVEYTLGEESEAPGQRALPSEELNRQLEKLLKEGSSNQRVFDWIEANLSEQQIVSNTLVRALMTAVCYSAIIFETPLRVDVAVLKARAKLLQKYLCDEQKELQALYALQALVVTLEQPPNLLRMFFDALYDEDVVKEDAFYSWESSKDPAEQQGKGVALKSVTAFFKWLREAEEESDHN

SEQ ID NO: 259425 - DNA, 4800 bp, Artificial Sequence
  derived and/or modified sequence
atgaacaaggccccccagagcaccggccccccccccgcccccagccccggcctgccccagcccgccttcccccccggccagaccgcccccgtggtgttcagcaccccccaggccacccagatgaacacccccagccagcccagacagcacttctaccccagcagagcccagccccccagcagcgccgccagcagagtgcagagcgccgcccccgccagacccggccccgccgcccacgtgtaccccgccggcagccaggtgatgatgatccccagccagatcagctaccccgccagccagggcgcctactacatccccggccagggcagaagcacctacgtggtgcccacccagcagtaccccgtgcagcccggcgcccccggcttctaccccggcgccagccccaccgagttcggcacctacgccggcgcctactaccccgcccagggcgtgcagcagttccccaccggcgtggcccccacccccgtgctgatgaaccagcccccccagatcgcccccaagagagagagaaagaccatcagaatcagagaccccaaccagggcggcaaggacatcaccgaggagatcatgagcggcgccagaaccgccagcacccccacccccccccagaccggcggcggcctggagccccaggccaacggcgagaccccccaggtggccgtgatcgtgagacccgacgacagaagccagggcgccatcatcgccgacagacccggcctgcccggccccgagcacagccccagcgagagccagcccagcagccccagccccacccccagccccagccccgtgctggagcccggcagcgagcccaacctggccgtgctgagcatccccggcgacaccatgaccaccatccagatgagcgtggaggagagcacccccatcagcagagagaccggcgagccctacagactgagccccgagcccacccccctggccgagcccatcctggaggtggaggtgaccctgagcaagcccgtgcccgagagcgagttcagcagcagccccctgcaggcccccacccccctggccagccacaccgtggagatccacgagcccaacggcatggtgcccagcgaggacctggagcccgaggtggagagcagccccgagctggcccccccccccgcctgccccagcgagagccccgtgcccatcgcccccaccgcccagcccgaggagctgctgaacggcgcccccagcccccccgccgtggacctgagccccgtgagcgagcccgaggagcaggccaaggaggtgaccgccagcatggccccccccaccatccccagcgccacccccgccaccgcccccagcgccaccagccccgcccaggaggaggagatggaggaggaggaggaggaggaggagggcgaggccggcgaggccggcgaggccgagagcgagaagggcggcgaggagctgctgccccccgagagcacccccatccccgccaacctgagccagaacctggaggccgccgccgccacccaggtggccgtgagcgtgcccaagagaagaagaaagatcaaggagctgaacaagaaggaggccgtgggcgacctgctggacgccttcaaggaggccaaccccgccgtgcccgaggtggagaaccagccccccgccggcagcaaccccggccccgagagcgagggcagcggcgtgccccccagacccgaggaggccgacgagacctgggacagcaaggaggacaagatccacaacgccgagaacatccagcccggcgagcagaagtacgagtacaagagcgaccagtggaagcccctgaacctggaggagaagaagagatacgacagagagttcctgctgggcttccagttcatcttcgccagcatgcagaagcccgagggcctgccccacatcagcgacgtggtgctggacaaggccaacaagacccccctgagacccctggaccccaccagactgcagggcatcaactgcggccccgacttcacccccagcttcgccaacctgggcagaaccaccctgagcaccagaggcccccccagaggcggccccggcggcgagctgcccagaggccccgccggcctgggccccagaagaagccagcagggccccagaaaggagcccagaaagatcatcgccaccgtgctgatgaccgaggacatcaagctgaacaaggccgagaaggcctggaagcccagcagcaagagaaccgccgccgacaaggacagaggcgaggaggacgccgacggcagcaagacccaggacctgttcagaagagtgagaagcatcctgaacaagctgaccccccagatgttccagcagctgatgaagcaggtgacccagctggccatcgacaccgaggagagactgaagggcgtgatcgacctgatcttcgagaaggccatcagcgagcccaacttcagcgtggcctacgccaacatgtgcagatgcctgatggccctgaaggtgcccaccaccgagaagcccaccgtgaccgtgaacttcagaaagctgctgctgaacagatgccagaaggagttcgagaaggacaaggacgacgacgaggtgttcgagaagaagcagaaggagatggacgaggccgccaccgccgaggagagaggcagactgaaggaggagctggaggaggccagagacatcgccagaagaagaagcctgggcaacatcaagttcatcggcgagctgttcaagctgaagatgctgaccgaggccatcatgcacgactgcgtggtgaagctgctgaagaaccacgacgaggagagcctggagtgcctgtgcagactgctgaccaccatcggcaaggacctggacttcgagaaggccaagcccagaatggaccagtacttcaaccagatggagaagatcatcaaggagaagaagaccagcagcagaatcagattcatgctgcaggacgtgctggacctgagaggcagcaactgggtgcccagaagaggcgaccagggccccaagaccatcgaccagatccacaaggaggccgagatggaggagcacagagagcacatcaaggtgcagcagctgatggccaagggcagcgacaagagaagaggcggcccccccggcccccccatcagcagaggcctgcccctggtggacgacggcggctggaacaccgtgcccatcagcaagggcagcagacccatcgacaccagcagactgaccaagatcaccaagcccggcagcatcgacagcaacaaccagctgttcgcccccggcggcagactgagctggggcaagggcagcagcggcggcagcggcgccaagcccagcgacgccgccagcgaggccgccagacccgccaccagcaccctgaacagattcagcgccctgcagcaggccgtgcccaccgagagcaccgacaacagaagagtggtgcagagaagcagcctgagcagagagagaggcgagaaggccggcgacagaggcgacagactggagagaagcgagagaggcggcgacagaggcgacagactggacagagccagaacccccgccaccaagagaagcttcagcaaggaggtggaggagagaagcagagagagacccagccagcccgagggcctgagaaaggccgccagcctgaccgaggacagagacagaggcagagacgccgtgaagagagaggccgccctgccccccgtgagccccctgaaggccgccctgagcgaggaggagctggagaagaagagcaaggccatcatcgaggagtacctgcacctgaacgacatgaaggaggccgtgcagtgcgtgcaggagctggccagccccagcctgctgttcatcttcgtgagacacggcgtggagagcaccctggagagaagcgccatcgccagagagcacatgggccagctgctgcaccagctgctgtgcgccggccacctgagcaccgcccagtactaccagggcctgtacgagatcctggagctggccgaggacatggagatcgacatcccccacgtgtggctgtacctggccgagctggtgacccccatcctgcaggagggcggcgtgcccatgggcgagctgttcagagagatcaccaagcccctgagacccctgggcaaggccgccagcctgctgctggagatcctgggcctgctgtgcaagagcatgggccccaagaaggtgggcaccctgtggagagaggccggcctgagctggaaggagttcctgcccgagggccaggacatcggcgccttcgtggccgagcagaaggtggagtacaccctgggcgaggagagcgaggcccccggccagagagccctgcccagcgaggagctgaacagacagctggagaagctgctgaaggagggcagcagcaaccagagagtgttcgactggatcgaggccaacctgagcgagcagcagatcgtgagcaacaccctggtgagagccctgatgaccgccgtgtgctacagcgccatcatcttcgagacccccctgagagtggacgtggccgtgctgaaggccagagccaagctgctgcagaagtacctgtgcgacgagcagaaggagctgcaggccctgtacgccctgcaggccctggtggtgaccctggagcagccccccaacctgctgagaatgttcttcgacgccctgtacgacgaggacgtggtgaaggaggacgccttctacagctgggagagcagcaaggaccccgccgagcagcagggcaagggcgtggccctgaagagcgtgaccgccttcttcaagtggctgagagaggccgaggaggagagcgaccacaactag

SEQ ID NO: 259426 - DNA, 4800 bp, Artificial Sequence
  derived and/or modified sequence
atgaacaaggcaccacagtctaccggccccccaccggccccgtctcccgggctgccacaaccggccttcccccccggacagacagccccagtggtgttttctacaccccaggcgactcagatgaacacacctagtcagccgagacagcatttttaccctagtagagctcagccgccctcctccgccgctagccgggtgcagtcagccgctccggctaggcctggcccggcagcgcatgtgtacccagctggatctcaggtgatgatgatcccatcacagatcagctaccccgccagccagggggcctactacataccaggccagggaaggtcaacatatgtcgtgcccacccagcagtacccagtccagccaggcgctcccggattttaccctggcgcttcccccacggaatttggaacatacgctggtgcctactaccccgctcagggcgtacagcagtttcctaccggagtcgctcctaccccagtgcttatgaatcaacctcctcaaatcgctccaaaacgcgaaaggaaaacaattaggatcagggacccgaatcagggcggcaaggacatcacagaggaaattatgtcgggcgcaagaacagcttcaacgcctacccccccacagacaggtggtgggctggaacctcaggcaaacggtgagacaccacaggtggccgtcatcgttcgccccgatgatcgatctcagggagccatcatcgcggacagacctggcctccccggaccggagcactctccctctgaatcacagccctcctcgccaagtccaaccccttctccaagtcccgtgctggagccaggcagcgaacctaatttggccgtgctcagcattcccggcgataccatgactacgatccagatgtctgtggaagaatctacccctatttcccgggagaccggcgagccttatcgactgagccccgagccgacacctctggctgaacccatccttgaggttgaggttacgttgagcaagcctgtgcccgagtctgaatttagcagtagccctctgcaggctcctaccccgctggccagtcatactgtcgagatccatgagcccaatggtatggttccatccgaggacctggagccagaggtcgaaagcagccctgaactggcacccccaccggcgtgccctagcgaatccccagtgcctattgctcccactgcgcaaccagaggaactgttaaatggcgctccgagcccaccagccgtggatctaagcccagtcagcgagccagaagagcaggcaaaagaagtcactgcgtctatggcaccacccaccataccttccgctaccccagccacagcaccttccgccacttctccagcgcaggaagaagaaatggaggaggaagaagaggaggaagagggagaggctggcgaagcgggcgaggccgagagcgaaaaaggcggagaggaactgctgccaccggaatctacaccaattcccgctaatttaagccagaacctggaggctgctgcagccacacaggtggctgtctctgtccccaaaaggagacgcaaaattaaagagctgaacaagaaggaagccgtcggcgaccttcttgatgcgttcaaggaggcaaatcctgcagtgcctgaagtcgaaaatcagccacccgctggttctaacccggggcctgagagcgagggatctggggtacccccacgaccagaagaagccgatgaaacgtgggattccaaggaagacaaaattcataacgctgagaacatccagccaggggagcagaagtacgagtacaagtctgatcaatggaagccgctgaacttggaagaaaaaaagaggtatgatagggaattcttattaggctttcagttcatcttcgcttctatgcaaaagcctgagggactgccccacattagcgacgtagtgcttgacaaagctaacaaaacccccctcaggccactagaccctactcgcttgcagggcataaattgcgggcctgatttcaccccctcttttgccaatctggggagaacaactctaagtacccgcggcccacctagaggtggccctggcggggaactgccccgggggccggcgggactaggaccacggaggtcacagcagggacccagaaaagagccccggaagatcatcgcaaccgtgctcatgaccgaggatattaaattgaataaagccgaaaaggcctggaagccatcaagcaaacgcactgccgcagataaggatcggggcgaggaagacgctgacggatccaagacgcaagacttgtttaggagggtgcgctctattctcaacaagttgactcctcaaatgtttcaacaactgatgaagcaagtcactcagcttgctattgatactgaggagcgcctaaagggcgtcattgatttgatttttgagaaagcaatttccgagccaaactttagcgtggcctatgccaacatgtgccgctgtcttatggccctgaaggtgcccaccacggaaaagcctacagtgacggtgaattttcgcaaactcctgctcaaccggtgtcagaaggaatttgagaaggataaggacgacgacgaagttttcgaaaaaaagcagaaggagatggatgaggcggcgactgccgaggaacgcggcagactgaaggaggagctggaggaagcacgggatatcgccagacggaggtctcttggaaacatcaagtttattggggagttgttcaaactgaagatgctcaccgaagctattatgcacgattgtgtcgtgaagctgcttaaaaaccacgatgaagaatctctcgaatgtttgtgcaggctcctgaccactattgggaaggatctagacttcgagaaggccaagcctagaatggatcagtatttcaaccagatggaaaaaattattaaggaaaagaagactagtagcaggattcggtttatgctgcaggatgtgttggatctccgggggtctaattgggttccgaggcgcggagatcagggccctaaaacaattgaccagatccataaagaagccgagatggaggagcacagagagcacattaaagttcaacagctaatggctaagggtagtgataaaagaagaggaggaccacccggccccccaatatccagaggattgcccctggtggatgatggaggttggaacaccgtgcctatctccaaaggctctagaccaattgacactagtcggctaactaaaataaccaaacccggctcaatcgactcaaataaccaattgttcgctcccggtggccgcctttcatggggtaaaggatccagcggagggtctggggcaaaaccttctgacgccgccagcgaagctgcgcggccagccacatccaccctcaaccggttcagcgctcttcagcaagctgttcccactgaaagcactgataatcgtagagtggtccagcgcagttcactgagccgcgagaggggagagaaagccggcgacaggggcgatcgcctcgagagatctgaacggggcggcgaccgaggggatcggcttgatagagcccgaaccccagccacaaagagatctttcagtaaagaagtggaggaaagaagccgtgagcgcccttcccagccagaagggcttcgcaaggctgcttccctgaccgaggaccgggaccggggcagagacgctgtgaaacgagaggccgcactgccaccagttagccccctgaaggcagcgctctccgaggaggagctggagaaaaagtcaaaggccattattgaggagtacctgcatttaaatgatatgaaggaggccgtgcagtgtgtccaggagctcgcttcccctagccttttatttatttttgtgcgacacggcgtcgagtctaccctagagcggtctgcgatcgcaagagaacatatgggccagctgctacaccagctactgtgtgccgggcacctgtcgactgcacaatattaccaggggctgtatgaaatcctcgaactggcagaagatatggagattgatataccacatgtgtggttgtacctggccgagctggtgaccccaatattacaggaaggaggtgtccctatgggagagctgtttagagaaattacaaagcctctacgccctctgggaaaggcagctagcctcctgctggaaattctcggactgctgtgcaagtcaatggggcccaaaaaggtcgggaccctgtggcgcgaggcgggcctgtcttggaaggaatttctgcccgagggccaggacatcggagcgttcgtagccgaacaaaaagtggaatacactctcggggaagaaagcgaagctcctgggcagagagcacttccttctgaagagctgaatcgccagttagagaagctgctaaaagaagggtcatcaaatcagagggtgttcgactggatcgaggcgaacctgagcgagcagcagatcgtcagcaacacactggtccgcgctctgatgaccgcagtatgctactcggccatcatcttcgaaaccccactgagggtggacgtagctgtgctgaaagcgcgagctaaactgctgcagaaatatctgtgcgacgagcagaaagaacttcaggccctctacgcgctgcaggcactggtcgtcactttggaacagcctccgaacctcctgcggatgttttttgacgccctgtacgacgaggacgtggtcaaagaagatgcattttacagttgggagagctcaaaggacccggcggaacaacaggggaagggagtggcactgaaaagcgtgacagccttcttcaagtggctgcgggaagcagaagaggagagtgatcacaactag

SEQ ID NO: 259427 - DNA, 4800 bp, Artificial Sequence
  derived and/or modified sequence
atgaacaaggctcctcagtctaccggcccgcctcccgccccttcacctgggttgccgcagcctgcattcccccccggccagacggcccccgtagtgttttccaccccccaggcaacccagatgaacactccatcacagccacggcagcacttctacccctcacgggcccagcctcccagctctgccgcttcacgtgtacaatctgctgcacccgcacgtccagggcccgcggcacacgtctacccggcagggagccaggtgatgatgattccctctcagatctcataccccgccagccaaggtgcctactacataccagggcagggaagatctacctacgtcgtgcctacacagcagtaccccgtacagcccggtgcccccggattttaccctggggcaagtccgacggaattcggtacttacgctggcgcctattatccggctcaaggcgtgcagcagtttcccaccggcgtagcaccaactcccgtactcatgaaccagcctccccaaatcgcccctaagcgtgagcgcaagacaatcaggatcagagacccaaatcagggcgggaaggacataacagaggaaattatgagtggcgcaaggaccgccagcacccctacacctccacaaacaggaggtggcctggagccccaagccaacggtgaaacaccgcaggtggcagtaattgttcgcccagacgacaggagccagggagctatcattgctgaccggcccgggctgcctgggccagagcacagtccatccgagtcccagccatcctcgccttcaccaactccaagcccgagccccgtgttggagcctggcagcgaacctaacctagccgttctaagcatcccaggcgacacaatgaccactatacagatgtctgttgaagaatccactcccatttctagggagacaggcgagccataccgtctatctcccgaacctactcccctggccgaacccattctcgaggtggaggtgaccctctctaagccagtcccagagtccgagtttagcagcagtcctctacaggcacccaccccacttgccagccacacggttgaaatccatgaacccaatgggatggtgccttcagaagatctggagccggaagtggagtcaagtccggaactggccccaccaccggcttgtccttccgaatctccagttcccatagcccctacggcccagccagaggagctgcttaatggtgccccgtctccacctgcggtggaccttagccctgtctcagagccggaagaacaagcaaaggaggtaaccgcctccatggcgccacctactatcccctccgccacaccagctacagcgccctcagccacctccccagctcaagaagaagagatggaggaagaggaggaagaggaagaaggcgaggccggagaggcaggcgaagccgagtccgagaaagggggagaagagctgctccctccagagagcacacctatccccgcaaaccttagccagaatctggaggctgcggccgctacgcaagttgccgtgtcggtgccaaaaaggaggcgcaagatcaaagagctgaacaaaaaagaagcggtcggtgatctgctggacgctttcaaagaggcgaatccagccgttcctgaagttgaaaatcaaccccctgccggatctaatccagggccagagtctgaggggagcggcgtgccacccaggccggaagaggccgacgagacatgggattccaaagaggacaagatacacaacgccgagaacattcaaccgggcgaacaaaaatacgaatacaagagcgatcagtggaaaccgcttaacctggaggaaaaaaaaagatacgacagagaatttttacttggattccaatttatctttgcctctatgcagaaaccagaagggctgcctcatatctctgatgtagtgctagacaaggccaataagacaccactgaggcccctggaccctacccgactgcaggggatcaactgtggcccagatttcaccccctcatttgctaacctgggaagaaccacactgtcgactcggggcccccctcgcggtggcccagggggtgagctgccccgcggtcctgccggtttgggcccacgaaggtctcagcagggacccaggaaagagccaagaaaaattattgccaccgtccttatgacggaggatatcaaactgaataaggccgaaaaggcctggaagccatcgagtaagcgcacggccgctgacaaagaccgcggtgaggaggacgcagacggctctaaaacccaggatctctttcgacgcgtacgctctatcctcaacaagttgactccccagatgttccagcagctgatgaaacaggtaactcagctggcaattgacactgaggagcggctaaaaggggtcatcgacttgatatttgagaaggccatcagcgagcctaacttctccgtggcttacgcaaacatgtgtcgctgtttgatggcgcttaaagtgccaaccactgagaaacctaccgtaacagtgaacttcaggaaattactgctgaataggtgccaaaaggagttcgaaaaggataaggacgatgatgaggtctttgagaagaagcagaaagagatggatgaggcagcaacagcagaggagcgaggcagactcaaagaagaacttgaggaagctagggatatcgcacggaggagatcccttggtaatatcaaattcattggcgagctctttaagctaaagatgcttacggaggccattatgcatgactgtgttgtcaagttgctgaagaatcacgatgaagagtccctagaatgcttatgcagactccttaccacaatcggtaaggacctcgactttgagaaggccaaaccgagaatggaccaatacttcaaccagatggagaagatcatcaaagagaaaaaaacctcttctaggattcgatttatgctccaggatgttttagatttaaggggctccaattgggtcccaaggcgcggggaccaagggccaaagaccattgaccagatccataaggaggccgagatggaggagcaccgcgagcatattaaggttcaacagctcatggcgaaaggtagtgataagcgacgcggaggcccgccaggcccacccattagcagaggccttcctctcgtggacgatggcgggtggaacacggttccgatctcaaagggttctagacccatcgataccagcaggttgactaagattaccaagccaggctccatcgactcgaataaccaactctttgcgcccggcgggcggctctcatggggaaaaggcagcagtggtggctccggggccaaaccatctgatgccgctagtgaagcggcccggccggcaacatcaaccctgaatcgcttttcagctctacagcaggccgtgcctaccgaaagcaccgacaatcgtcgcgtggtccaaaggtcttccctgagtagggaaagaggcgagaaggccggagataggggagacagactcgagcgatcagagaggggtggcgacaggggggatagactggacagggcacgaacaccagccaccaaacgcagtttttccaaggaggttgaggaacgttcacgcgaacgcccaagccagcctgaggggcttcggaaagccgcatcccttactgaagatagggatcgcgggagggacgcggttaagagggaggcggcgttgccaccagttagccctctcaaagccgctctctctgaggaagagctcgaaaagaagtccaaagctattatagaagaatatctgcatctcaacgacatgaaggaagccgtgcagtgcgtgcaggagctggcaagccctagtttgctctttattttcgtgcggcacggggtggagagtacacttgagcgcagcgccattgccagagaacacatgggacagctgctccaccagctgctctgcgccggacatctctccacggcacagtactatcaggggctgtatgagatcctggaactggctgaggacatggaaatcgatattccccacgtttggctgtacctcgcagagctagtgacccctatactgcaggaggggggggtgcccatgggcgagctgtttcgggaaatcacaaaacctctgagacccttgggcaaagcagcctctttgttattggaaattttgggtctgctgtgtaagtctatgggaccaaagaaggttgggactctgtggcgcgaggccggtctaagctggaaagagtttcttcctgagggtcaggacattggggcattcgttgccgaacagaaggttgaatacacactgggcgaggagtctgaggcacccgggcaacgggctttaccctcagaggaactgaatcggcaacttgagaaactactcaaggagggttcctccaaccagagggtctttgattggatcgaggcgaatcttagcgaacagcagattgtcagcaatactcttgtacgagcccttatgaccgcagtttgttactccgcaattattttcgaaacacctttaagggtggatgtagctgtgctgaaagccagggctaaactgctccagaaatatctctgcgatgagcagaaggagctccaggctttatatgcactccaggcgctcgtcgtgaccctcgagcagccgccaaaccttttacggatgttttttgacgccctgtacgacgaggatgtggtgaaagaagatgcattctactcatgggagagcagcaaagatcccgccgaacagcagggtaagggggtggctctgaagtccgtgaccgccttcttcaagtggttgcgtgaagcagaggaggagagcgaccacaactag

SEQ ID NO: 259428 - DNA, 5646 bp, Artificial Sequence
  derived and/or modified sequence
tcctcgacggccgccgcccgcctggccttttagggcctgactcccgcccttcctggcctacactcctgggcggcggcaggcctagcttctggcccagtgcgggttccccggcggcaggcgtatcctgtgtgcccctgggccaggcccgaacccggtgtccccgggtggggggtggggacgccacggccgaagcagctagctccgttcgtgatccgggagcctggtgccagcgagacctggaatttccggtctggttggtctggggccccgcggagccaggttgataccctcacctcccaaccccaggccctcggatgcccagaacctgtaggccgcaccgtggacttgttcttaatcgagggggtgctggggggaccctgatgtggcaccaaatgaaatgaacaaagctccacagtccacaggccccccacccgccccatcccccggactcccacagccagcgtttcccccggggcagacagcgccggtggtgttcagtacgccacaagcgacacaaatgaacacgccttctcagccccgccagcacttctaccctagccgggcccagcccccgagcagtgcagcctcccgagtgcagagtgcagcccctgcccgccctggcccagctgcccatgtctaccctgctggatcccaagtaatgatgatcccttcccagatctcctacccagcctcccagggggcctactacatccctggacaggggcgttccacatacgttgtcccgacacagcagtaccctgtgcagccaggagccccaggcttctatccaggtgcaagccctacagaatttgggacctacgctggcgcctactatccagcccaaggggtgcagcagtttcccactggcgtggcccccaccccagttttgatgaaccagccaccccagattgctcccaagagggagcgtaagacgatccgaattcgagatccaaaccaaggaggaaaggatatcacagaggagatcatgtctggggcccgcactgcctccacacccacccctccccagacgggaggcggtctggagcctcaagctaatggggagacgccccaggttgctgtcattgtccggccagatgaccggtcacagggagcaatcattgctgaccggccagggctgcctggcccagagcatagcccttcagaatcccagccttcgtcgccttctccgaccccatcaccatccccagtcttggaaccggggtctgagcctaatctcgcagtcctctctattcctggggacactatgacaactatacaaatgtctgtagaagaatcaacccccatctcccgtgaaactggggagccatatcgcctctctccagaacccactcctctcgccgaacccatactggaagtagaagtgacacttagcaaaccggttccagaatctgagttttcttccagtcctctccaggctcccacccctttggcatctcacacagtggaaattcatgagcctaatggcatggtcccatctgaagatctggaaccagaggtggagtcaagcccagagcttgctcctcccccagcttgcccctccgaatcccctgtgcccattgctccaactgcccaacctgaggaactgctcaacggagccccctcgccaccagctgtggacttaagcccagtcagtgagccagaggagcaggccaaggaggtgacagcatcaatggcgccccccaccatcccctctgctactccagctacggctccttcagctacttccccagctcaggaggaggaaatggaagaagaagaagaagaggaagaaggagaagcaggagaagcaggagaagctgagagtgagaaaggaggagaggaactgctccccccagagagtacccctattccagccaacttgtctcagaatttggaggcagcagcagccactcaagtggcagtatctgtgccaaagaggagacggaaaattaaggagctaaataagaaggaggctgttggagaccttctggatgccttcaaggaggcgaacccggcagtaccagaggtggaaaatcagcctcctgcaggcagcaatccaggcccagagtctgagggcagtggtgtgcccccacgtcctgaggaagcagatgagacctgggactcaaaggaagacaaaattcacaatgctgagaacatccagcccggggaacagaagtatgaatataagtcagatcagtggaagcctctaaacctagaggagaaaaaacgttacgaccgtgagttcctgcttggttttcagttcatctttgccagtatgcagaagccagagggattgccacatatcagtgacgtggtgctggacaaggccaataaaacaccactgcggccactggatcccactagactacaaggcataaattgtggcccagacttcactccatcctttgccaaccttggccggacaacccttagcacccgtgggcccccaaggggtgggccaggtggggagctgccccgtgggccggctggcctgggaccccggcgctctcagcagggaccccgaaaagaaccacgcaagatcattgccacagtgttaatgaccgaagatataaaactgaacaaagcagagaaagcctggaaacccagcagcaagcggacggcggctgataaggatcgaggggaagaagatgctgatggcagcaaaacccaggacctattccgcagggtgcgctccatcctgaataaactgacaccccagatgttccagcagctgatgaagcaagtgacgcagctggccatcgacaccgaggaacgcctcaaaggggtcattgacctcatttttgagaaggccatttcagagcccaacttctctgtggcctatgccaacatgtgccgctgcctcatggcgctgaaagtgcccactacggaaaagccaacagtgactgtgaacttccgaaagctgttgttgaatcgatgtcagaaggagtttgagaaagacaaagatgatgatgaggtttttgagaagaagcaaaaagagatggatgaagctgctacggcagaggaacgaggacgcctgaaggaagagctggaagaggctcgggacatagcccggcggcgctctttagggaatatcaagtttattggagagttgttcaaactgaagatgttaacagaggcaataatgcatgactgtgtggtcaaactgcttaagaaccatgatgaagagtcccttgagtgcctttgtcgtctgctcaccaccattggcaaagacctggactttgaaaaagccaagccccgaatggatcagtatttcaaccagatggaaaaaatcattaaagaaaagaagacgtcatcccgcatccgctttatgctgcaggacgtgctggatctgcgagggagcaattgggtgccacgccgaggggatcagggtcccaagaccattgaccagatccataaggaggctgagatggaagaacatcgagagcacatcaaagtgcagcagctcatggccaagggcagtgacaagcgtcggggcggtcctccaggccctcccatcagccgtggacttccccttgtggatgatggtggctggaacacagttcccatcagcaaaggtagccgccccattgacacctcacgactcaccaagatcaccaagcctggctccatcgattctaacaaccagctctttgcacctggagggcgactgagctggggcaagggcagcagcggaggctcaggagccaagccctcagacgcagcatcagaagctgctcgcccagctactagtactttgaatcgcttctcagcccttcaacaagcggtacccacagaaagcacagataatagacgtgtggtgcagaggagtagcttgagccgagaacgaggcgagaaagctggagaccgaggagaccgcctagagcggagtgaacggggaggggaccgtggggaccggcttgatcgtgcgcggacacctgctaccaagcggagcttcagcaaggaagtggaggagcggagtagagaacggccctcccagcctgaggggctgcgcaaggcagctagcctcacggaggatcgggaccgtgggcgggatgccgtgaagcgagaagctgccctacccccagtgagccccctgaaggcggctctctctgaggaggagttagagaagaaatccaaggctatcattgaggaatatctccatctcaatgacatgaaagaggcagtccagtgcgtgcaggagctggcctcaccctccttgctcttcatctttgtacggcatggtgtcgagtctacgctggagcgcagtgccattgctcgtgagcatatggggcagctgctgcaccagctgctctgtgctgggcatctgtctactgctcagtactaccaagggttgtatgaaatcttggaattggctgaggacatggaaattgacatcccccacgtgtggctctacctagcggaactggtaacacccattctgcaggaaggtggggtgcccatgggggagctgttcagggagattacaaagcctctgagaccgttgggcaaagctgcttccctgttgctggagatcctgggcctcctgtgcaaaagcatgggtcctaaaaaggtggggacgctgtggcgagaagccgggcttagctggaaggaatttctacctgaaggccaggacattggtgcattcgtcgctgaacagaaggtggagtataccctgggagaggagtcggaagcccctggccagagggcactcccctccgaggagctgaacaggcagctggagaagctgctgaaggagggcagcagtaaccagcgggtgttcgactggatagaggccaacctgagtgagcagcagatagtatccaacacgttagttcgagccctcatgacggctgtctgctattctgcaattatttttgagactcccctccgagtggacgttgcagtgctgaaagcgcgagcgaagctgctgcagaaatacctgtgtgacgagcagaaggagctacaggcgctctacgccctccaggcccttgtagtgaccttagaacagcctcccaacctgctgcggatgttctttgacgcactgtatgacgaggacgtggtgaaggaggatgccttctacagttgggagagtagcaaggaccccgctgagcagcagggcaagggtgtggcccttaaatctgtcacagccttcttcaagtggctccgtgaagcagaggaggagtctgaccacaactgagggctggtggggccggggacctggagccccatggacacacagatggcccggctagccgcctggactgcaggggggcggcagcagcggcggtggcagtgggtgcctgtagtgtgatgtgtctgaactaataaagtggctgaagaggcaggatggcttggggctgcctgggcccccctccaggatgccgccaggtgtccctctcctccccctggggcacagagatatattatatataaagtcttgaaatttggtgtgtcttggggtggggaggggcaccaacgcctgcccctggggtccttttttttattttctgaaaatcactctcgggactgccgtcctcgctgctgggggcatatgccccagcccctgtaccacccctgctgttgcctgggcagggggaagggggggcacggtgcctgtaattattaaacatgaattcaattaagctc

SEQ ID NO: 259429 - DNA, 5516 bp, Artificial Sequence
  derived and/or modified sequence
cggcggcgcagatcgcccggcgcggctccgccccctgcgccggtcacgtgggggcgccggctgcgcctgcggagaagcggtggccgccgagcgggatctgtgcggggagccggaaatggttgtggactacgtctgtgcggctgcgtggggctcggccgcgcggactgaaggagactgaaggccctcggatgcccagaacctgtaggccgcaccgtggacttgttcttaatcgagggggtgctggggggaccctgatgtggcaccaaatgaaatgaacaaagctccacagtccacaggccccccacccgccccatcccccggactcccacagccagcgtttcccccggggcagacagcgccggtggtgttcagtacgccacaagcgacacaaatgaacacgccttctcagccccgccagcacttctaccctagccgggcccagcccccgagcagtgcagcctcccgagtgcagagtgcagcccctgcccgccctggcccagctgcccatgtctaccctgctggatcccaagtaatgatgatcccttcccagatctcctacccagcctcccagggggcctactacatccctggacaggggcgttccacatacgttgtcccgacacagcagtaccctgtgcagccaggagccccaggcttctatccaggtgcaagccctacagaatttgggacctacgctggcgcctactatccagcccaaggggtgcagcagtttcccactggcgtggcccccaccccagttttgatgaaccagccaccccagattgctcccaagagggagcgtaagacgatccgaattcgagatccaaaccaaggaggaaaggatatcacagaggagatcatgtctggggcccgcactgcctccacacccacccctccccagacgggaggcggtctggagcctcaagctaatggggagacgccccaggttgctgtcattgtccggccagatgaccggtcacagggagcaatcattgctgaccggccagggctgcctggcccagagcatagcccttcagaatcccagccttcgtcgccttctccgaccccatcaccatccccagtcttggaaccggggtctgagcctaatctcgcagtcctctctattcctggggacactatgacaactatacaaatgtctgtagaagaatcaacccccatctcccgtgaaactggggagccatatcgcctctctccagaacccactcctctcgccgaacccatactggaagtagaagtgacacttagcaaaccggttccagaatctgagttttcttccagtcctctccaggctcccacccctttggcatctcacacagtggaaattcatgagcctaatggcatggtcccatctgaagatctggaaccagaggtggagtcaagcccagagcttgctcctcccccagcttgcccctccgaatcccctgtgcccattgctccaactgcccaacctgaggaactgctcaacggagccccctcgccaccagctgtggacttaagcccagtcagtgagccagaggagcaggccaaggaggtgacagcatcaatggcgccccccaccatcccctctgctactccagctacggctccttcagctacttccccagctcaggaggaggaaatggaagaagaagaagaagaggaagaaggagaagcaggagaagcaggagaagctgagagtgagaaaggaggagaggaactgctccccccagagagtacccctattccagccaacttgtctcagaatttggaggcagcagcagccactcaagtggcagtatctgtgccaaagaggagacggaaaattaaggagctaaataagaaggaggctgttggagaccttctggatgccttcaaggaggcgaacccggcagtaccagaggtggaaaatcagcctcctgcaggcagcaatccaggcccagagtctgagggcagtggtgtgcccccacgtcctgaggaagcagatgagacctgggactcaaaggaagacaaaattcacaatgctgagaacatccagcccggggaacagaagtatgaatataagtcagatcagtggaagcctctaaacctagaggagaaaaaacgttacgaccgtgagttcctgcttggttttcagttcatctttgccagtatgcagaagccagagggattgccacatatcagtgacgtggtgctggacaaggccaataaaacaccactgcggccactggatcccactagactacaaggcataaattgtggcccagacttcactccatcctttgccaaccttggccggacaacccttagcacccgtgggcccccaaggggtgggccaggtggggagctgccccgtgggccggctggcctgggaccccggcgctctcagcagggaccccgaaaagaaccacgcaagatcattgccacagtgttaatgaccgaagatataaaactgaacaaagcagagaaagcctggaaacccagcagcaagcggacggcggctgataaggatcgaggggaagaagatgctgatggcagcaaaacccaggacctattccgcagggtgcgctccatcctgaataaactgacaccccagatgttccagcagctgatgaagcaagtgacgcagctggccatcgacaccgaggaacgcctcaaaggggtcattgacctcatttttgagaaggccatttcagagcccaacttctctgtggcctatgccaacatgtgccgctgcctcatggcgctgaaagtgcccactacggaaaagccaacagtgactgtgaacttccgaaagctgttgttgaatcgatgtcagaaggagtttgagaaagacaaagatgatgatgaggtttttgagaagaagcaaaaagagatggatgaagctgctacggcagaggaacgaggacgcctgaaggaagagctggaagaggctcgggacatagcccggcggcgctctttagggaatatcaagtttattggagagttgttcaaactgaagatgttaacagaggcaataatgcatgactgtgtggtcaaactgcttaagaaccatgatgaagagtcccttgagtgcctttgtcgtctgctcaccaccattggcaaagacctggactttgaaaaagccaagccccgaatggatcagtatttcaaccagatggaaaaaatcattaaagaaaagaagacgtcatcccgcatccgctttatgctgcaggacgtgctggatctgcgagggagcaattgggtgccacgccgaggggatcagggtcccaagaccattgaccagatccataaggaggctgagatggaagaacatcgagagcacatcaaagtgcagcagctcatggccaagggcagtgacaagcgtcggggcggtcctccaggccctcccatcagccgtggacttccccttgtggatgatggtggctggaacacagttcccatcagcaaaggtagccgccccattgacacctcacgactcaccaagatcaccaagcctggctccatcgattctaacaaccagctctttgcacctggagggcgactgagctggggcaagggcagcagcggaggctcaggagccaagccctcagacgcagcatcagaagctgctcgcccagctactagtactttgaatcgcttctcagcccttcaacaagcggtacccacagaaagcacagataatagacgtgtggtgcagaggagtagcttgagccgagaacgaggcgagaaagctggagaccgaggagaccgcctagagcggagtgaacggggaggggaccgtggggaccggcttgatcgtgcgcggacacctgctaccaagcggagcttcagcaaggaagtggaggagcggagtagagaacggccctcccagcctgaggggctgcgcaaggcagctagcctcacggaggatcgggaccgtgggcgggatgccgtgaagcgagaagctgccctacccccagtgagccccctgaaggcggctctctctgaggaggagttagagaagaaatccaaggctatcattgaggaatatctccatctcaatgacatgaaagaggcagtccagtgcgtgcaggagctggcctcaccctccttgctcttcatctttgtacggcatggtgtcgagtctacgctggagcgcagtgccattgctcgtgagcatatggggcagctgctgcaccagctgctctgtgctgggcatctgtctactgctcagtactaccaagggttgtatgaaatcttggaattggctgaggacatggaaattgacatcccccacgtgtggctctacctagcggaactggtaacacccattctgcaggaaggtggggtgcccatgggggagctgttcagggagattacaaagcctctgagaccgttgggcaaagctgcttccctgttgctggagatcctgggcctcctgtgcaaaagcatgggtcctaaaaaggtggggacgctgtggcgagaagccgggcttagctggaaggaatttctacctgaaggccaggacattggtgcattcgtcgctgaacagaaggtggagtataccctgggagaggagtcggaagcccctggccagagggcactcccctccgaggagctgaacaggcagctggagaagctgctgaaggagggcagcagtaaccagcgggtgttcgactggatagaggccaacctgagtgagcagcagatagtatccaacacgttagttcgagccctcatgacggctgtctgctattctgcaattatttttgagactcccctccgagtggacgttgcagtgctgaaagcgcgagcgaagctgctgcagaaatacctgtgtgacgagcagaaggagctacaggcgctctacgccctccaggcccttgtagtgaccttagaacagcctcccaacctgctgcggatgttctttgacgcactgtatgacgaggacgtggtgaaggaggatgccttctacagttgggagagtagcaaggaccccgctgagcagcagggcaagggtgtggcccttaaatctgtcacagccttcttcaagtggctccgtgaagcagaggaggagtctgaccacaactgagggctggtggggccggggacctggagccccatggacacacagatggcccggctagccgcctggactgcaggggggcggcagcagcggcggtggcagtgggtgcctgtagtgtgatgtgtctgaactaataaagtggctgaagaggcaggatggcttggggctgcctgggcccccctccaggatgccgccaggtgtccctctcctccccctggggcacagagatatattatatataaagtcttgaaatttggtgtgtcttggggtggggaggggcaccaacgcctgcccctggggtccttttttttattttctgaaaatcactctcgggactgccgtcctcgctgctgggggcatatgccccagcccctgtaccacccctgctgttgcctgggcagggggaagggggggcacggtgcctgtaattattaaacatgaattcaattaa

SEQ ID NO: 259430 - DNA, 5569 bp, Artificial Sequence
  derived and/or modified sequence
gcagatcgcccggcgcggctccgccccctgcgccggtcacgtgggggcgccggctgcgcctgcggagaagcggtggccgccgagcgggatctgtgcggggagccggaaatggttgtggactacgtctgtgcggctgcgtggggctcggccgcgcggactgaaggagactgaaggccctcggatgcccagaacctgtaggccgcaccgtggacttgttcttaatcgagggggtgctggggggaccctgatgtggcaccaaatgaaatgaacaaagctccacagtccacaggccccccacccgccccatcccccggactcccacagcttgggtttctgccccacctgggcttcccctcttgctgaactctggtctcccctcttcagccagcgtttcccccggggcagacagcgccggtggtgttcagtacgccacaagcgacacaaatgaacacgccttctcagccccgccagcacttctaccctagccgggcccagcccccgagcagtgcagcctcccgagtgcagagtgcagcccctgcccgccctggcccagctgcccatgtctaccctgctggatcccaagtaatgatgatcccttcccagatctcctacccagcctcccagggggcctactacatccctggacaggggcgttccacatacgttgtcccgacacagcagtaccctgtgcagccaggagccccaggcttctatccaggtgcaagccctacagaatttgggacctacgctggcgcctactatccagcccaaggggtgcagcagtttcccactggcgtggcccccaccccagttttgatgaaccagccaccccagattgctcccaagagggagcgtaagacgatccgaattcgagatccaaaccaaggaggaaaggatatcacagaggagatcatgtctggggcccgcactgcctccacacccacccctccccagacgggaggcggtctggagcctcaagctaatggggagacgccccaggttgctgtcattgtccggccagatgaccggtcacagggagcaatcattgctgaccggccagggctgcctggcccagagcatagcccttcagaatcccagccttcgtcgccttctccgaccccatcaccatccccagtcttggaaccggggtctgagcctaatctcgcagtcctctctattcctggggacactatgacaactatacaaatgtctgtagaagaatcaacccccatctcccgtgaaactggggagccatatcgcctctctccagaacccactcctctcgccgaacccatactggaagtagaagtgacacttagcaaaccggttccagaatctgagttttcttccagtcctctccaggctcccacccctttggcatctcacacagtggaaattcatgagcctaatggcatggtcccatctgaagatctggaaccagaggtggagtcaagcccagagcttgctcctcccccagcttgcccctccgaatcccctgtgcccattgctccaactgcccaacctgaggaactgctcaacggagccccctcgccaccagctgtggacttaagcccagtcagtgagccagaggagcaggccaaggaggtgacagcatcaatggcgccccccaccatcccctctgctactccagctacggctccttcagctacttccccagctcaggaggaggaaatggaagaagaagaagaagaggaagaaggagaagcaggagaagcaggagaagctgagagtgagaaaggaggagaggaactgctccccccagagagtacccctattccagccaacttgtctcagaatttggaggcagcagcagccactcaagtggcagtatctgtgccaaagaggagacggaaaattaaggagctaaataagaaggaggctgttggagaccttctggatgccttcaaggaggcgaacccggcagtaccagaggtggaaaatcagcctcctgcaggcagcaatccaggcccagagtctgagggcagtggtgtgcccccacgtcctgaggaagcagatgagacctgggactcaaaggaagacaaaattcacaatgctgagaacatccagcccggggaacagaagtatgaatataagtcagatcagtggaagcctctaaacctagaggagaaaaaacgttacgaccgtgagttcctgcttggttttcagttcatctttgccagtatgcagaagccagagggattgccacatatcagtgacgtggtgctggacaaggccaataaaacaccactgcggccactggatcccactagactacaaggcataaattgtggcccagacttcactccatcctttgccaaccttggccggacaacccttagcacccgtgggcccccaaggggtgggccaggtggggagctgccccgtgggccggctggcctgggaccccggcgctctcagcagggaccccgaaaagaaccacgcaagatcattgccacagtgttaatgaccgaagatataaaactgaacaaagcagagaaagcctggaaacccagcagcaagcggacggcggctgataaggatcgaggggaagaagatgctgatggcagcaaaacccaggacctattccgcagggtgcgctccatcctgaataaactgacaccccagatgttccagcagctgatgaagcaagtgacgcagctggccatcgacaccgaggaacgcctcaaaggggtcattgacctcatttttgagaaggccatttcagagcccaacttctctgtggcctatgccaacatgtgccgctgcctcatggcgctgaaagtgcccactacggaaaagccaacagtgactgtgaacttccgaaagctgttgttgaatcgatgtcagaaggagtttgagaaagacaaagatgatgatgaggtttttgagaagaagcaaaaagagatggatgaagctgctacggcagaggaacgaggacgcctgaaggaagagctggaagaggctcgggacatagcccggcggcgctctttagggaatatcaagtttattggagagttgttcaaactgaagatgttaacagaggcaataatgcatgactgtgtggtcaaactgcttaagaaccatgatgaagagtcccttgagtgcctttgtcgtctgctcaccaccattggcaaagacctggactttgaaaaagccaagccccgaatggatcagtatttcaaccagatggaaaaaatcattaaagaaaagaagacgtcatcccgcatccgctttatgctgcaggacgtgctggatctgcgagggagcaattgggtgccacgccgaggggatcagggtcccaagaccattgaccagatccataaggaggctgagatggaagaacatcgagagcacatcaaagtgcagcagctcatggccaagggcagtgacaagcgtcggggcggtcctccaggccctcccatcagccgtggacttccccttgtggatgatggtggctggaacacagttcccatcagcaaaggtagccgccccattgacacctcacgactcaccaagatcaccaagcctggctccatcgattctaacaaccagctctttgcacctggagggcgactgagctggggcaagggcagcagcggaggctcaggagccaagccctcagacgcagcatcagaagctgctcgcccagctactagtactttgaatcgcttctcagcccttcaacaagcggtacccacagaaagcacagataatagacgtgtggtgcagaggagtagcttgagccgagaacgaggcgagaaagctggagaccgaggagaccgcctagagcggagtgaacggggaggggaccgtggggaccggcttgatcgtgcgcggacacctgctaccaagcggagcttcagcaaggaagtggaggagcggagtagagaacggccctcccagcctgaggggctgcgcaaggcagctagcctcacggaggatcgggaccgtgggcgggatgccgtgaagcgagaagctgccctacccccagtgagccccctgaaggcggctctctctgaggaggagttagagaagaaatccaaggctatcattgaggaatatctccatctcaatgacatgaaagaggcagtccagtgcgtgcaggagctggcctcaccctccttgctcttcatctttgtacggcatggtgtcgagtctacgctggagcgcagtgccattgctcgtgagcatatggggcagctgctgcaccagctgctctgtgctgggcatctgtctactgctcagtactaccaagggttgtatgaaatcttggaattggctgaggacatggaaattgacatcccccacgtgtggctctacctagcggaactggtaacacccattctgcaggaaggtggggtgcccatgggggagctgttcagggagattacaaagcctctgagaccgttgggcaaagctgcttccctgttgctggagatcctgggcctcctgtgcaaaagcatgggtcctaaaaaggtggggacgctgtggcgagaagccgggcttagctggaaggaatttctacctgaaggccaggacattggtgcattcgtcgctgaacagaaggtggagtataccctgggagaggagtcggaagcccctggccagagggcactcccctccgaggagctgaacaggcagctggagaagctgctgaaggagggcagcagtaaccagcgggtgttcgactggatagaggccaacctgagtgagcagcagatagtatccaacacgttagttcgagccctcatgacggctgtctgctattctgcaattatttttgagactcccctccgagtggacgttgcagtgctgaaagcgcgagcgaagctgctgcagaaatacctgtgtgacgagcagaaggagctacaggcgctctacgccctccaggcccttgtagtgaccttagaacagcctcccaacctgctgcggatgttctttgacgcactgtatgacgaggacgtggtgaaggaggatgccttctacagttgggagagtagcaaggaccccgctgagcagcagggcaagggtgtggcccttaaatctgtcacagccttcttcaagtggctccgtgaagcagaggaggagtctgaccacaactgagggctggtggggccggggacctggagccccatggacacacagatggcccggctagccgcctggactgcaggggggcggcagcagcggcggtggcagtgggtgcctgtagtgtgatgtgtctgaactaataaagtggctgaagaggcaggatggcttggggctgcctgggcccccctccaggatgccgccaggtgtccctctcctccccctggggcacagagatatattatatataaagtcttgaaatttggtgtgtcttggggtggggaggggcaccaacgcctgcccctggggtccttttttttattttctgaaaatcactctcgggactgccgtcctcgctgctgggggcatatgccccagcccctgtaccacccctgctgttgcctgggcagggggaagggggggcacggtgcctgtaattattaaacatgaattcaattaa

SEQ ID NO: 259431 - DNA, 542 bp, Artificial Sequence
  derived and/or modified sequence
aaatggttgtggactacgtctgtgcggctgcgtggggctcggccgcgcggactgaaggagactgaaggtgctggggggaccctgatgtggcaccaaatgaaatgaacaaagctccacagtccacaggccccccacccgccccatcccccggactcccacagcttgggtttctgccccacctgggcttcccctcttgctgaactctggtctcccctcttcagccagcgtttcccccggggcagacagcgccggtggtgttcagtacgccacaagcgacacaaatgaacacgccttctcagccccgccagcacttctaccctagccgggcccagcccccgagcagtgcagcctcccgagtgcagagtgcagcccctgcccgccctggcccagctgcccatgtctaccctgctggatcccaagtaatgatgatcccttcccagatctcctacccagcctcccagggggcctactacatccctggacaggggcgttccacatacgttgtcccgacacagcagtaccctgtgcagccaggagcccca

SEQ ID NO: 259432 - DNA, 4800 bp, Artificial Sequence
  derived and/or modified sequence
atgaacaaggccccccagagcacaggccccccaccagcccccagccctggcctgccccagcctgccttccccccaggccagacagcccctgtggtgttcagcaccccccaggccacccagatgaacacccccagccagccccggcagcacttctaccccagccgggcccagccccccagcagcgctgccagccgggtgcagagcgctgccccagcccggcccggccctgctgcccacgtgtacccagctggcagccaggtgatgatgatccccagccagatctcctacccagccagccagggcgcctactacatccctggccagggccgcagcacctacgtggtgcccacccagcagtaccctgtgcagcccggggcccctggcttctacccaggggccagccccacagaatttggcacctacgccggggcctactacccagcccagggcgtgcagcagttccccaccggggtggcccccacccctgtgctgatgaaccagcccccccagatcgcccccaagcgggagaggaagaccatccgcatccgggaccccaaccagggcggcaaggacatcacagaggagatcatgtctggggccaggacagccagcacccccaccccaccccagacaggaggcggcctggagccccaggccaacggggagaccccccaggtggccgtgattgtgcggccagatgacaggagccagggcgccatcatcgctgacaggcctggcctgcccggccctgagcacagccccagcgagagccagcccagcagccccagccccacccccagccccagccctgtgctggagcccggcagcgagcccaacctggccgtgctgagcatccctggggacaccatgaccaccatccagatgtctgtggaggagagcacccccatcagccgggagactggagagccctaccgcctgagccctgagcccacccccctggccgagcccatcctggaggtggaggtgaccctgagcaagcctgtgcctgagagcgagttcagcagcagccccctgcaggcccccacccccctggccagccacacagtggagatccacgagcccaacggcatggtgcccagcgaggacctggagcctgaggtggagagcagccctgagctggcccctcctccagcctgccccagcgagagccctgtgcccatcgcccccacagcccagcctgaggagctgctgaatggagcccccagccccccagctgtggacctgagccctgtgtctgagcctgaggagcaggccaaggaggtgacagcctccatggccccacccaccatccccagcgccaccccagccacagcccccagcgccaccagccctgcccaggaggaggagatggaggaggaggaggaggaggaggagggggaggccggggaggccggggaggccgagagcgagaagggcggggaggagctgctgcccccagagagcacccccatcccagccaacctgagccagaacctggaggccgctgctgccacccaggtggccgtgtctgtgcccaagagaagaaggaagatcaaggagctgaacaagaaggaggccgtgggggacctgctggatgccttcaaggaggccaacccagctgtgcctgaggtggagaaccagcccccagctggcagcaaccctggccctgagagcgagggcagcggcgtgccccccaggcctgaggaggctgatgagacctgggacagcaaggaggacaagatccacaatgctgagaacatccagcctggagagcagaagtatgagtacaagagtgaccagtggaagcccctgaacctggaggagaagaagagatatgaccgggagttcctgctgggcttccagttcatctttgcctccatgcagaagccagagggcctgccccacatcagtgatgtggtgctggacaaggccaacaagacccccctgcggcccctggaccccacccggctgcagggcatcaactgtggccctgacttcacccccagctttgccaacctgggccgcaccaccctgagcacccggggccccccccggggcggccctggaggagagctgccccggggccctgctggcctgggcccccggcgcagccagcagggccccaggaaggagcccaggaagatcatcgccaccgtgctgatgacagaggacatcaagctgaacaaggccgagaaggcctggaagcccagcagcaagaggacagctgctgacaaggacagaggagaggaggatgctgatggcagcaagacccaggacctcttccggcgggtgcgcagcatcctgaacaagctgaccccccagatgttccagcagctgatgaagcaggtgacccagctggccatcgacacagaggagcggctgaagggcgtcatcgacctgatctttgagaaggccatcagcgagcccaacttctctgtggcctatgccaacatgtgccgctgcctgatggccctgaaggtgcccaccacagagaagcccaccgtgacagtgaacttcaggaagctgctgctgaaccgctgccagaaggagtttgagaaggacaaggatgatgatgaggtgtttgagaagaagcagaaggagatggatgaagctgccacagctgaggagcggggccgcctgaaggaggagctggaggaggcccgggacatcgccaggagaagaagcctgggcaacatcaagttcatcggggagctgttcaagctgaagatgctgacagaggccatcatgcatgactgtgtggtgaagctgctgaagaaccatgatgaggagagcctggagtgcctgtgccgcctgctgaccaccatcggcaaggacctggactttgagaaggccaagcccaggatggaccagtacttcaaccagatggagaagatcatcaaggagaagaagaccagcagccgcatccgcttcatgctgcaggatgtgctggacctgcggggcagcaactgggtgcccaggagaggagaccagggccccaagaccatcgaccagatccacaaggaggccgagatggaggagcaccgggagcacatcaaggtgcagcagctgatggccaagggcagtgacaagagaagaggaggccccccaggcccccccatcagccggggcctgcccctggtggatgatggcggctggaacacagtgcccatcagcaagggcagccggcccatcgacaccagccggctgaccaagatcaccaagccaggcagcattgacagcaacaaccagctgtttgcccctgggggccgcctgtcctggggcaagggcagcagcggcggcagcggggccaagcccagtgatgctgccagcgaggccgcccggcctgccaccagcaccctgaaccgcttcagcgccctgcagcaggccgtgcccacagagagcacagacaacagaagagtggtgcagaggagcagcctgagccgggagcggggggagaaggccggggacagaggagaccggctggagaggtctgagcggggcggggacagaggagaccggctggaccgggcccggaccccagccaccaagaggagcttcagcaaggaggtggaggagaggagccgggagcggcccagccagcctgagggcctgaggaaggccgccagcctgacagaggaccgggaccggggcagagatgctgtgaagcgggaggccgccctgccccctgtgagccccctgaaggccgccctgtctgaggaggagctggagaagaagagcaaggccatcatcgaggagtacctgcacctgaatgacatgaaggaggccgtgcagtgtgtgcaggagctggccagccccagcctgctcttcatctttgtgagacatggagtggagagcaccctggagaggtctgccatcgcccgggagcacatgggccagctgctgcaccagctgctgtgtgccggccacctgagcacagcccagtactaccagggcctgtatgagatcctggagctggccgaggacatggagattgacatcccccacgtgtggctgtacctggccgagctggtgacccccatcctgcaggagggcggcgtgcccatgggagagctgttccgggagatcaccaagcccctgcggcccctgggcaaggccgccagcctgctgctggagatcctgggcctgctgtgcaagtccatgggccccaagaaggtgggcaccctgtggagggaggccggcctgtcctggaaggagttcctgcctgagggccaggacattggagcctttgtggccgagcagaaggtggagtacaccctgggggaggagagcgaggcccctggccagagggccctgcccagcgaggagctgaaccggcagctggagaagctgctgaaggagggcagcagcaaccagagggtgtttgactggattgaggccaacctgtctgagcagcagatcgtgagcaacaccctggtgcgggccctgatgacagctgtgtgctacagcgccatcatctttgagacccccctgcgggtggatgtggccgtgctgaaggcccgggccaagctgctgcagaagtacctgtgtgatgagcagaaggagctgcaggccctgtatgccctgcaggccctggtggtgaccctggagcagccccccaacctgctgaggatgttctttgatgccctgtatgatgaagatgtggtgaaggaggatgccttctacagctgggagagcagcaaggaccctgctgagcagcagggcaaaggagtggccctgaagtctgtgacagccttcttcaagtggctgcgggaggccgaggaggagagtgaccacaactag

SEQ ID NO: 259433 - DNA, 4800 bp, Artificial Sequence
  derived and/or modified sequence
atgaacaaggccccccagagcaccggccccccccccgcccccagcccaggcctgccccagcctgcttttcctcctggtcagacagctccagttgtattctccactccacaggcaactcagatgaatacccccagccagccaagacagcatttctatcccagcagggcacaaccccccagctccgccgcttcccgagtgcaatccgcggcccccgcccgcccggggcctgcggcacacgtttatcccgccgggtcgcaggtgatgatgatcccctcacagatttcctacccagcaagccagggcgcctattacatccccggccaggggagatcaacatatgttgtcccgacccagcagtatccagtacagcccggagcccctggcttctaccctggcgccagcccaacagaattcggcacgtacgctggagcttattacccagcccagggcgtccagcaattcccgactggcgttgcacccacccccgtgttgatgaatcaacccccacagatcgctcccaaacgcgaaaggaaaaccatccggattagggatcctaaccaaggtggaaaggacattaccgaagagatcatgagcggggcccgcacagcgtccacgccgacaccccctcagaccgggggtggactggagccgcaggctaacggagagacacctcaggttgccgtgatcgtaaggcccgatgaccggtctcagggggctatcatcgccgataggcccggtcttccggggccagaacattctccaagcgaaagccagccatcttcgccatcacccacgccatcgccctcccctgtcttggagcccggaagcgaaccaaatttagctgtcttgtctatcccgggggacactatgaccacaatacagatgtctgtggaggaaagcacccccatctcccgtgaaactggagagccataccgtctgagcccagagccaactcccctggcagaacctatcctggaggttgaggtgacactttctaaacccgtaccagagtctgagttctccagcagcccactgcaggcccctacaccattagcatctcacactgtggagattcatgagcccaacggcatggtgcctagcgaggacctggagccagaggtggaaagctcacccgagctggccccccctcccgcctgcccgtctgagtcacccgtgccaatagcccctaccgctcagcctgaggaattgctaaacggtgccccatctcctccagccgtcgacctcagtcccgtctccgagccagaagagcaggccaaggaggttacagcctctatggcgcctcctacaattccatccgcgacacccgcaaccgcaccttcggccacctccccagcgcaggaggaagaaatggaggaggaggaagaagaggaagaaggagaggccggtgaagccggagaggcggagtctgagaagggcggagaggagcttcttccgcctgaatctacccccatcccagcgaatctctctcagaacttggaagccgctgcagcaacacaagtggcggtttccgtgccaaaacgtaggagaaagatcaaggaactaaataaaaaggaagcggtgggagatctgctcgacgcgttcaaagaggccaatcctgccgttcccgaggtggaaaatcagccaccagccggcagcaatcctggccctgagtcagagggctctggggtgcccccacggcctgaagaagccgacgagacctgggactctaaagaggataagattcacaatgccgagaacatccagcccggcgagcaaaagtatgaatacaagtccgaccagtggaaacctctgaacttagaggaaaagaagcgttacgatcgggagttcctgctggggttccagtttattttcgcctcaatgcagaagcccgagggactgcctcatatatcagatgtcgtgctggataaggcgaacaagacgcctcttcggcctctggaccccacacgcctacaaggcatcaattgcggccccgacttcactccaagtttcgcaaatctgggcagaaccacactctccacgagaggcccccctcgaggcggccctggcggtgaactgcccagagggccggctggactgggcccccgccgctctcaacaagggccccgaaaggagcccaggaaaatcatcgccactgtgctgatgacagaagacatcaaactgaataaggccgagaaggcctggaaacctagctccaaacgaacagctgccgataaggaccgaggggaagaggacgcagatggatcaaaaacccaagacctcttccgccgtgtgcgcagcattttaaacaaattaactccacagatgtttcagcagctcatgaaacaggtaacacagctcgctatcgacacagaggagaggttgaagggggtgatcgacctgatatttgaaaaagccatcagtgagcccaattttagcgtcgcttacgcaaacatgtgtaggtgtttgatggccctcaaagtcccaactaccgaaaagcctaccgttactgttaactttagaaagttactccttaaccgctgtcaaaaagagtttgagaaggataaggacgacgatgaggtgtttgagaagaagcaaaaagaaatggatgaagccgcaacagctgaagaacgtggcaggctaaaggaggagttagaagaggcccgcgatatagcacgaagacgaagcctcgggaatattaagttcatcggggaactgtttaagttgaagatgcttactgaggctattatgcatgattgcgttgtgaaactgctcaaaaatcacgatgaggaaagtttggaatgcctttgtaggttgctcacgaccatcggcaaggatctagactttgaaaaggctaaacctagaatggaccagtactttaaccagatggaaaaaattattaaggaaaaaaaaacctcctcaagaattcggtttatgctccaggacgtgttggatttaagaggatctaactgggtcccccgacggggagaccaaggtcccaagacaattgaccagatacataaagaggccgaaatggaggagcacagggagcatattaaggtgcagcagttaatggcaaagggtagcgacaagcggcgggggggcccgcctggccctcctattagtcgcggactccccctcgtggacgacggtggctggaatacggtcccaatatcaaagggtagccgcccaatagacaccagtaggctcactaaaattaccaagccaggaagcattgattctaataatcagttgttcgcccccggaggccgactgtcctggggaaaaggatcttctggtggcagcggcgctaaacctagcgatgcggcgtctgaggctgcacggcccgcgacatcaactctaaatcggttttctgctctacagcaggcggtgcccacagaatccaccgataatcgccgtgtggtgcagcgaagctccctaagccgcgagcgcggcgaaaaagccggggaccgaggagatagactggaaaggagcgagcggggaggcgaccgcggagacagactggaccgtgccagaacacctgccacaaaacgctccttttcaaaagaagtcgaggaacgtagcagagaacggcccagccagccagaagggctgcgtaaagctgcctcccttacagaagacagagacagggggcgcgacgcggtgaaaagggaggcggccctaccgccggtcagcccgctgaaagccgcattgtcagaggaagaacttgagaagaagagcaaagctatcattgaggagtatctgcacctgaacgacatgaaggaagcggttcagtgtgtgcaagaattggcatctccaagcctgttgttcattttcgtgagacacggagttgaaagcactctggagcgatccgctatagcccgcgaacatatggggcagctgttacatcaacttctctgcgctggccacctgtcaaccgctcagtactatcaaggactgtatgaaattctggagttggccgaggatatggaaattgacatcccccacgtctggctgtacttagcggaactcgtgacacctatcctgcaggaaggcggggtgcctatgggagagctgtttagagaaataaccaaacctctgagacccttaggcaaagccgcgagcttacttctggagatcttgggacttctttgcaaatcaatgggcccaaaaaaggttggcaccctgtggcgagaagccggtctgtcctggaaagagtttttaccagagggtcaggacatcggggcttttgtggcagaacagaaagtggagtacacgctgggcgaggaatctgaagcgcctggtcagcgcgccttaccttcggaagagctaaaccgtcaactggaaaagttactgaaggaaggctcctccaaccagagagtgttcgactggattgaggccaacttgtcagaacaacagattgtgtctaacactctggttcgcgctttgatgacagcggtctgctatagcgccatcatctttgaaacaccgctcagggtggatgttgcggtcttgaaggcccgggccaaacttctccagaaatacctgtgtgacgagcaaaaagaactacaggccctttatgccttgcaggcactggtcgtgacgctcgagcagccgcccaacctccttcgaatgttctttgatgcactgtatgatgaagacgtggtaaaggaagacgctttctacagttgggagtcgagcaaagacccagccgaacagcagggaaagggagtcgccctgaagagtgttaccgccttctttaagtggctgagggaagccgaagaggaatcggaccacaattag

SEQ ID NO: 259434 - DNA, 4800 bp, Artificial Sequence
  derived and/or modified sequence
atgaacaaggccccccagagcaccggccccccccccgcccccagcccaggactccctcagcctgctttcccacccgggcaaacagcccctgtagtgttcagcaccccccaagcaactcagatgaacacacccagccagccaagacaacacttctacccttccagggcacagccacccagtagcgctgcctctagggtgcaatcagctgcccccgctcggcccggtccagcggctcacgtctaccccgccggctcacaggtcatgatgatcccgtctcagatttcttatcccgccagtcagggagcatattacatccctggtcaaggccgctctacttacgtggttccaactcagcagtacccggtgcagccaggcgcgcccgggttttatccaggagcaagccctactgagtttggaacctatgccggtgcttattatcctgcccagggcgtgcagcagtttcctactggcgtggctcctacacctgtgttaatgaaccaaccacctcagatcgcccctaagcgcgagagaaagactattcgaatccgcgaccccaaccagggaggaaaggacattactgaggagatcatgtccggtgcccggacggctagcacccctacacccccccaaacaggtgggggcttagagccacaggccaatggcgagaccccacaggtggcagtgatcgtaaggcccgacgatcgttcgcaaggcgcaataatcgccgacaggccggggcttcccggccccgagcactcgccttccgagtctcaaccaagtagcccatcccctacgccaagcccctcgccggtgctcgaaccggggtcagagcccaacctcgctgtcttatctatccccggcgacaccatgacaacgatccagatgagtgtggaggagtctacccctatttctagagaaactggtgagccctacagattgagtccagagcccactcccctcgctgagccgatcctggaggtcgaagtgaccctgtctaaaccagttcccgaaagtgagttttccagctctcccttgcaggcccctacccctttggcttctcacacagttgagatccatgaacccaatggaatggtaccatctgaggatctggagcctgaagtcgaatccagcccagaactagcccccccacctgcttgcccctccgagtctcctgtgccaatcgcccccactgctcagccagaggagctgctgaatggtgccccatcgccccctgctgttgacttgtcacctgtcagtgaaccggaggagcaagccaaagaggtcactgcatctatggctcctcccaccattccctccgcaacacccgcgacagccccctcagcaacttcgcccgcacaggaggaggaaatggaagaagaagaggaggaggaggaaggtgaagctggcgaggctggcgaagccgaatctgaaaaaggaggcgaggaacttctgccacccgagtctacccccataccagcaaaccttagccagaatttggaggctgccgccgccactcaagtcgcagtgagtgtacccaagcgcagacgtaaaatcaaagagctcaataagaaagaggccgtaggtgaccttctcgatgcttttaaggaagccaaccccgccgtgccggaggtggagaatcagccacctgccggcagtaacccaggaccagagtctgagggttcgggagttccccccaggcccgaagaggcagacgagacttgggattctaaagaagacaagattcacaacgcagaaaacatccaacccggtgagcagaagtatgaatacaaaagtgaccaatggaagcccctcaacctagaagagaaaaagaggtacgaccgggaattcctgttaggctttcagttcatatttgcctccatgcagaagccagaggggctgccccatatctccgacgtggtgctggataaggcaaacaagaccccactcagacctttggatccaactaggttacagggcataaactgcggccccgatttcacaccctctttcgcaaatctaggacggaccactcttagcacaagaggcccccctagaggaggccccggtggagagcttccgcgcggaccagcaggactgggaccccgccgctcccaacaagggccccggaaagagccgaggaagatcattgccaccgtgctcatgaccgaggatatcaagctcaacaaagcagagaaggcctggaagccctcatccaagcgaaccgctgcagataaggataggggcgaagaggacgcagatggttccaaaacacaggatttgttccgacgcgtccgatcaatcctgaataagttaacccctcagatgtttcagcagctcatgaagcaggttactcagctggccatagataccgaggagaggctgaagggcgtgatcgacctaatattcgagaaagccattagcgagcccaatttcagtgtggcatacgccaatatgtgtagatgcctaatggcattaaaagtccccaccaccgagaaacctacggttacagtgaatttcaggaagctgctgctaaatcgttgtcagaaagagttcgaaaaggacaaggacgatgatgaggtgtttgagaagaagcaaaaagagatggacgaggctgccaccgcagaggaaagggggcggttaaaagaggaacttgaggaggctcgggacatagcccgcaggcgttcacttggcaatattaagttcataggcgagctgtttaagctgaagatgctgaccgaggcgattatgcatgattgcgtggtaaagctcctcaaaaaccacgatgaagagagcctggaatgtctttgtagattgctgacaaccatcggaaaagacttggacttcgaaaaggcgaagccaagaatggaccagtatttcaatcaaatggagaaaatcatcaaggagaagaagacaagctctcgaatcagatttatgctgcaggatgtcctggacctgagaggtagcaactgggttcctcgtagaggggaccagggacccaaaacgattgaccagattcacaaagaagctgagatggaggagcaccgagagcatattaaggttcagcagctcatggccaagggaagcgacaaacgtaggggaggaccacccggtccacctataagccgcggactgccccttgtcgacgacggaggttggaacactgtgcctatctctaaagggagtaggccaatcgatacctcccggttgacgaagatcaccaaacctggcagcatcgactcaaacaaccagctttttgcccctggaggacgcctgtcttggggtaaaggtagcagcggaggaagcggcgctaagcccagcgatgccgcctcggaggctgctcgaccggctacctcaactctgaatagattttctgctctccagcaagctgtgccaactgagtctactgataataggcgcgtggttcagcgcagtagtctgtcacgggaacggggggagaaagcaggagataggggtgatcggctggagagatctgaacgtgggggcgatcggggggacagacttgatcgcgctcggacccccgcaactaagaggagtttctccaaagaggtcgaagaaaggagcagggaacggcctagtcagcctgagggccttagaaaagccgcctcgctgacagaggaccgagatcgcggacgtgacgcagtgaaacgggaggcggccctccctccggtgagccctctgaaggcagcgctcagcgaggaggagctggagaagaaatctaaggcaatcatcgaggaataccttcatttaaatgatatgaaggaagctgtgcagtgcgtccaagagctggcctcgccttccttattgttcatttttgtgcgtcacggggtggagtctactttagaacgaagcgccatagcaagagaacatatgggtcaactactgcaccagctgctgtgcgctggacacctctccaccgcacaatattaccaagggctgtatgaaattctcgaattagccgaggacatggagatcgacattcctcatgtctggctgtatctggccgagctcgtcacccccattctccaggaaggaggcgtcccaatgggcgaactttttagggagattacaaagcccctgcggcctttaggaaaagcagcctctttgctgctcgaaatactgggacttttgtgcaagagcatggggccaaaaaaagtcggcacgctgtggcgcgaggcaggactgagctggaaagagttcctgcccgagggacaggacattggtgcattcgtggccgaacagaaagtagaatacaccctgggggaagaatctgaagcaccggggcagcgggcactacccagcgaagagctgaaccgccagctggaaaaattgctgaaggaggggtcatcaaaccagcgcgttttcgactggatcgaagctaacttatccgagcagcagattgtgagcaatacattggttagagcattgatgaccgcagtgtgctactctgccattattttcgagacacctctgcgggtcgatgtcgcagtgttgaaagctagggcaaaactgctccaaaagtacctgtgcgatgagcagaaggagctgcaggcgctatacgctctgcaagccttggtggtgaccctggagcagcctcctaaccttctgcggatgttctttgatgcgctctacgatgaggacgtggtaaaagaagacgctttttacagttgggaatccagtaaggatcctgctgagcaacagggaaagggtgtggctctcaagtcggtgacagcattttttaagtggcttagagaagctgaggaagaaagtgatcacaactag

SEQ ID NO: 259435 - DNA, 4800 bp, Artificial Sequence
  derived and/or modified sequence
atgaacaaggcgccacagtccaccgggcctcccccagccccaagtcccggacttccccagccggctttcccgcctggacagactgcaccagtcgtttttagcaccccacaggccacacaaatgaacacccccagccagcctcgacagcacttctatcccagtagggcacagcccccatcttcggccgcttctagagtccagagcgcggctccagctagacctggccctgctgcacatgtctatccagcaggcagccaagtgatgatgatcccaagccaaatttcctatcctgcttcccagggcgcttactatattcctggtcagggacgtagtacttacgtagtgccaacacagcagtatcccgttcagccaggcgcacctggattttaccccggtgccagcccaaccgagtttggcacttacgccggtgcttattaccctgcccaaggcgtgcaacagtttccaactggggtggccccaactcctgtgcttatgaaccagccgcctcagatagctccaaagagagaacgcaaaacaatcagaatccgcgatcctaaccaaggaggcaaggatatcacagaagagatcatgtcgggcgcacgaaccgcaagtacccctacaccaccacaaaccggcggtggactcgagcctcaggctaatggagagactcctcaggtggcggtgatcgtacgaccagatgatcgtagccaaggagctattatagcagatcgcccaggactgcctggtcctgagcactccccctccgagtcccagccatcaagtcccagcccaactccatctcccagccctgtactggagcccggtagtgaacctaacttggcagtgttgtccattccaggcgatactatgaccaccatccaaatgagtgttgaagagagtacccctatcagcagggaaacaggggaaccttatcgactgtctcctgagcccactcccctcgcagagcctattctggaggtggaggttacgttatcaaagcccgtgccagagtcagagttcagcagctcacctttgcaagccccaactcctcttgcgtcacacacagtggaaattcatgagcccaacggtatggtgcccagcgaggatctggagcccgaggtggaatccagcccggaactcgccccacccccagcctgcccgtctgaatcacccgtgcctatagccccaactgctcagccagaggaattactcaacggggctccatcacctcccgctgtggacttatctccggtgagtgaacccgaggagcaagctaaggaggtgaccgcttccatggcaccaccaaccatcccttcagcaacccccgctaccgcccctagtgcaacctctcccgctcaggaagaagagatggaggaggaggaggaggaggaggaaggggaggccggagaggcgggtgaagctgaatcggagaaggggggagaggagctactgccgccagagtctactcccatccccgcaaatctatcccaaaacctagaggccgctgctgccacgcaagtggcagttagcgttccaaaaagacgacgcaaaattaaggaactgaataaaaaggaggccgtgggggacctcctagatgcgtttaaggaggcaaatcccgctgtgccggaggtagaaaaccagccacctgccggaagcaaccccggacctgagagcgaaggatccggagtgcccccacgccctgaggaagctgatgagacctgggattctaaagaggacaaaatacacaacgccgagaatatccagcccggagaacagaagtatgagtataagtccgaccagtggaagcctcttaacttggaagagaagaaacgctacgaccgggagtttctcttgggtttccagttcatattcgcaagcatgcaaaaacccgaggggctcccccacatctctgacgtagtcttggataaggcaaacaagacccctctccgcccactggatcctactagactgcaggggattaattgcggtccagattttaccccaagcttcgccaatttgggaagaacaacactgtctactagaggcccaccccgaggaggcccagggggagagctgcccagaggccctgcgggattggggcctcgacggagccagcaggggcctcgcaaagaaccaagaaagatcatcgccacagtcctcatgactgaggatatcaagttgaacaaggctgagaaggcatggaaaccgagcagcaaacggacagctgccgataaggatcggggtgaggaggatgcggatgggagcaagacgcaagatctctttaggcgtgtcagatccatcttaaataagttaacacctcagatgttccagcagttgatgaagcaggtgacgcagctagccattgacaccgaagaacggctaaaaggagttattgatctaatctttgagaaagccatctctgagcctaacttttccgtagcctacgccaacatgtgtagatgtttgatggccttgaaggttccaaccactgaaaaaccgacagtcaccgtcaactttagaaaactgttgctcaacaggtgccagaaagagttcgaaaaggacaaggacgatgacgaggtctttgagaagaaacagaaggagatggatgaagctgctaccgccgaggaacgtggtagactcaaagaggagttggaagaggctcgggacatcgctagacgcaggtccctcgggaatattaagttcatcggcgagctctttaaactgaagatgctgacagaagcaattatgcatgattgcgtggtcaagcttctgaaaaatcatgatgaggaatccctggaatgtctgtgccgcctgctgacgaccattgggaaggacctggattttgaaaaggccaagcctcgaatggatcaatacttcaaccaaatggagaagatcatcaaggagaaaaagacttcatccaggattcgattcatgctacaagatgttttagatctacgtgggtctaactgggtgcccagacgcggagatcaggggcctaaaaccattgaccagatccataaggaggccgaaatggaagagcatagagagcatatcaaggtgcagcaacttatggctaaggggagcgacaaacgtcgcggagggcctccaggaccccctatatcccgtgggcttcctttggtggacgatggaggctggaataccgtgccaatatcaaagggtagccgccctattgatacctctcgcctgacgaagatcacaaagccaggctcaatcgacagtaataatcagctgtttgctcctggcggtagactgtcttgggggaagggaagcagtggaggctccggagccaaaccatctgacgcggcatcagaagctgcccgtcctgcaacatctacgcttaataggttttctgcgctgcagcaggccgtgccgaccgagtcaaccgataatcgcagggtggttcagcggtcatctctgagtagagaacggggtgagaaagcaggcgaccggggagatcgtctggaacggtccgagcggggaggagatcgaggagatcgactggaccgtgctcggacacccgcaaccaagagatcatttagcaaggaagtcgaggagcggtcccgagaaaggccttctcaacctgagggactgaggaaagccgcttcccttaccgaagatagggataggggacgagatgcagtcaaacgggaggcagctctgcctcctgtgagccccctcaaggccgcactcagtgaagaagaactggagaagaagtccaaagccataattgaggagtatctccacctgaatgacatgaaagaagccgtgcagtgtgtgcaggagttagcttcacctagtctgctatttatatttgtaaggcacggggtggaaagtacactggagcgctccgctattgccagagagcatatgggtcagctcctccaccagcttttatgcgcaggccacctgagcacagcccagtattaccaaggactatatgaaatccttgaactcgcagaagacatggagattgatataccacatgtgtggctgtatctggcagaactagtgaccccaattcttcaggaggggggagtaccaatgggggagctattccgagaaatcaccaagccgcttcgccctctgggcaaggccgcatccctgttactagagatcctcggtctgctatgtaagagcatgggccctaagaaggtgggcaccctgtggagggaagccggactatcttggaaagaattcttaccagaaggccaggatattggcgcttttgtggctgagcagaaggtggagtataccctgggggaggaatccgaggcaccaggccagagggctctaccgtcagaggagttaaacaggcagctggagaaactgctcaaggagggcagcagtaatcagagagtgtttgactggattgaggcaaacctgtcagaacagcagattgttagtaacacactcgttagggcactcatgaccgctgtctgttacagcgccatcatctttgagacacccctgagagtggatgtcgccgtactgaaggcacgagcaaagttgctccagaaatatctctgcgacgagcagaaagaactccaggcactttacgcactgcaggccctggtggtgacactggagcaaccgcctaacttgctcaggatgttttttgatgcattgtacgacgaggatgtggtgaaggaggatgctttttattcttgggaatcgtctaaggacccagccgagcaacaaggtaaaggagtcgctctgaagagcgtaacagcctttttcaaatggctccgggaggcagaagaagagagcgaccacaactag

SEQ ID NO: 259436 - DNA, 4800 bp, Artificial Sequence
  derived and/or modified sequence
atgaataaggctccacagtcaacagggccaccacccgctccctcaccaggcctccctcagccagcctttcctcccggacaaacggcaccggtggtgttcagcacaccacaggccactcagatgaacacccctagccagccgcgtcagcacttctacccaagcagggcccagcccccttcctccgctgcctctagagttcaatcagccgctcctgcaagaccgggtcccgctgcccatgtctaccccgctggatcgcaggtgatgatgattccctctcagatctcctaccctgcgtctcagggggcttattacatcccgggtcaagggagaagcacttatgtcgtgcccacccagcagtacccggtccaaccaggagcccctggattctacccaggggcatccccaactgagttcggtacctatgctggcgcttactacccggcacagggcgtgcagcaatttccaaccggcgttgccccaactcctgtgctcatgaaccagccaccacaaattgcccctaaacgcgaacgcaaaacaattaggatacgggatcctaaccagggagggaaagatataaccgaagagattatgtcaggagccaggactgctagcacccccaccccaccccagaccgggggaggcctggagccgcaagctaacggagagaccccgcaggtagcagtgatcgtaagaccagatgacagatctcagggcgcaatcatagctgatcgcccagggctccccggtccggagcactcaccctcggagtcccagccatcaagtccatctcctactcctagccctagccccgtcctggagcccggttcagaacctaatctggcagtgctgagtatccctggggacaccatgaccactatccagatgtcggttgaagagtccacccctatctcccgcgaaacaggagaaccttaccgtctgtcccctgagcccacccccctggcggaacccattctggaagtcgaagtgacgctgagcaagcccgtgcctgagtccgaattttcttcttccccgctgcaagctcccaccccactggcgtcacacacggtggaaatccacgagcctaatggtatggtaccatccgaggacttagaaccagaggtggaatccagccctgagttggcccctccccctgcatgcccttcagagagtcccgtgcctatcgccccaacagcccagccagaggagctgcttaatggagccccaagccccccagctgtcgacctgagtccagtgagcgagccagaagagcaagccaaggaagttacggctagcatggccccaccaactattccgagcgcgactccagccacggccccatccgccacttctccggcacaggaggaggagatggaggaagaggaggaggaggaggagggagaggctggagaggccggagaggctgaatcggagaagggaggtgaggaactgctgcctcccgaatcaacgcccattccggcaaatctgagccagaatctggaggcagctgctgccacacaggtggccgtgagcgtacccaaacgcagaagaaaaatcaaagaactgaacaagaaagaggccgtcggagacctgctggatgcattcaaagaagcaaaccctgcagtacccgaagtggagaatcagcctcccgctggcagcaatccaggccctgagagcgaaggaagcggtgtcccaccacggcctgaggaagcagatgaaacatgggattccaaagaggacaagatccataacgcagagaatatacaacccggagagcagaaatacgagtacaaatcagaccagtggaagcctttaaatctggaagaaaaaaagcgttacgaccgggagtttctgctgggattccagttcatcttcgccagcatgcagaaacctgaagggttaccacatatttctgacgtggtcctggacaaggctaataagactcctttgcgacctttagaccccacacgccttcagggcattaattgcgggcctgattttacaccatcattcgctaatttgggaaggacgaccctgagcactaggggaccacctagaggcggtcccggaggtgagcttccccgaggccctgcaggcctgggcccaaggcgctcgcagcaggggcctcggaaggaaccacgaaaaattattgccactgtgctcatgaccgaagatattaagctgaataaggctgagaaagcttggaaaccaagcagcaagcggaccgcagcagacaaagatcgaggagaggaggatgcagatggctcaaaaactcaagatctgttccgacgcgttcgctcgattctgaataagctaaccccccagatgttccagcagctgatgaaacaggtcacccagctcgccatcgatacagaagaaaggttgaaaggagtgattgatttgatatttgagaaagcaatctcagaacctaacttcagtgtggcctacgcaaacatgtgtcgttgtctgatggccctgaaggtccctacaactgagaagccgacggtgaccgtgaactttagaaaactgttgcttaaccggtgtcagaaagagttcgagaaagataaggacgacgatgaagtctttgaaaagaaacagaaggaaatggatgaggccgctaccgccgaggagaggggcagattgaaggaggagctggaggaggctcgagatattgcaagaaggcgctccctgggcaatatcaaattcataggtgagctgtttaaactgaagatgcttactgaggctataatgcacgattgtgtggtgaagctccttaagaaccacgacgaggaatccctggagtgcctgtgcaggttattgaccacaatcgggaaggatttggactttgagaaggccaaaccaaggatggatcagtactttaatcaaatggagaaaatcattaaggaaaagaagacatcttccaggattcgtttcatgctgcaagacgtcctagacctaaggggcagcaattgggtaccccgacggggtgaccagggacccaaaacaatcgaccagatccataaggaagctgagatggaggaacatcgcgagcatataaaagtgcaacagttgatggctaaagggagtgataagcgaaggggaggtccaccaggaccacctatcagtcggggtttgccacttgtagatgatggaggatggaacactgtcccaatcagcaaagggtctaggccaatcgacacatcgcggctgacaaaaattaccaagcctggctccatcgattctaacaatcagttgtttgcccctggcggaagactgtcttgggggaaggggtcctccggcggaagtggggcaaagccatcagacgcagcatcggaggccgctcggcctgctacgagcacactcaatcggttttccgcactgcagcaggccgtgccaaccgaatctaccgataatcggagagtggtgcaacggtcgagcctatcccgcgagcgcggagagaaggcaggagaccggggagatagattggaacgtagcgagagaggcggtgatcggggagaccgactggaccgggctagaacaccagcaactaagcggagcttcagtaaggaggtagaggagcggagcagagagcgtcccagccagccggaaggactgagaaaagccgcatccctaaccgaggacagagaccgagggagggacgctgtaaaaagagaggccgcattgccacccgtctcccctctgaaagccgcactgtcggaagaggagctagaaaaaaaatccaaggccatcattgaggagtatcttcacctgaacgatatgaaggaggcagttcagtgcgtgcaagagctggcgagtccaagcctgctgtttatctttgtgagacacggcgtggagagtactctcgagcggagcgcaatcgcaagagagcacatgggccagttgttacaccagttgctttgcgcaggccatcttagcactgctcaatattaccagggactctatgagattctggaacttgctgaggatatggagattgacattcctcacgtttggctgtatctggctgaactggtgacccctatcttacaggaagggggtgtcccgatgggggaactgtttcgggaaataaccaagcctctcagacctctggggaaggctgcatccctgctcctggagatcctgggactcttatgtaaatctatgggtcccaagaaagtggggaccctttggcgcgaagccggtctcagctggaaagaatttctgcctgagggacaagatattggcgcattcgtggccgagcagaaggtcgaatacacactgggagaggagtcagaggcaccgggacagagggcactgccatcggaggagttgaaccggcaattggaaaagttattgaaagaaggctcaagcaaccaacgcgtgtttgattggattgaagccaacctctctgaacagcagatcgtctccaacaccctggtgagggcactgatgacggctgtgtgttactctgctattatattcgagactcctcttcgcgtggacgtcgccgtgctcaaggcccgagctaagttactccaaaagtatttatgcgatgaacagaaagagctccaagctctctatgcactccaagctcttgtggtgacattggagcagccccctaacttactgcggatgttcttcgacgctttgtacgatgaggacgtagtgaaggaggacgctttctactcctgggagagcagcaaggaccccgctgagcagcagggcaaaggcgtggccctgaaaagtgtgacggcgttctttaaatggctccgagaagctgaggaagagtccgaccacaattag

SEQ ID NO: 259437 - DNA, 429 bp, Artificial Sequence
  derived and/or modified sequence
atgaacatcaacccctgcctggtgctgtgcgagtgcagcctgagcattagcctggatgcagacccgctcgtgagtccgttcgccaccgggccttgtcccggtgcacctcgggaggttgtcgccatgcagtcagacgtgggccagggcttccccatgcagtctaattggagagccccagtgcacgcatgtacttctggtgccgtgcgaaaggggtggcccggttgcggccgccggcggcataagatgggaggcggacccgtcagttgggagcagcgccagaaggaggtagaggcggcccagggcagcgaagagcgcggccctggttcactcgcggtgtcacttttatccctcgctgtagggatccatcgcatatctccaatattaggctttcatatatgctgcatgcaggttctcatggtcctcaaatag

SEQ ID NO: 259438 - DNA, 1462 bp, Artificial Sequence
  derived and/or modified sequence
aacacaggctggctgtgaagatgaacattaatccatgcctggtgctttgtgagtgctcactgagtattagccttgatgcagacccactggtttctccttttgccactgggccctgccctggagctcccagggaggtggtggcgatgcagagcgacgtgggtcagggattccccatgcagtccaactggagggctcccgtgcatgcgtgcacatcaggggcggtaaggaagggctggccggggtgtgggaggaggcgacacaagatgggaggtggccctgtctcttgggagcaaaggcagaaggaggtggaggcagctcagggctcggaggagaggggtccgggctccttggctgtgtccctgctgtctctcgctgtgggtattcaccgaatctctcccatcctcggttttcacatctgctgcatgcaggtcctcatggttctcaagtgaggcaggtggtgagcccatcaggccagtgcccagggcttattctggggacagctcctggagaggaagggctgcctccctaaggactcctgccctgccctgggtgcaaggggttccacctgctgcccctcccccactccccagctcgcctcaggcggatagttcccctctcactccaaataagagccacaatgctgacagtggcccccaaggccctgcccagcggtccccagcttcctctagctacatctcccggccctccccttcacccactcctgtaggcgcctcgaacgcgcctcagccctgctcctcccctgcctgcagcgttcctccccaggtctcccccggctctctcacctgcttccggttttgctcagactgcgctgcctcagtgcgcccttctgtcaccatcctgtgtatagtcggaaacccctgctccctttccctgcactgaatcttccgtgtgctccttttctccatggcatttgttagctttggctatcctgtctaatttgcgtatgtatttattttttattttgctgcctgttccctcattcccccaactccccaatggcagggagttctgttttggtcactgctgaatccctggtgacccgagcagtgatgatgcagagttgttgtgatatttgtggaatgaatgaatgcaggattttttgttttaccttcacttggcacaaatgctgtggttctgttcaccactcccccctgaagtaatgaaagttatgggcccatccctgtgctgagtggagctggggacacagtgggggctaggacagactgtatccctgccttgtggaacccacagtccagtgggagaggcgacattacccacatagtcatgcaggtgacagagcctgcccacggcttcaacctgcctccagccccacctgctccaagcagacagatggggcgagtgtagggagtgtgtttaaaagaaaaaagaaacaaaaagtctctctcttttttttttttgaagtacccagaccttttcagga

SEQ ID NO: 259439 - protein, 285 aa, Artificial Sequence
  derived and/or modified sequence
MSGARTASTPTPPQTGGGLEPQANGETPQVAVIVRPDDRSQGAIIADRPGLPGPEHSPSESQPSSPSPTPSPSPVLEPGSEPNLAVLSIPGDTMTTIQMSVEESTPISRETGEPYRLSPEPTPLAEPILEVEVTLSKPVPESEFSSSPLQAPTPLASHTVEIHEPNGMVPSEDLEPEVESSPELAPPPACPSESPVPIAPTAQPEELLNGAPSPPAVDLSPVSEPEEQAKEVTASMAPPTIPSATPATAPSATSPAQEEEMEEEEEEEEGEAGEAGEAESEKGGE

SEQ ID NO: 259440 - DNA, 596 bp, Artificial Sequence
  derived and/or modified sequence
gagctggggcagggactacgagagcagccagatgggctgaaagtggaactcaagggatccgaattcgagatccaaaccaaggaggaaaggatatcacagaggagatcatgtctggggcccgcactgcctccacacccacccctccccagacgggaggcggtctggagcctcaagctaatggggagacgccccaggttgctgtcattgtccggccagatgaccggtcacagggagcaatcattgctgaccggccagggctgcctggcccagagcatagcccttcagaatcccagccttcgtcgccttctccgaccccatcaccatccccagtcttggaaccggggtctgagcctaatctcgcagtcctctctattcctggggacactatgacaactatacaaatgtctgtagaagaatcaacccccatctcccgtgaaactggggagccatatcgcctctctccagaacccactcctctcgccgaacccatactggaagtagaagtgacacttagcaaaccggttccagaatctgagttttcttccagtcctctccaggctcccacccctttggcatctcacacagtggaaattcat

SEQ ID NO: 259441 - DNA, 524 bp, Artificial Sequence
  derived and/or modified sequence
agtgagccgattgggttctagatgggggtcctgggccccaggatccgaattcgagatccaaaccaaggaggaaaggatatcacagaggagatcatgtctggggcccgcactgcctccacacccacccctccccagacgggaggcggtctggagcctcaagctaatggggagacgccccaggttgctgtcattgtccggccagatgaccggtcacagggagcaatcattgctgaccggccagggctgcctggcccagagcatagcccttcagaatcccagccttcgtcgccttctccgaccccatcaccatccccagtcttggaaccggggtctgagcctaatctcgcagtcctctctattcctggggacactatgacaactatacaaatgtctgtagaagaatcaacccccatctcccgtgaaactggggagccatatcgcctctctccagaacccactcctctcgccgaacccatactggaagtagaagtgacacttagcaaaccggttccagaatctgagtt

SEQ ID NO: 259442 - DNA, 983 bp, Artificial Sequence
  derived and/or modified sequence
ctacgagagcagccagatgggctgaaagtggaactcaaggggtttctggcacctacctacctgcttcccgctgggggatccgaattcgagatccaaaccaaggaggaaaggatatcacagaggagatcatgtctggggcccgcactgcctccacacccacccctccccagacgggaggcggtctggagcctcaagctaatggggagacgccccaggttgctgtcattgtccggccagatgaccggtcacagggagcaatcattgctgaccggccagggctgcctggcccagagcatagcccttcagaatcccagccttcgtcgccttctccgaccccatcaccatccccagtcttggaaccggggtctgagcctaatctcgcagtcctctctattcctggggacactatgacaactatacaaatgtctgtagaagaatcaacccccatctcccgtgaaactggggagccatatcgcctctctccagaacccactcctctcgccgaacccatactggaagtagaagtgacacttagcaaaccggttccagaatctgagttttcttccagtcctctccaggctcccacccctttggcatctcacacagtggaaattcatgagcctaatggcatggtcccatctgaagatctggaaccagaggtggagtcaagcccagagcttgctcctcccccagcttgcccctccgaatcccctgtgcccattgctccaactgcccaacctgaggaactgctcaacggagccccctcgccaccagctgtggacttaagcccagtcagtgagccagaggagcaggccaaggaggtgacagcatcaatggcgccccccaccatcccctctgctactccagctacggctccttcagctacttccccagctcaggaggaggaaatggaagaagaagaagaagaggaagaaggagaagcaggagaagcaggagaagctgagagtgagaaaggaggagag

SEQ ID NO: 259443 - protein, 318 aa, Artificial Sequence
  derived and/or modified sequence
MLHHHCRRNPELQEELQIQAAVAAGDVHTVRKMLEQGYSPNGRDANGWTLLHFSAARGKERCVRVFLEHGADPTVKDLIGGFTALHYAAMHGRARIARLMLESEYRSDIINAKSNDGWTPLHVAAHYGRDSFVRLLLEFKAEVDPLSDKGTTPLQLAIIRERSSCVKILLDHNANIDIQNGFLLRYAVIKSNHSYCRMFLQRGADTNLGRLEDGQTPLHLSALRDDVLCARMLYNYGADTNTRNYEGQTPLAVSISISGSSRPCLDFLQEVTRQPRNLQDLCRIKIRQCIGLQNLKLLDELPIAKVMKDYLKHKFDDI

SEQ ID NO: 259444 - DNA, 957 bp, Artificial Sequence
  derived and/or modified sequence
atgctgcaccaccactgcagaagaaaccccgagctgcaggaggagctgcagatccaggccgccgtggccgccggcgacgtgcacaccgtgagaaagatgctggagcagggctacagccccaacggcagagacgccaacggctggaccctgctgcacttcagcgccgccagaggcaaggagagatgcgtgagagtgttcctggagcacggcgccgaccccaccgtgaaggacctgatcggcggcttcaccgccctgcactacgccgccatgcacggcagagccagaatcgccagactgatgctggagagcgagtacagaagcgacatcatcaacgccaagagcaacgacggctggacccccctgcacgtggccgcccactacggcagagacagcttcgtgagactgctgctggagttcaaggccgaggtggaccccctgagcgacaagggcaccacccccctgcagctggccatcatcagagagagaagcagctgcgtgaagatcctgctggaccacaacgccaacatcgacatccagaacggcttcctgctgagatacgccgtgatcaagagcaaccacagctactgcagaatgttcctgcagagaggcgccgacaccaacctgggcagactggaggacggccagacccccctgcacctgagcgccctgagagacgacgtgctgtgcgccagaatgctgtacaactacggcgccgacaccaacaccagaaactacgagggccagacccccctggccgtgagcatcagcatcagcggcagcagcagaccctgcctggacttcctgcaggaggtgaccagacagcccagaaacctgcaggacctgtgcagaatcaagatcagacagtgcatcggcctgcagaacctgaagctgctggacgagctgcccatcgccaaggtgatgaaggactacctgaagcacaagttcgacgacatctag

SEQ ID NO: 259445 - DNA, 957 bp, Artificial Sequence
  derived and/or modified sequence
atgcttcaccaccattgccgccggaatcccgaattgcaggaagaactgcagatccaggctgccgtcgccgccggggatgtgcacaccgtgcgtaaaatgctggagcagggatactcgcctaacggaagggacgccaacggctggacattgctgcattttagtgccgcaagagggaaggagcggtgtgttagggtcttcctggagcacggcgccgatcccacagttaaggacctgattggtggtttcacagctttgcattacgccgctatgcatggacgggcgaggattgcccgactgatgttggagtcagagtaccggagcgacatcatcaacgccaaaagtaacgacgggtggactcccttacacgttgctgctcattacggcagggactcgtttgtgagattgctcttggaatttaaggccgaagtggatcctttaagtgataaaggcacaacaccgctgcaactggcgattatccgagaaagaagtagctgcgtcaaaattttactggatcataatgcaaacatcgacatccaaaacggatttctgctaaggtacgcggtcataaagtccaaccattcatactgtagaatgttcctccagagaggagctgatactaacctgggcaggctcgaggatggccagacacccctacacctcagcgcactgagagatgacgtgctctgcgcccgtatgctgtataattacggcgccgacaccaacaccaggaactatgaaggtcagactcccttggcagtctccataagcatctcgggcagcagtcgaccttgcttggatttcctgcaagaggtcacccggcagccgcgtaacctgcaagatttgtgtaggatcaaaatacggcaatgcataggcctgcagaacctcaagcttcttgatgagctccccattgctaaggtgatgaaggactacctaaaacacaagttcgacgacatctag

SEQ ID NO: 259446 - DNA, 957 bp, Artificial Sequence
  derived and/or modified sequence
atgctgcaccaccactgcagaagaaatcctgagctgcaggaggagctgcagatccaggccgctgtggccgctggagatgtgcacacagtgaggaagatgctggagcagggctacagccccaacggcagagatgccaacggctggaccctgctgcacttctctgctgcccggggcaaggagcgctgtgtgcgggtcttcctggagcacggggctgaccccaccgtgaaggacctgattggaggcttcaccgccctgcactacgccgccatgcacggccgggcccgcatcgcccggctgatgctggagagcgagtacagaagtgacatcatcaatgccaagagcaatgatggctggacccccctgcacgtggccgcccactacggccgggacagctttgtgcggctgctgctggagttcaaggccgaggtggaccccctgagtgacaagggcaccacccccctgcagctggccatcatccgggagaggagcagctgtgtgaagatcctgctggaccacaatgccaacatcgacatccagaatggcttcctgctgcgctatgctgtgatcaagagcaaccacagctactgcaggatgttcctgcagagaggagctgacaccaacctgggccgcctggaggatggccagacccccctgcacctgagcgccctgagagatgatgtgctgtgtgccaggatgctgtacaactacggggctgacaccaacaccagaaattatgagggccagacccccctggccgtgtccatcagcatcagcggcagcagccggccctgcctggacttcctgcaggaggtgacccggcagcccaggaacctgcaggacctgtgccgcatcaagatccggcagtgcatcggcctgcagaacctgaagctgctggatgagctgcccatcgccaaggtgatgaaggactacctgaagcacaagtttgatgacatctag

SEQ ID NO: 259447 - DNA, 4985 bp, Artificial Sequence
  derived and/or modified sequence
aggctcaggctccactgcgggcgctgattggttgttgaaggcttggtcccatcccagtgaccccaaagtgctgaagggagggggcgggggtggcccagtgcaaagtgcatcccgaaagccccctgtccggagaccccacggctggcacttcgggccccgtatgacctgggacctcgccgtcccgagacctcctgggtccctccgtagctggaagcctccggcccggagcgcggcagccccctgctccgagccctggaccgggactgcccccccacccgagccaggacttcctccctgcctccctgcacctctgccccaaggctgcccggcggccgggatcgccacctcctgccttctcggctgttcggatgttcgccgggctggggccgtgaggcaccgaggaggatcaggaacaccagggtccggccctgcctggggtatttcttcaatggagaagttggtgagtgtagaggaggctgaaaggaggaagagaagcagcagctgaggagacaggtttgagctggctgaagaagacgcgaaagcaggaagaggtctgcccacctatcagagaagcagaaggcacagtgcctctgaccagcatcgtctgtaaaggttaagaaggcttttttgctctgtagcctggacgtactttgaagcccctccccacgatgctgtacgtgcacaatggttactaggcaatccgtacatcaggagaagggacactcttccataaggctgatccccgtaacctaatgaatcctttgtaaaaagtggactcagctaggatgttacaccatcattgtcgaaggaaccctgagctccaggaagagttgcagattcaggccgcggtggctgctggggatgtccacacagtgcgaaagatgctagaacaaggctattccccgaatggccgagatgcgaatggctggactctgcttcatttctctgcagcaagaggaaaggaaagatgtgttcgggtttttctagaacacggagctgatcctacagttaaagacttaatcggaggcttcacggctcttcactatgcagccatgcatggccgggcccgcattgcacgcttgatgttagaatctgaatacaggagcgacatcattaatgcaaaaagcaatgacggctggactcccctccatgtggctgcccactacggcagggactcatttgtccggctcctcctggagttcaaggctgaggttgacccactcagtgataaaggtaccacaccgcttcagctcgccattatccgagagaggtcaagctgtgtgaaaatcctcctggaccacaatgccaacatcgacattcagaatggtttcctgttgcgatacgccgtgatcaaaagcaatcactcttattgccgaatgttccttcagagaggggcagacacaaacttgggtcgcttagaagacggacagactcctttacacttatctgcccttagggatgatgtgctgtgtgcacggatgttatataattacggagcagacacgaacacacggaactatgaaggacagaccccattggctgtttcaataagtatttctggaagtagtcgaccatgtttggatttcttacaagaagtcacaagacagcccagaaacttgcaggacctgtgccgaattaaaattcgacaatgtataggccttcaaaacctaaagctacttgatgaactaccaattgccaaggtcatgaaagactacttaaaacacaaatttgatgatatctgatatgccagaactgtgagcaagattaggagttctattctagatacttaaaaggctttttgccttgcacaaagtatatcctatgcaatttctgatttgctgtgaaatcagaaagcaggtatacacttttgggttttctgtttgtttggttggttttcattgtaggggagggattttttatatatatataaaaacacacaccacatgcttgaaggtcttaatttggtttcttggtccaagtttaagaggtccaagctttgtatacaatactgcatttagaaaaattgtcttttcttaaatgacacaagcaggtttagagtggagaatttaccctttccaaatttatggttccttggtaagcacggtattctaaaccagcagagcacttgttaacgtttggaggcacagtttcacccagggcgaccctgggttcttttggaaaatgccctaagaaatgtttgaagtaacgctgtcacctcattcatttttaatgagtacaaactggccgtttcaaactgttctttttcctaattaatgtagctttcggatgacataaatccagtatctctgcttatgacataaatccagtacctctgcttttcttttgctgtgctcttgtttttaacttattttttttttaacaactgtagtacactaccctgagacactgcatctcgatttctatctctagttagagttgtacttttaaaaaaattaacgggaaagaaaataactttgtgaagccagtgtattctgtttttaaaactgtgcctgcagtgcaatactccttctggtgtattttatccattatttcacttgctggtcgtcatttcacagccagctttgacatgcccgtgaggacaggagccgccgcttcagttgtcactgcagagccatcgtatgtcagttgcaatttccatctgaagctatgtctttgacttcactttaagcagaaaattttgtaccctggtggtcgagtcttcccttaaaaattgttaaatcatttggctttaatggttcaataatttggggtggcttcatggtgtttcttttcttcccagtttaaaaaaaaaactttttaagcgtaaaatctttaaggggtacacatttataagtctggctaatttctaatatgctaattaaacatttcccattttaaggttatatacagtgaggctcttcaggacaattattttctgggttgattgggcatatgtttgccgtgtaaacacggatatgataaagtgtcagtaacaatggaaaaggtcccagaggcattaggcatctaagaggatgccctcagaaacgtattctggcttgatttgtgttattaacttcagaagaaccttttcaaatgtcccagtatcgttcttagtgctttgggaaaaaatatttaacacactgttaataaatttgttatcagaagtttacaagacgaagggcttctctcgtctgaatttctagatttaagtcatgaagtgtaaaactgtttcacccagaagtgtaactaagcagaactaggagttttctctggcttcacctttttcagagccagcagtgctgttttctcaagcacagcgtttgctcttagactctgatctgcttgtgcctaagcattgcacaggtttccgaagacgggcagcttcagagaagaggattattcgggagattgctggtgtggcccatagactctttggcatagactctttcgcaggcagccactctgagtgtggccagttctataaccatccccaaactagctggagcctgatggataggaacgggtagtctgtcctcttccccataaaaatgttccaaaaagttatctccagagagagtcccttatgaagacagttgccaagctgtattctcattctttaaaccaatacccaggtcagggctagttcacactagcactgttagggacatggtgtggctagaaatgaattgagtgtgacttctccctacaaccccaggcccagggataggaggaggcagaggggtgcctggagtttctgcactctcatcagtgatgttcatgttacacttgcacaagggctgatttccacgtatgtgtgtgttaatttattcacttagtttcaaaagattttctctccccagccattcagaggtttccaaactaagccactgagtttgagtcagggaattccacgtaaaaagatcagattaaggtaaattctttgttctgtattgctgctgtgacttcagaaaaaaaaaattatgagagctcttcctggaattttgaaatttctatttaatgaagaagtgtataattccattatttattgtttgaggtttgatttatctggaagcttaaaaagaatgttttatttttgttgttaataaaatcccaatcacatttcacaataactaaaatgtctccaggtgggttactggtagatgatagtggtgacacctgcaggtctgcatttgaattggattcacagagaagcattccatggtcacataatgaatagggagaacagatattttcagaaaaatcaaccgattgttttttccagaaacagaacagaaaatgttcagaatattttcaaatttgtcagattcttttatgtttcctttgaaatttattatttaagcctattactaaacctttataaaaatatatttggcaaatacaccaaagaaaccagcttacaaaagattatgatcattaatgaactgcaaacctcatctttcgaaaacaaggttttgtgtttttttttttttgtaaatatttgtgtttataaatgtacagcagagtaagagtgttttttagattatttaattcccatatttctaaactatttactacacagtaatccatgcctgttagtttggaggacttgactgtctcattttttaattcattgtcagtcatgcttggaacagcatttccactagagaatccagcgttctggcagtagcaagagtacacatctggagcatgagggactctagcatgactcgtcagatgcacaccccaagagacaagaatgtgtagtttaatgaccggcgtggaccatacgaaattgagattctaactttcctgcaggagtgctcatgagcccagaatgtgattgggataaggccatttgcccacaaatttagctttcatgtaactcctagtgtgttatatcataatgtattttgttcttcctttttaatgtaagttttgctttgggtcaatttgaattaaaaaaatcaaatctgatttaaaacatg

SEQ ID NO: 259448 - DNA, 957 bp, Artificial Sequence
  derived and/or modified sequence
atgctgcaccaccactgccggcggaaccccgagctgcaggaggagctacagatccaggccgccgtcgccgcgggggatgtccacacagtgcggaagatgttggagcagggctactccccaaatggccgtgatgccaacggctggacgttactccacttctcggctgctcgcggaaaagagaggtgcgtacgggtgtttctcgagcacggcgctgacccaacagtgaaggacctcatcggagggtttacagctctccactatgctgccatgcacggtagagccaggattgctcgacttatgttggaaagcgaataccggtcagatattatcaacgctaaatccaacgatggatggacacctctccatgttgccgcccattacgggcgtgacagtttcgtacgcctgctgctagaatttaaagccgaggtcgacccattatcggacaagggaaccactcccttgcaattggcaattatccgagagcgttcttcttgcgtgaaaatattgctagaccacaatgctaatatcgatattcagaatgggtttctgctgcgatatgccgtgatcaagtctaatcactcatactgtagaatgtttttgcagcgcggtgcagacactaacctaggcagactagaggatggacagacccctcttcacttgagcgctctgagggacgatgtgctgtgcgccagaatgctctacaactacggtgctgatactaacactagaaattacgaaggacaaaccccattagcagtgtccattagcatctctggtagctccagaccctgcttggactttctgcaggaagtgacacggcagcctaggaatctacaggatctgtgcaggatcaaaattaggcaatgtattggcctacaaaacctgaagctgcttgacgaactccctattgcaaaggtcatgaaggactacttgaaacataaatttgacgatatctag

SEQ ID NO: 259449 - DNA, 957 bp, Artificial Sequence
  derived and/or modified sequence
atgcttcatcatcattgcagacgcaaccctgaactgcaggaggagctccaaattcaagctgcagtcgccgctggcgatgtccacacagttaggaagatgctggaacaggggtatagtccgaacggcagagatgcaaacggttggactttgctccactttagtgctgcacgaggaaaggagcggtgtgtgagggtgttcctggagcacggcgctgaccctacggtgaaggatctcatcgggggttttacggcattgcactatgcagctatgcatgggcgtgctaggatagctcgcctgatgttagaatctgaatacagatccgacattataaacgcaaagtccaatgacggctggacacctcttcatgtggctgcccattacggcagagacagtttcgttcgcctgttgctcgagttcaaggcggaagttgatccactgagtgataaagggacaacccctctgcaactcgccatcatcagggagaggagctcatgcgtgaaaattctgctggaccacaacgcaaacatcgacatacagaacggattcctgctgcggtacgccgtgatcaaaagcaatcacagctactgtcgaatgtttctccagcgaggcgcagatacaaatctcggacgcttagaggatggccaaaccccgctgcatcttagtgccttaagagacgatgtgctctgcgctaggatgctttataattacggtgcggacacaaacacgcggaattatgaagggcaaactccactggccgtgtcaatcagcatctctgggtcctcgcgcccttgtctggactttctgcaggaggtaactagacagccacggaatctgcaggatctgtgcagaatcaagatccggcagtgtattggcctgcaaaacttaaaacttcttgacgagttgccgattgcaaaggtaatgaaagattatctgaagcataaattcgatgacatctag

SEQ ID NO: 259450 - protein, 1132 aa, Artificial Sequence
  derived and/or modified sequence
MPRAPRCRAVRSLLRSHYREVLPLATFVRRLGPQGWRLVQRGDPAAFRALVAQCLVCVPWDARPPPAAPSFRQVSCLKELVARVLQRLCERGAKNVLAFGFALLDGARGGPPEAFTTSVRSYLPNTVTDALRGSGAWGLLLRRVGDDVLVHLLARCALFVLVAPSCAYQVCGPPLYQLGAATQARPPPHASGPRRRLGCERAWNHSVREAGVPLGLPAPGARRRGGSASRSLPLPKRPRRGAAPEPERTPVGQGSWAHPGRTRGPSDRGFCVVSPARPAEEATSLEGALSGTRHSHPSVGRQHHAGPPSTSRPPRPWDTPCPPVYAETKHFLYSSGDKEQLRPSFLLSSLRPSLTGARRLVETIFLGSRPWMPGTPRRLPRLPQRYWQMRPLFLELLGNHAQCPYGVLLKTHCPLRAAVTPAAGVCAREKPQGSVAAPEEEDTDPRRLVQLLRQHSSPWQVYGFVRACLRRLVPPGLWGSRHNERRFLRNTKKFISLGKHAKLSLQELTWKMSVRDCAWLRRSPGVGCVPAAEHRLREEILAKFLHWLMSVYVVELLRSFFYVTETTFQKNRLFFYRKSVWSKLQSIGIRQHLKRVQLRELSEAEVRQHREARPALLTSRLRFIPKPDGLRPIVNMDYVVGARTFRREKRAERLTSRVKALFSVLNYERARRPGLLGASVLGLDDIHRAWRTFVLRVRAQDPPPELYFVKVDVTGAYDTIPQDRLTEVIASIIKPQNTYCVRRYAVVQKAAHGHVRKAFKSHVSTLTDLQPYMRQFVAHLQETSPLRDAVVIEQSSSLNEASSGLFDVFLRFMCHHAVRIRGKSYVQCQGIPQGSILSTLLCSLCYGDMENKLFAGIRRDGLLLRLVDDFLLVTPHLTHAKTFLRTLVRGVPEYGCVVNLRKTVVNFPVEDEALGGTAFVQMPAHGLFPWCGLLLDTRTLEVQSDYSSYARTSIRASLTFNRGFKAGRNMRRKLFGVLRLKCHSLFLDLQVNSLQTVCTNIYKILLLQAYRFHACVLQLPFHQQVWKNPTFFLRVISDTASLCYSILKAKNAGMSLGAKGAAGPLPSEAVQWLCHQAFLLKLTRHRVTYVPLLGSLRTAQTQLSRKLPGTTLTALEAAANPALPSDFKTILD

SEQ ID NO: 259451 - DNA, 3399 bp, Artificial Sequence
  derived and/or modified sequence
atgcccagagcccccagatgcagagccgtgagaagcctgctgagaagccactacagagaggtgctgcccctggccaccttcgtgagaagactgggcccccagggctggagactggtgcagagaggcgaccccgccgccttcagagccctggtggcccagtgcctggtgtgcgtgccctgggacgccagacccccccccgccgcccccagcttcagacaggtgagctgcctgaaggagctggtggccagagtgctgcagagactgtgcgagagaggcgccaagaacgtgctggccttcggcttcgccctgctggacggcgccagaggcggcccccccgaggccttcaccaccagcgtgagaagctacctgcccaacaccgtgaccgacgccctgagaggcagcggcgcctggggcctgctgctgagaagagtgggcgacgacgtgctggtgcacctgctggccagatgcgccctgttcgtgctggtggcccccagctgcgcctaccaggtgtgcggcccccccctgtaccagctgggcgccgccacccaggccagaccccccccccacgccagcggccccagaagaagactgggctgcgagagagcctggaaccacagcgtgagagaggccggcgtgcccctgggcctgcccgcccccggcgccagaagaagaggcggcagcgccagcagaagcctgcccctgcccaagagacccagaagaggcgccgcccccgagcccgagagaacccccgtgggccagggcagctgggcccaccccggcagaaccagaggccccagcgacagaggcttctgcgtggtgagccccgccagacccgccgaggaggccaccagcctggagggcgccctgagcggcaccagacacagccaccccagcgtgggcagacagcaccacgccggcccccccagcaccagcagaccccccagaccctgggacaccccctgcccccccgtgtacgccgagaccaagcacttcctgtacagcagcggcgacaaggagcagctgagacccagcttcctgctgagcagcctgagacccagcctgaccggcgccagaagactggtggagaccatcttcctgggcagcagaccctggatgcccggcacccccagaagactgcccagactgccccagagatactggcagatgagacccctgttcctggagctgctgggcaaccacgcccagtgcccctacggcgtgctgctgaagacccactgccccctgagagccgccgtgacccccgccgccggcgtgtgcgccagagagaagccccagggcagcgtggccgcccccgaggaggaggacaccgaccccagaagactggtgcagctgctgagacagcacagcagcccctggcaggtgtacggcttcgtgagagcctgcctgagaagactggtgccccccggcctgtggggcagcagacacaacgagagaagattcctgagaaacaccaagaagttcatcagcctgggcaagcacgccaagctgagcctgcaggagctgacctggaagatgagcgtgagagactgcgcctggctgagaagaagccccggcgtgggctgcgtgcccgccgccgagcacagactgagagaggagatcctggccaagttcctgcactggctgatgagcgtgtacgtggtggagctgctgagaagcttcttctacgtgaccgagaccaccttccagaagaacagactgttcttctacagaaagagcgtgtggagcaagctgcagagcatcggcatcagacagcacctgaagagagtgcagctgagagagctgagcgaggccgaggtgagacagcacagagaggccagacccgccctgctgaccagcagactgagattcatccccaagcccgacggcctgagacccatcgtgaacatggactacgtggtgggcgccagaaccttcagaagagagaagagagccgagagactgaccagcagagtgaaggccctgttcagcgtgctgaactacgagagagccagaagacccggcctgctgggcgccagcgtgctgggcctggacgacatccacagagcctggagaaccttcgtgctgagagtgagagcccaggaccccccccccgagctgtacttcgtgaaggtggacgtgaccggcgcctacgacaccatcccccaggacagactgaccgaggtgatcgccagcatcatcaagccccagaacacctactgcgtgagaagatacgccgtggtgcagaaggccgcccacggccacgtgagaaaggccttcaagagccacgtgagcaccctgaccgacctgcagccctacatgagacagttcgtggcccacctgcaggagaccagccccctgagagacgccgtggtgatcgagcagagcagcagcctgaacgaggccagcagcggcctgttcgacgtgttcctgagattcatgtgccaccacgccgtgagaatcagaggcaagagctacgtgcagtgccagggcatcccccagggcagcatcctgagcaccctgctgtgcagcctgtgctacggcgacatggagaacaagctgttcgccggcatcagaagagacggcctgctgctgagactggtggacgacttcctgctggtgaccccccacctgacccacgccaagaccttcctgagaaccctggtgagaggcgtgcccgagtacggctgcgtggtgaacctgagaaagaccgtggtgaacttccccgtggaggacgaggccctgggcggcaccgccttcgtgcagatgcccgcccacggcctgttcccctggtgcggcctgctgctggacaccagaaccctggaggtgcagagcgactacagcagctacgccagaaccagcatcagagccagcctgaccttcaacagaggcttcaaggccggcagaaacatgagaagaaagctgttcggcgtgctgagactgaagtgccacagcctgttcctggacctgcaggtgaacagcctgcagaccgtgtgcaccaacatctacaagatcctgctgctgcaggcctacagattccacgcctgcgtgctgcagctgcccttccaccagcaggtgtggaagaaccccaccttcttcctgagagtgatcagcgacaccgccagcctgtgctacagcatcctgaaggccaagaacgccggcatgagcctgggcgccaagggcgccgccggccccctgcccagcgaggccgtgcagtggctgtgccaccaggccttcctgctgaagctgaccagacacagagtgacctacgtgcccctgctgggcagcctgagaaccgcccagacccagctgagcagaaagctgcccggcaccaccctgaccgccctggaggccgccgccaaccccgccctgcccagcgacttcaagaccatcctggactag

SEQ ID NO: 259452 - DNA, 3399 bp, Artificial Sequence
  derived and/or modified sequence
atgcctcgcgcgcccaggtgtcgggcggtccgatccctcctgagatctcactatcgggaagtgctccctctagctacctttgtccgcagactgggtccgcagggatggcgccttgtacagaggggagatcctgctgcttttcgtgcacttgtcgcccagtgccttgtctgtgttccctgggatgcccgcccccctcctgccgccccatcctttcgacaggtttcttgtctgaaagaattggtcgccagggtcttacaacgcttgtgcgaaagaggcgccaaaaatgtcttagcttttggatttgctctgttggacggggcaaggggcggtccccccgaggctttcaccaccagcgtgaggtcataccttcccaacaccgtcaccgatgccctgcgggggtcgggcgcctggggcctgcttctgagacgggtgggtgacgacgtcctggtgcaccttctggcacgatgtgcactcttcgttttggtggctccatcctgtgcctaccaagtctgcggaccacccctgtaccagctgggcgctgctacacaagcccgcccaccccctcatgcatccggaccacgacgacggctaggatgtgagagagcctggaatcattccgtcagagaggctggcgttccactagggttacccgccccaggtgctagaagacgaggcggcagcgcctctcgctctctccctttgccaaagcgccctcgcaggggagctgccccagaaccggaaaggacccccgtcggccagggctcttgggcccatcccgggagaacacgagggcctagtgataggggcttctgtgtggtttcaccagcacggcccgctgaagaagccacatcacttgagggggctcttagcggcacccggcactcccatccttccgttggcaggcagcaccatgcagggcctccttctacctctcgcccccccagaccttgggatacaccttgcccccctgtgtatgctgaaacgaagcactttctttattcctcaggggacaaagagcagctgaggccgtcattcctattgagctctctcagaccttcattgacaggagctcgacgtctggttgaaactatcttccttgggagtaggccttggatgccaggaacgccacgccgcttgccgcggctccctcagaggtattggcagatgcgacctctgtttctggagctgcttggcaaccacgcgcaatgtccttatggtgttctactgaaaacccattgtcctctgcgggccgccgtgacacctgcggccggagtgtgcgcacgcgaaaagccccaaggaagcgttgcagctccggaagaggaagataccgatccacgaagattagtgcaattgctgagacagcactcctctccatggcaagtgtacggctttgtccgggcctgtctacgcagacttgtgccaccaggcctttggggctcccgccataacgaacggcgctttttaagaaataccaagaagttcatatctctgggcaagcacgccaagctctccctgcaggaacttacctggaagatgtcggttagggattgtgcctggcttagacgatcccctggtgttgggtgcgtccccgctgctgaacaccggctgcgagaagagattctggccaaattcctccattggctaatgagcgtctacgtggtggaacttctgcggtcttttttttacgtcaccgaaaccaccttccagaaaaacagactcttcttttacagaaaaagcgtatggtctaagctgcagtctatcggcattcggcagcatttaaagcgcgtgcagttgcgagaactgtctgaggcggaagtgcgacagcatcgagaggctcggcccgcactcctcaccagtaggttgcgattcatcccgaagcccgacggtctgcggccaatagtgaacatggactacgtggtgggggccaggacttttagaagggagaagagggctgaacgacttacctcgagagtgaaagccttattctcagtgctgaactacgagagagctagaaggcctggcctgttgggcgcctccgtactgggacttgatgatatccatcgggcttggcgaacttttgtgcttagagtcagagcccaggatcctccgccagagctgtacttcgtcaaggtcgacgtcaccggcgcctacgacacaatcccccaggaccgccttacagaggtgattgcctctatcataaagccgcagaatacttactgtgttcggagatatgccgtcgtgcagaaagccgcccacggacatgtgcgcaaagccttcaagtcccacgtgtccacacttacagatctgcaaccctacatgaggcagttcgtggcacatctccaggagactagcccattacgcgatgccgtcgtaatagaacagagctcgagtctgaatgaggcctccagcggactgtttgatgtgttcctgcgcttcatgtgccatcatgctgtgcggatccggggtaaatcatatgttcagtgccaaggaatccctcagggctcaatcctgtctactctgttgtgctccctgtgttatggcgacatggagaataagctctttgctggtattcgtagagacggtcttctgttaagactcgtggacgattttctgctggttacccctcatctcacgcatgctaagactttccttagaaccttggtccgcggggtgcccgagtacggatgcgtggtgaacctgcgaaagacagtggtaaatttccctgtcgaggacgaggctctagggggcacagcgtttgtgcagatgcccgctcatgggctattcccctggtgcgggttactccttgataccaggaccttagaagttcagtccgattacagctcatatgctaggacttccattagggcgtctctgacttttaatcgtggcttcaaagcaggaaggaacatgcgcaggaagctgttcggtgttttgcgactgaaatgtcactctttatttctcgacctgcaagttaatagcctccagaccgtgtgtaccaatatctataaaatcctgctactgcaggcttatagatttcatgcctgcgtgctgcaactgccttttcaccaacaagtctggaaaaatccaaccttcttcctccgcgtcatatctgataccgcgtccctgtgttattcaatcttgaaggctaaaaatgccgggatgagcctcggggccaagggggccgcaggtcccctcccgtcagaggctgtgcagtggttgtgtcaccaagcgtttcttctgaaattgacccggcacagagtcacctatgtccccctgttgggttcactgcgcaccgcccagacacagttatctcggaagctgcctgggaccaccctaaccgcgctggaagcagccgctaaccccgctttgccgtccgacttcaaaactatactggattag

SEQ ID NO: 259453 - DNA, 3399 bp, Artificial Sequence
  derived and/or modified sequence
atgccccgggccccccgctgcagagctgtgcgcagcctgctgcggagccactaccgggaggtgctgcccctggccacctttgtgcggcggctgggcccccagggctggaggctggtgcagagaggagaccctgctgccttccgggccctggtggcccagtgcctggtgtgtgtgccctgggatgcccggcccccacctgctgcccccagcttccggcaggtgtcctgcctgaaggagctggtggcccgggtgctgcagaggctgtgtgagcggggggccaagaatgtgctggcctttggatttgccctgctggatggagcccggggcggccccccagaggccttcaccacctctgtgcgcagctacctgcccaacacagtgacagatgccctgcggggcagcggggcctggggcctgctgctgcggcgggtgggagatgatgtgctggtgcacctgctggcccgctgtgccctgtttgtgctggtggcccccagctgtgcctaccaggtgtgtggcccccccctgtaccagctgggcgccgccacccaggcccggcccccacctcatgccagcggcccccggcggcggctgggctgtgagcgggcctggaaccacagcgtgcgggaggccggcgtgcccctgggcctgcctgcccctggggccaggagaagaggaggcagcgccagccgcagcctgcccctgcccaagaggcccaggagaggagctgcccctgagcctgagaggacccctgtgggccagggctcctgggcccaccctggccgcacccggggccccagcgaccggggcttctgtgtggtgtccccagcccggcctgctgaggaggccaccagcctggagggcgccctgagcggcaccaggcacagccaccccagcgtgggccggcagcaccacgccggcccccccagcaccagcaggcctccccggccctgggacaccccctgcccccctgtgtatgcagagaccaagcacttcctgtacagcagcggggacaaggagcagctgcggcccagcttcctgctgagcagcctgcggcccagcctgactggagcccggcggctggtggagaccatcttcctgggcagccggccctggatgcctggcaccccccggcggctgccccggctgccccagcgctactggcagatgaggcccctcttcctggagctgctgggcaaccacgcccagtgcccctatggagtgctgctgaagacccactgccccctgcgggctgctgtgaccccagctgctggggtgtgtgcccgggagaagccccagggctctgtggccgcccctgaggaggaggacacagacccccggcggctggtgcagctgctgcggcagcacagcagcccctggcaggtgtatggctttgtgcgggcctgcctgcggcggctggtgcccccaggcctgtggggcagccgccacaatgaaagacgcttcctgaggaacaccaagaagttcatcagcctgggcaagcacgccaagctgagcctgcaggagctgacctggaagatgtctgtgcgggactgtgcctggctgcggcgcagccctggggtgggctgtgtgcctgctgctgagcaccggctgcgggaggagatcctggccaagttcctgcactggctgatgtctgtgtatgtggtggagctgctgcgctccttcttctacgtgacagagaccaccttccagaagaacagactcttcttctacaggaagtctgtgtggagcaagctgcagagcatcggcatccggcagcacctgaagagggtgcagctgcgggagctgtctgaggccgaggtgcggcagcaccgggaggcccggcctgccctgctgaccagccggctgcgcttcatccccaagccagatggcctgcggcccatcgtgaacatggactatgtggtgggcgcccggaccttccggcgggagaagagagctgagcggctgaccagccgggtgaaggccctcttctctgtgctgaactatgagcgggcccggcggcccggcctgctgggcgcctctgtgctgggcctggatgacatccaccgggcctggaggacctttgtgctgcgggtgcgggcccaggaccccccacctgagctgtactttgtgaaggtggatgtgactggagcctatgacaccatcccccaggaccggctgacagaggtgattgccagcatcatcaagccccagaacacctactgtgtgcggcgctatgctgtggtgcagaaggccgcccacggccacgtgaggaaggccttcaagagccacgtgtccaccctgacagacctgcagccctacatgaggcagtttgtggcccacctgcaggagaccagccccctgagagatgctgtggtgattgagcagagcagcagcctgaatgaggccagcagcggcctgtttgatgtgttcctgcgcttcatgtgccaccacgctgtgcgcatccggggcaagagctatgtgcagtgccagggcatcccccagggcagcatcctgagcaccctgctgtgcagcctgtgctacggggacatggagaacaagctgtttgctggcatcagaagagatggcctgctgctgcggctggtggatgacttcctgctggtgaccccccacctgacccacgccaagaccttcctgcggaccctggtgcggggcgtgcctgaatatggctgtgtggtgaacctgaggaagacagtggtgaacttccctgtggaggatgaggccctgggcggcacagcctttgtgcagatgcctgcccacggcctcttcccctggtgtggcctgctgctggacaccaggaccctggaggtgcagagcgactacagcagctatgcccggaccagcatccgggccagcctgaccttcaacagaggcttcaaggccggcaggaacatgaggaggaagctgtttggagtgctgcggctgaagtgccacagcctcttcctggacctgcaggtgaacagcctgcagacagtgtgcaccaacatctacaagatcctgctgctgcaggcctaccgcttccacgcctgtgtgctgcagctgcccttccaccagcaggtgtggaagaaccccaccttcttcctgcgggtcatcagtgacacagccagcctgtgctacagcatcctgaaggccaagaatgccggcatgagcctgggcgccaagggagctgctggccccctgcccagcgaggccgtgcagtggctgtgccaccaggccttcctgctgaagctgaccaggcaccgggtgacctacgtgcccctgctgggcagcctgaggacagcccagacccagctgagcaggaagctgcccggcaccaccctgacagccctggaggccgccgccaacccagccctgcccagcgacttcaagaccatcctggactag

SEQ ID NO: 259454 - DNA, 3399 bp, Artificial Sequence
  derived and/or modified sequence
atgccccgggccccccggtgccgggccgtgcggagcctgctgcggagccattaccgagaggtgcttcctctggcaacattcgtcaggaggctgggtccacaggggtggcggttggtgcagcgaggggatcccgccgcatttagggcgctggtcgcccagtgcctagtctgtgtgccgtgggacgccaggccacctccagcggccccctctttccgccaggttagttgtctgaaagagctcgtggcgagggtgcttcagagactttgtgagcggggcgcgaagaatgttttggcattcgggtttgccctcttagatggagcacgcgggggcccacctgaggcttttacaacttccgtgcgctcgtacttaccaaacactgttaccgatgctttacggggaagcggggcatgggggctactactaagaagagtgggggatgacgtgctagtgcatcttctggccaggtgcgccctattcgtgcttgtcgcaccttcatgcgcttaccaggtgtgcggaccacctctgtaccagctgggcgccgctactcaggctaggccccccccacacgcatcgggtccgaggcgcagattgggatgcgagagggcctggaatcatagcgtgagggaggctggggtcccactgggcctccccgcccctggcgcgagacgcagaggtgggtccgcatccaggagcctgcccttacccaaacggcctcgcagaggtgctgctcccgaacccgaacgcaccccagtggggcaaggatcctgggcacatccgggcagaactcgcggaccgtccgaccggggcttctgcgtggtctctcccgcacggcccgctgaggaagccacatctctagaaggggctctcagtggaactagacacagccatcctagtgtcggccggcagcaccacgcgggccccccctctactagtagacctccaagaccatgggacactccttgcccgcccgtgtacgcagaaactaagcatttcttatacagctccggcgacaaagaacagttgcggccgagcttcctgttatcctcactccgtccctcgctgacgggcgctcggagactagtcgaaacaatttttctgggcagccgaccctggatgccaggcactcccaggcgcttgccaagattacctcagcggtactggcaaatgagacccctgtttttggaattgttagggaatcatgctcagtgcccatatggcgtcctcctgaagacacactgtcctctccgtgccgctgtcacccctgccgctggcgtctgcgccagggaaaaacctcagggcagcgtggctgctcccgaggaggaggatacagacccccgtcgcctggtgcagcttctgcgtcaacactcttcgccctggcaagtctatggctttgtgcgcgcatgcttgaggcggttggttccccccggtttatgggggtcccggcacaatgaacggaggttcctaaggaatacaaaaaagttcatttcactggggaagcacgccaagctctcgctgcaggaactcacttggaaaatgtcagtaagggactgtgcatggcttagaagatcccctggtgttggatgcgtgcccgccgccgagcatcggctccgagaggaaatcttggccaagttccttcactggctgatgtccgtgtatgtagtggagcttctgcgcagtttcttttacgtgactgagaccactttccagaagaacaggctgtttttctaccgtaaatctgtctggagcaaactgcaaagcataggcattagacaacacctgaaacgagtgcagttgagggaactgtctgaggccgaggttcgacagcaccgggaggcccgtcccgctttattgacatcacgcctgcgattcatacccaaacctgacggccttaggcccatcgtcaatatggactacgtcgtgggtgccagaacctttaggcgggaaaagcgcgccgagagattaaccagcagggttaaagccctgtttagcgtgcttaactacgaacgggctcggagacctggcctgctcggggctagtgttcttggtctggacgacattcaccgggcctggagaacatttgttcttagggtaagggcccaggatcccccacccgagctgtacttcgtgaaggtagatgtgaccggtgcctacgacacaatcccgcaggataggcttaccgaggtgattgccagcatcataaagcctcagaacacatattgtgtgagaaggtacgcagtcgtgcagaaagctgcccacggtcacgtgagaaaagccttcaaatctcatgtcagcactctcacagacttgcagccatacatgcgacagttcgtggcccacctccaggaaacatccccactcagagatgctgtggtgattgaacagtcctcatcactcaacgaagcgtcgtccgggctctttgatgtctttctgcgatttatgtgccatcatgctgtgcgaatcagagggaagtcttacgtgcagtgtcagggcatcccccagggttctatactgagtacactgctgtgtagcctgtgttacggcgacatggagaacaagttattcgcaggcatccgccgggacggcctactcctcaggctagtggacgactttctgttggtaaccccccacttgacccacgctaaaaccttcctacgcacgctagttcgaggggtccctgagtacgggtgtgtggtgaatctgaggaaaaccgtggtcaatttccccgtggaagacgaagcactcgggggtacagcctttgtccagatgccagcccatggactattcccctggtgtggtttattgcttgacactcgaactctggaagtgcaatccgactatagcagctacgctagaacctctatccgcgccagtctgacctttaatcgaggtttcaaggcggggcgcaatatgaggcgcaagctgttcggagtgttgagacttaagtgtcattccttgtttttggaccttcaagtaaattcgctccagaccgtgtgcactaatatctataagattctacttctgcaggcttaccgcttccatgcgtgcgtcctgcagctgcccttccaccagcaggtgtggaagaaccccacattctttctgcgcgtcatctccgacaccgctagcctgtgctattcaatactgaaagccaaaaacgcaggaatgtccctaggagcaaagggggcggcaggcccactgccatctgaggccgtccagtggctttgtcaccaggctttcctgctcaagctgacacggcatagagtcacgtacgtacctttgctgggcagcctcagaactgcccagacccagctctcacgcaagctccctgggaccactctgactgctctcgaagccgcggccaaccccgccctaccgtctgatttcaagacgatcctcgattag

SEQ ID NO: 259455 - DNA, 3399 bp, Artificial Sequence
  derived and/or modified sequence
atgcccagggcgccaaggtgcagggccgttaggtctctcttgcgttctcattatcgggaggtcctgccccttgccactttcgtgcgccgactcggccctcaaggatggaggctggtccaacgcggagatccggcagcgtttcgggctcttgtggcccagtgcttagtttgcgtgccctgggacgcgcgtcctcccccagcagccccatctttcagacaggtcagttgtctgaaagaattggtggctagggttctgcagcgcctgtgtgagagaggagctaagaatgtgctggcttttgggttcgccttgttggatggggcaaggggaggtcctccagaggctttcactacgtctgtgagatcttaccttcccaacactgtcaccgatgcactgaggggaagtggcgcatgggggctactgttgcgtcgggtcggtgacgacgtgctcgttcatctgctggctcgctgtgctctctttgtgctggtagccccaagttgcgcttaccaggtgtgcggccctcctctgtatcagctcggcgcagcaacccaggccaggccccctcctcatgcgtctggccctcgcagaaggctgggatgtgaacgcgcatggaaccactcggtcagggaggctggagtgcctctggggttacccgctcctggagctagacgtcgtggcggaagtgcttccagatcccttcccctccccaagcggccaaggaggggcgcagctcccgagccagagcgtacccccgtcgggcaagggagctgggcccacccaggtagaaccagagggccttcagacaggggcttttgtgtggtatcaccagcccgtcctgctgaggaggccacctcactagagggcgcattgtctgggacccgtcattcacacccttcagtagggagacaacaccatgccggaccaccctcaaccagcaggccacccagaccttgggataccccatgtcctccagtatacgccgagacaaagcatttcttatattccagtggcgacaaggaacagttaagaccgtcatttctcctcagtagtctgcgaccctctcttactggcgcacgccgactggtcgagaccatattcctgggcagcaggccatggatgccagggacccctaggaggctacccagactgccccagcgatactggcagatgcgtcctctcttcttggagctgttgggcaaccacgctcaatgcccctacggtgtgctcctcaaaactcactgccctctgagagcagccgtcacacccgctgccggagtctgcgcaagggagaaaccccagggctccgtcgcagcccctgaggaagaagacacagaccccaggcgcctcgtccaactcctgcgtcagcacagctcaccatggcaggtctacggtttcgtgcgcgcttgtctgagaaggctggtgccacctggactttggggaagtcgacacaacgagcgtcgttttctgcgaaacacgaagaagttcatttcattggggaaacatgctaaactgagtctgcaggagttaacgtggaagatgagtgtgagagattgcgcctggttgcgcaggtctcccggagtaggttgtgtgccagcagcagagcataggctccgtgaggagatcctcgccaaatttctccattggttaatgagtgtgtacgtggttgagcttttgcgctcttttttctatgtgacagaaacaactttccagaagaatcgattgttcttttaccgcaaatcagtctggagcaaactacagtccattggaattagacagcacttgaaaagagtgcagttacgggaactgtctgaagccgaagtacgccagcacagggaggcacggccagccttgctaacatcgcgcttaaggttcatcccaaagcctgatgggctgcggcctatcgttaatatggattatgtggtcggtgctaggaccttccgcagggagaagagggcggagcgcctgacaagccgcgttaaggcactgttttccgtgctgaactatgagcgtgctcgaagacctggtctgctgggcgcatccgtactcggcttggacgatatccatcgagcctggcggacctttgtgctcagagtcagagcacaggacccgcctcccgaactctacttcgtgaaggtcgatgtgaccggggcttatgataccattccccaggaccgcctgactgaggtcatcgcttccatcatcaaaccgcaaaatacttattgtgtcagacgatacgccgttgtgcagaaggccgcacatggccacgtgcgcaaggcattcaaatcccatgtgtcaactcttaccgacctgcagccctatatgagacaatttgtcgcgcacctgcaggagacttcgccactgcgtgatgcagtcgtgatcgaacaatcttcatccctaaacgaggcctctagcggtttatttgatgtgtttctgaggttcatgtgtcatcacgcagtgcgcatcagagggaagagctatgttcagtgccagggtattcctcaggggtccatcctctcaacattgctgtgtagcctctgttatggcgatatggaaaacaagttatttgctgggattaggagggacgggcttctcctccgcctggtggacgactttcttctcgttacgccacatcttactcatgccaaaacctttctccgcactttggtgcgcggagtgcctgagtatggttgtgtggttaatctgcggaaaacagtggtgaattttcccgttgaagacgaagcccttggcggaactgctttcgtccagatgcccgctcacggattgttcccttggtgcggtctcttgttggacacacggaccttagaggttcaatccgactacagtagttatgctcggacctctatccgcgcttcgcttactttcaatcgcggtttcaaggccggtcggaacatgcgcaggaaactctttggagtcctgcgcctcaagtgtcattcactcttcctggaccttcaggtcaattcacttcagacagtttgcaccaatatttacaagatcctcctcttgcaagcctatcgtttccacgcttgtgtcctgcaactcccattccatcagcaggtgtggaaaaatcccacatttttcctccgggttattagcgatacggcctccttgtgctatagcatcctgaaagcaaagaacgccggaatgtcactgggggctaaaggagcagcaggacccttgccgtccgaggcagttcagtggctatgccatcaagctttcctgctgaagttgacccgccacagagtgacgtatgttcctctgctgggttcactccggaccgcgcagacacagttgtctaggaaactgccgggtacaaccctcactgcactggaagcggctgccaatcctgctctaccatccgacttcaaaacaattctggattag

SEQ ID NO: 259456 - DNA, 4018 bp, Artificial Sequence
  derived and/or modified sequence
caggcagcgctgcgtcctgctgcgcacgtgggaagccctggccccggccacccccgcgatgccgcgcgctccccgctgccgagccgtgcgctccctgctgcgcagccactaccgcgaggtgctgccgctggccacgttcgtgcggcgcctggggccccagggctggcggctggtgcagcgcggggacccggcggctttccgcgcgctggtggcccagtgcctggtgtgcgtgccctgggacgcacggccgccccccgccgccccctccttccgccaggtgtcctgcctgaaggagctggtggcccgagtgctgcagaggctgtgcgagcgcggcgcgaagaacgtgctggccttcggcttcgcgctgctggacggggcccgcgggggcccccccgaggccttcaccaccagcgtgcgcagctacctgcccaacacggtgaccgacgcactgcgggggagcggggcgtgggggctgctgctgcgccgcgtgggcgacgacgtgctggttcacctgctggcacgctgcgcgctctttgtgctggtggctcccagctgcgcctaccaggtgtgcgggccgccgctgtaccagctcggcgctgccactcaggcccggcccccgccacacgctagtggaccccgaaggcgtctgggatgcgaacgggcctggaaccatagcgtcagggaggccggggtccccctgggcctgccagccccgggtgcgaggaggcgcgggggcagtgccagccgaagtctgccgttgcccaagaggcccaggcgtggcgctgcccctgagccggagcggacgcccgttgggcaggggtcctgggcccacccgggcaggacgcgtggaccgagtgaccgtggtttctgtgtggtgtcacctgccagacccgccgaagaagccacctctttggagggtgcgctctctggcacgcgccactcccacccatccgtgggccgccagcaccacgcgggccccccatccacatcgcggccaccacgtccctgggacacgccttgtcccccggtgtacgccgagaccaagcacttcctctactcctcaggcgacaaggagcagctgcggccctccttcctactcagctctctgaggcccagcctgactggcgctcggaggctcgtggagaccatctttctgggttccaggccctggatgccagggactccccgcaggttgccccgcctgccccagcgctactggcaaatgcggcccctgtttctggagctgcttgggaaccacgcgcagtgcccctacggggtgctcctcaagacgcactgcccgctgcgagctgcggtcaccccagcagccggtgtctgtgcccgggagaagccccagggctctgtggcggcccccgaggaggaggacacagacccccgtcgcctggtgcagctgctccgccagcacagcagcccctggcaggtgtacggcttcgtgcgggcctgcctgcgccggctggtgcccccaggcctctggggctccaggcacaacgaacgccgcttcctcaggaacaccaagaagttcatctccctggggaagcatgccaagctctcgctgcaggagctgacgtggaagatgagcgtgcgggactgcgcttggctgcgcaggagcccaggggttggctgtgttccggccgcagagcaccgtctgcgtgaggagatcctggccaagttcctgcactggctgatgagtgtgtacgtcgtcgagctgctcaggtctttcttttatgtcacggagaccacgtttcaaaagaacaggctctttttctaccggaagagtgtctggagcaagttgcaaagcattggaatcagacagcacttgaagagggtgcagctgcgggagctgtcggaagcagaggtcaggcagcatcgggaagccaggcccgccctgctgacgtccagactccgcttcatccccaagcctgacgggctgcggccgattgtgaacatggactacgtcgtgggagccagaacgttccgcagagaaaagagggccgagcgtctcacctcgagggtgaaggcactgttcagcgtgctcaactacgagcgggcgcggcgccccggcctcctgggcgcctctgtgctgggcctggacgatatccacagggcctggcgcaccttcgtgctgcgtgtgcgggcccaggacccgccgcctgagctgtactttgtcaaggtggatgtgacgggcgcgtacgacaccatcccccaggacaggctcacggaggtcatcgccagcatcatcaaaccccagaacacgtactgcgtgcgtcggtatgccgtggtccagaaggccgcccatgggcacgtccgcaaggccttcaagagccacgtctctaccttgacagacctccagccgtacatgcgacagttcgtggctcacctgcaggagaccagcccgctgagggatgccgtcgtcatcgagcagagctcctccctgaatgaggccagcagtggcctcttcgacgtcttcctacgcttcatgtgccaccacgccgtgcgcatcaggggcaagtcctacgtccagtgccaggggatcccgcagggctccatcctctccacgctgctctgcagcctgtgctacggcgacatggagaacaagctgtttgcggggattcggcgggacgggctgctcctgcgtttggtggatgatttcttgttggtgacacctcacctcacccacgcgaaaaccttcctcaggaccctggtccgaggtgtccctgagtatggctgcgtggtgaacttgcggaagacagtggtgaacttccctgtagaagacgaggccctgggtggcacggcttttgttcagatgccggcccacggcctattcccctggtgcggcctgctgctggatacccggaccctggaggtgcagagcgactactccagctatgcccggacctccatcagagccagtctcaccttcaaccgcggcttcaaggctgggaggaacatgcgtcgcaaactctttggggtcttgcggctgaagtgtcacagcctgtttctggatttgcaggtgaacagcctccagacggtgtgcaccaacatctacaagatcctcctgctgcaggcgtacaggtttcacgcatgtgtgctgcagctcccatttcatcagcaagtttggaagaaccccacatttttcctgcgcgtcatctctgacacggcctccctctgctactccatcctgaaagccaagaacgcagggatgtcgctgggggccaagggcgccgccggccctctgccctccgaggccgtgcagtggctgtgccaccaagcattcctgctcaagctgactcgacaccgtgtcacctacgtgccactcctggggtcactcaggacagcccagacgcagctgagtcggaagctcccggggacgacgctgactgccctggaggccgcagccaacccggcactgccctcagacttcaagaccatcctggactgatggccacccgcccacagccaggccgagagcagacaccagcagccctgtcacgccgggctctacgtcccagggagggaggggcggcccacacccaggcccgcaccgctgggagtctgaggcctgagtgagtgtttggccgaggcctgcatgtccggctgaaggctgagtgtccggctgaggcctgagcgagtgtccagccaagggctgagtgtccagcacacctgccgtcttcacttccccacaggctggcgctcggctccaccccagggccagcttttcctcaccaggagcccggcttccactccccacataggaatagtccatccccagattcgccattgttcacccctcgccctgccctcctttgccttccacccccaccatccaggtggagaccctgagaaggaccctgggagctctgggaatttggagtgaccaaaggtgtgccctgtacacaggcgaggaccctgcacctggatgggggtccctgtgggtcaaattggggggaggtgctgtgggagtaaaatactgaatatatgagtttttcagttttgaaaaaaa

SEQ ID NO: 259457 - protein, 133 aa, Artificial Sequence
  derived and/or modified sequence
MSQQRPARKLPSLLLDPTEETVRRRCRDPINVEGLLPSKIRINLEDNVQYVSMRKALKVKRPRFDVSLVYLTRKFMDLVRSAPGGILDLNKVATKLGVRKRRVYDITNVLDGIDLVEKKSKNHIRWMTLSQCT

SEQ ID NO: 259458 - protein, 281 aa, Artificial Sequence
  derived and/or modified sequence
MSQQRPARKLPSLLLDPTEETVRRRCRDPINVEGLLPSKIRINLEDNVQYVSMRKALKVKRPRFDVSLVYLTRKFMDLVRSAPGGILDLNKVATKLGVRKRRVYDITNVLDGIDLVEKKSKNHIRWIGSDLSNFGAVPQQKKLQEELSDLSAMEDALDELIKDCAQQLFELTDDKENERLAYVTYQDIHSIQAFHEQIVIAVKAPAETRLDVPAPREDSITVHIRSTNGPIDVYLCEVEQGQTSNKRSEGVGTSSSESTHPEGPEEEENPQQSEELLEVSN

SEQ ID NO: 259459 - DNA, 846 bp, Artificial Sequence
  derived and/or modified sequence
atgagccagcagcggcctgccagaaagctgccatcattgttgctcgaccccactgaggagactgtccgccgccggtgtcgtgatcctatcaacgtagaaggactgctcccgagcaagattcggatcaacttagaagataacgttcagtatgtgtccatgcgcaaggcactgaaagttaaacgcccgcggtttgacgtctctctggtgtacctcacgcgtaaattcatggatctggtgcgctctgcaccgggtggcatccttgacttgaacaaagtggcaaccaagctgggtgtccggaagcggagggtctatgacatcacaaacgttctcgacggtattgacctggtggagaagaagtctaagaaccatattagatggattggatccgacctgtccaacttcggcgcagtccctcagcagaaaaaattacaagaagagttgtctgaccttagcgcaatggaggacgcgctggacgaactgattaaggattgtgcccagcagctgtttgagctgacagacgataaagaaaatgaacgactagcctacgttacttaccaagatattcattctatccaagcattccacgaacagatagtcatcgccgtaaaagcgccagctgaaactcggctggacgtgcctgccccgagagaagatagcatcacggttcatatccgcagcaccaacggacctattgatgtgtatctgtgtgaggtcgagcaggggcagactagtaacaaacgctcagagggcgtgggaacgagctctagcgagagcactcaccctgagggacccgaagaagaggaaaacccacagcagtcagaagagttgctggaagtgtcgaattag

SEQ ID NO: 259460 - DNA, 846 bp, Artificial Sequence
  derived and/or modified sequence
atgagccagcagaggcctgccaggaagctgcccagcctgctgctggaccccacagaggagaccgtgagaagacgctgccgggaccccatcaacgtggagggcctgctgcccagcaagatccgcatcaacctggaggacaacgtgcagtatgtgtccatgaggaaggccctgaaggtgaagaggcccaggtttgatgtgtccctggtgtacctgaccaggaagttcatggacctggtgcgcagcgcccctgggggcatcctggacctgaacaaggtggccaccaagctgggcgtgaggaagagaagagtgtatgacatcaccaacgtgctggatggcatcgacctggtggagaagaagagcaagaaccacatccgctggattggaagtgacctgagcaactttggagctgtgccccagcagaagaagctgcaggaggagctgagtgacctgagcgccatggaggatgccctggatgagctgatcaaggactgtgcccagcagctgtttgagctgacagatgacaaggaaaatgaaaggctggcctacgtgacctaccaggacatccacagcatccaggccttccacgagcagatcgtgattgctgtgaaggccccagctgagacccggctggatgtgcctgcccccagagaagattccatcaccgtgcacatccgcagcaccaacggccccattgatgtgtacctgtgtgaggtggagcagggccagaccagcaacaagaggtctgagggcgtgggcaccagcagcagcgagagcacccaccctgagggccctgaggaggaggagaacccccagcagagcgaggagctgctggaggtgagcaactag

SEQ ID NO: 259461 - DNA, 846 bp, Artificial Sequence
  derived and/or modified sequence
atgagccagcagcggcccgcccggaagctgcccagcctgctgctggacccaacagaggagaccgtccgtcgaaggtgtagggatcctatcaatgttgaggggctgctcccctctaaaatcaggatcaacctggaggacaacgttcaatacgtgtccatgagaaaggctctgaaagtcaaaagaccacgttttgacgtgtcactggtttatctcaccagaaagtttatggatcttgtgcggtccgcaccaggcgggatcctggacctaaacaaggtggcaacaaagctgggggtcagaaagaggagggtctatgacataactaacgtcctggacgggatcgacctggtggagaagaaatctaagaatcacattaggtggatcgggagcgacctatctaatttcggtgccgtcccccaacagaagaagctgcaggaggaactgtctgatcttagcgcaatggaagatgcccttgacgagctgattaaagactgcgctcagcagctcttcgaattgaccgacgataaggagaatgagaggctcgcgtatgtgacttaccaggacatccactcgatccaggcctttcacgaacagatcgttattgccgtgaaagcacctgccgagactcggctggacgtgcccgccccccgggaggactccattacagtgcatataagatccactaatggacctatcgatgtgtacctctgtgaggtcgaacagggccagacctctaacaagagaagcgagggagtaggcactagcagctcggaaagcacccaccctgaggggccggaagaggaggagaatcctcagcaatctgaagaactactggaagtatccaattag

SEQ ID NO: 259462 - DNA, 846 bp, Artificial Sequence
  derived and/or modified sequence
atgtctcagcaacgtcccgcaaggaaactgcccagcctgctgttagatccaaccgaagaaactgtgcgaaggagatgtcgcgatccgatcaacgtggaaggattgctcccctccaaaatccgcataaacctcgaagacaacgttcagtatgtttccatgcgcaaagccttaaaggtaaaacggcctcgatttgatgtgtcattggtatacttgactcgtaagttcatggacctggtccgatctgcacccggagggattcttgatctgaataaggtggctacaaagctcggagtacgtaagcggagagtctacgatattacaaacgtgctcgatggtatagacctggtggaaaaaaagtccaaaaaccacattagatggattgggtcggacctcagtaatttcggagcagtcccacagcagaaaaaactgcaggaagagctttcagacctgagtgcaatggaagatgccttggatgaacttatcaaggactgtgcccagcagctgtttgaactgactgatgacaaagaaaacgagcggcttgcctacgtgacttatcaggacattcacagtatccaggcattccatgaacagatcgtgatagctgtgaaggcaccagcagaaacaagactcgacgtgccagcaccgagagaggactcaattacagtgcatattcggagtactaatgggccaattgatgtctacctgtgtgaggtcgagcagggacaaacctcaaataaaaggagcgagggagtgggaacctcctcaagtgagtctacccatcccgagggccctgaagaagaggagaaccctcagcaatctgaagaactactcgaggtgtcaaattag

SEQ ID NO: 259463 - DNA, 3218 bp, Artificial Sequence
  derived and/or modified sequence
atgcgggaagatggcgggccgggcgacttgagatccgcgggtctccctcctctttttccgtctgcgtcgggagctcccgggcacgtgaggccgtgccgcgtttactggcgggcgggacggcctagccgggcggcgcctcggaggaagccgcggaccccttaggtgctgggcccttggaaatcggcgcgtggggggcggtgctcgagctgagcgcgagagggcgggagagctcgtggggtgcgaggggagcaggacgcccggccgggcagcatgagtcagcagcggccggcgaggaagttacccagtctcctcctggacccgacggaggagacggttcgccgtcggtgccgagaccccatcaacgtggagggcctgctgccatcaaaaataaggattaatttagaagataatgtacaatatgtgtccatgagaaaagctctaaaagtgaagagacctcgttttgatgtatcgctggtttatttaactcgaaaatttatggatcttgtcagatctgctcccgggggtattcttgacttaaacaaggttgcaacgaaactgggagtccgaaagcggagagtgtatgacatcaccaatgtcttagatggaatcgacctcgttgaaaagaaatccaagaaccatattagatggataggatctgatcttagcaattttggagcagttccccaacaaaagaagctacaggaggaactttctgacttatcagcaatggaagatgctttggatgagttaattaaggattgtgctcagcagctgtttgagttaacagatgacaaagaaaatgaaagactagcatatgtgacctatcaagacattcatagcattcaggccttccatgaacagatcgtcattgcagttaaagctccagcagaaaccagattggatgttccagctcccagagaagactctatcacagtgcacataaggagcaccaacggacctatcgatgtctatttgtgtgaagtggagcagggtcagaccagtaacaaaaggtctgaaggtgtcgggacctcttcatctgagagcactcatccagaaggccctgaggaagaagaaaatcctcagcaaagtgaagaattgcttgaagtaagcaactgatggcatttgagaatttatgtatcactgagttttttgggaatatcttcgtggagaattacgcatcaaatttgattctcagagcaataaattatccatgaagtgctctcgttctcagtagcggcatcatggccagtagtgtctttgaggagttcaccacttagattactgagtaattgtggtttccacatttgaaaacaactccttttataattattcactgctttttgtcagtgaaatagacatcttgcctcctgaagtagcttcatcacagagtgtcatgaagacagacagtcaggctgaaatggacagttctttgtggactctacccttcccttcaaggagtatgtcatatatcacaaaagaaattgccttacactggttcatgtttgcagttactgttgtacattgcatagatgtacacacgaatttaaatgtgatgtctttgtatatatctgtataatgttgagattacttacgaaatatgtctgagtgacacttttcacccttgtacagccaaaataatgtatatatggaaagtgacagacaaattctctaatctctttggtacctataacttattagaatcctctggatgagggttagaagagactttttccaaacttctacatgtagaagtatcataaatgtgctacacatttatgtttgtggatttaattaaagtattttaatatggttttcagtgctaaaattggagtcagatacttcttggttttaagctgtctacctaattgctgtctcccagcagactggtggcatgcccagtggctttgggggcaaggatagaaatgccatcaggaaatagctgaattcattgtgaaacatgaattcagtcatggtgataattggaaactcctttcaggtttttgcaagtagattttgtaatgtttgtgtatgcagccttgctgttgagtcagtccaaggggttttacttaggacaagttgtaccttgccctctctccagctctgctcccacattttcacatacctagctgtttctacctcattgggtaagtcatttaccactctgtgcctcagtttactctgtagtttaccattagactgtgagctccttgagggactttgtcataatcactgttacatcccagtgcctcacaccatgcctggcccttaagaagtgctcaataaatgtctgaacaaataagtgagtggagtgagtgaattgtaagatcagaataataatatttggtttgtctatcgtacaagattcctgtatcgtttgaatattgcttttaaagaaatatttgaagcgacttcaaattcagactgtgtttaaaaagatttaaaatcggaatccaaaatcaaagtattaaaaaataatgctgagtgtttaggattcacatacctctgagctctggtggcttttgccagtcctgtccctctgctgagcaccagcccttcctgcagcagtcctgccggtgtgtttctgtgcacctggggatgaagtgtgctcctcccccagcggttagcctcaatgcttttcctccctctgttttattatttgaaattagccaaagaaaagctgcagggggcactgctgatcatcactggactggtgggtcgtactgtttgacagaatagggaatacaggaggaggagcaagcctagggtaaaacttaggtttgggacatgcttgatgaaagcaagagttgagcaggttgttgtgtgtatgtaggtcaggtgctcagcggaaaagtctgagctgtgtagtacgtcaggcagatgtcagtttagatgcgatagtttaagccacaagagtaggagaggtcatctaaagagtacagcaggcctaagggcatctatatttaaggagaaatacagaagaagtctcctgagaaggaataatggggcgggtggggagggagaaggcagtgtcccaaaaaccaacaaaggttttaccaaaggtaataccatcatttctgagcagcagttccttaacttgtgaatgtggcaaatgttctcctttacaaattgttctgaaggtaaaatgagatcatgtaaacgaaaatcctttgtaaattacagatgtgtgttataaatgaagtatctctcgagtcactcca

SEQ ID NO: 259464 - DNA, 846 bp, Artificial Sequence
  derived and/or modified sequence
atgagccagcagagacccgccagaaagctgcccagcctgctgctggaccccaccgaggagaccgtgagaagaagatgcagagaccccatcaacgtggagggcctgctgcccagcaagatcagaatcaacctggaggacaacgtgcagtacgtgagcatgagaaaggccctgaaggtgaagagacccagattcgacgtgagcctggtgtacctgaccagaaagttcatggacctggtgagaagcgcccccggcggcatcctggacctgaacaaggtggccaccaagctgggcgtgagaaagagaagagtgtacgacatcaccaacgtgctggacggcatcgacctggtggagaagaagagcaagaaccacatcagatggatcggcagcgacctgagcaacttcggcgccgtgccccagcagaagaagctgcaggaggagctgagcgacctgagcgccatggaggacgccctggacgagctgatcaaggactgcgcccagcagctgttcgagctgaccgacgacaaggagaacgagagactggcctacgtgacctaccaggacatccacagcatccaggccttccacgagcagatcgtgatcgccgtgaaggcccccgccgagaccagactggacgtgcccgcccccagagaggacagcatcaccgtgcacatcagaagcaccaacggccccatcgacgtgtacctgtgcgaggtggagcagggccagaccagcaacaagagaagcgagggcgtgggcaccagcagcagcgagagcacccaccccgagggccccgaggaggaggagaacccccagcagagcgaggagctgctggaggtgagcaactag

SEQ ID NO: 259465 - protein, 242 aa, Artificial Sequence
  derived and/or modified sequence
MMPSPSDSSRSLTSRPSTRGLTHLRLHRPWLQALLTLGLVQVLLGILVVTFSMVASSVTTTESIKRSCPSWAGFSNLLFSVCGLTICAAIICTLSAIVCCIQIFSLDLVHTLAPERSVSGPLGPLGCTSPPPAPLLHTMLDLEEFVPPVPPPPYYPPEYTCSSETDAQSITYNGSMDSPVPLYPTDCPPSYEAVMGLRGGKQILVPLRMRVALSDLQGHYGQGKGMAQVFKYRVTCAYAMGW

SEQ ID NO: 259466 - protein, 572 aa, Artificial Sequence
  derived and/or modified sequence
MMPSPSDSSRSLTSRPSTRGLTHLRLHRPWLQALLTLGLVQVLLGILVVTFSMVASSVTTTESIKRSCPSWAGFSNLLFSVCGLTICAAIICTLSAIVCCIQIFSLDLVHTLAPERSVSGPLGPLGCTSPPPAPLLHTMLDLEEFVPPVPPPPYYPPEYTCSSETDAQSITYNGSMDSPVPLYPTDCPPSYEAVMGLRGDSQATLFDPQLHDGSCICERVASIVDVSMDSGSLVLSAIGDLPGGSSPSEDSCLLELQGSVRSVDYVLFRSIQRSRAGYCLSLDCGLRGPFEESPLPRRPPRAARSYSCSAPEAPPPLGAPTAARSCHRLEGWPPWVGPCFPELRRRVPRGGGRPAAAPPTRAPTRRFSDSSGSLTPPGHRPPHPASPPPLLLPRSHSDPGITTSSDTADFRDLYTKVLEEEAASVSSADTGLCSEACLFRLARCPSPKLLRARSAEKRRPVPTFQKVPLPSGPAPAHSLGDLKGSWPGRGLVTRFLQISRKAPDPSGTGAHGHKQVPRSLWGRPGRESLHLRSCGDLSSSSSLRRLLSGRRLERGTRPHSLSLNGGSRETGL

SEQ ID NO: 259467 - protein, 144 aa, Artificial Sequence
  derived and/or modified sequence
MMPSPSDSSRSLTSRPSTRGLTHLRLHRPWLQALLTLGLVQVLLGILVVTFSMVASSVTTTESIKRSCPSWAGFSNLLFSVCGLTICAAIICTLSAIVCCIQIFSLDLVHTLTSGTFIPKCLRKKLLLFPLQIQGSALKPASSA

SEQ ID NO: 259468 - DNA, 729 bp, Artificial Sequence
  derived and/or modified sequence
atgatgcccagccccagcgacagcagcagaagcctgaccagcagacccagcaccagaggcctgacccacctgagactgcacagaccctggctgcaggccctgctgaccctgggcctggtgcaggtgctgctgggcatcctggtggtgaccttcagcatggtggccagcagcgtgaccaccaccgagagcatcaagagaagctgccccagctgggccggcttcagcaacctgctgttcagcgtgtgcggcctgaccatctgcgccgccatcatctgcaccctgagcgccatcgtgtgctgcatccagatcttcagcctggacctggtgcacaccctggcccccgagagaagcgtgagcggccccctgggccccctgggctgcaccagccccccccccgcccccctgctgcacaccatgctggacctggaggagttcgtgccccccgtgcccccccccccctactacccccccgagtacacctgcagcagcgagaccgacgcccagagcatcacctacaacggcagcatggacagccccgtgcccctgtaccccaccgactgcccccccagctacgaggccgtgatgggcctgagaggcggcaagcagatcctggtgcccctgagaatgagagtggccctgagcgacctgcagggccactacggccagggcaagggcatggcccaggtgttcaagtacagagtgacctgcgcctacgccatgggctggtag

SEQ ID NO: 259469 - DNA, 1719 bp, Artificial Sequence
  derived and/or modified sequence
atgatgcccagccccagcgacagcagcagaagcctgaccagcagacccagcaccagaggcctgacccacctgagactgcacagaccctggctgcaggccctgctgaccctgggcctggtgcaggtgctgctgggcatcctggtggtgaccttcagcatggtggccagcagcgtgaccaccaccgagagcatcaagagaagctgccccagctgggccggcttcagcaacctgctgttcagcgtgtgcggcctgaccatctgcgccgccatcatctgcaccctgagcgccatcgtgtgctgcatccagatcttcagcctggacctggtgcacaccctggcccccgagagaagcgtgagcggccccctgggccccctgggctgcaccagccccccccccgcccccctgctgcacaccatgctggacctggaggagttcgtgccccccgtgcccccccccccctactacccccccgagtacacctgcagcagcgagaccgacgcccagagcatcacctacaacggcagcatggacagccccgtgcccctgtaccccaccgactgcccccccagctacgaggccgtgatgggcctgagaggcgacagccaggccaccctgttcgacccccagctgcacgacggcagctgcatctgcgagagagtggccagcatcgtggacgtgagcatggacagcggcagcctggtgctgagcgccatcggcgacctgcccggcggcagcagccccagcgaggacagctgcctgctggagctgcagggcagcgtgagaagcgtggactacgtgctgttcagaagcatccagagaagcagagccggctactgcctgagcctggactgcggcctgagaggccccttcgaggagagccccctgcccagaagaccccccagagccgccagaagctacagctgcagcgcccccgaggcccccccccccctgggcgcccccaccgccgccagaagctgccacagactggagggctggcccccctgggtgggcccctgcttccccgagctgagaagaagagtgcccagaggcggcggcagacccgccgccgccccccccaccagagcccccaccagaagattcagcgacagcagcggcagcctgaccccccccggccacagacccccccaccccgccagccccccccccctgctgctgcccagaagccacagcgaccccggcatcaccaccagcagcgacaccgccgacttcagagacctgtacaccaaggtgctggaggaggaggccgccagcgtgagcagcgccgacaccggcctgtgcagcgaggcctgcctgttcagactggccagatgccccagccccaagctgctgagagccagaagcgccgagaagagaagacccgtgcccaccttccagaaggtgcccctgcccagcggccccgcccccgcccacagcctgggcgacctgaagggcagctggcccggcagaggcctggtgaccagattcctgcagatcagcagaaaggcccccgaccccagcggcaccggcgcccacggccacaagcaggtgcccagaagcctgtggggcagacccggcagagagagcctgcacctgagaagctgcggcgacctgagcagcagcagcagcctgagaagactgctgagcggcagaagactggagagaggcaccagaccccacagcctgagcctgaacggcggcagcagagagaccggcctgtag

SEQ ID NO: 259470 - DNA, 435 bp, Artificial Sequence
  derived and/or modified sequence
atgatgcccagccccagcgacagcagcagaagcctgaccagcagacccagcaccagaggcctgacccacctgagactgcacagaccctggctgcaggccctgctgaccctgggcctggtgcaggtgctgctgggcatcctggtggtgaccttcagcatggtggccagcagcgtgaccaccaccgagagcatcaagagaagctgccccagctgggccggcttcagcaacctgctgttcagcgtgtgcggcctgaccatctgcgccgccatcatctgcaccctgagcgccatcgtgtgctgcatccagatcttcagcctggacctggtgcacaccctgaccagcggcaccttcatccccaagtgcctgagaaagaagctgctgctgttccccctgcagatccagggcagcgccctgaagcccgccagcagcgcctag

SEQ ID NO: 259471 - DNA, 1386 bp, Artificial Sequence
  derived and/or modified sequence
cctactggacgccctgagggcacaccgaccgcgcctctagagtcaccccacgccgacccctcccctcttctctagacttatttccatccttcccgcttttaccctccccacccctccctgggctccaggccgccgccccctcctcactcctggaccggcccttctcggtgcccctcttccctagggagatgcgatgagccggtgcccccgcgtcctcatcgtcgccccgggcacggtgcccgtccagtgcccgtggtggggagggagcactccgcggtccctccgtgacgcccctcgcttggccccccccacagctggcgtccctcggccatgccccaggggacccagccagggggtgggctctagagcgagtggggtggagaggagaaaggacggggccttgggcgcctctgagatgctcccaagtgccagggagggccgagcgaggcgcaggcaaccgggcagcaggcatgatgccctcgcctagtgactccagccgctcgctgaccagccggcccagcaccaggggccttacccacctccgcctccaccgaccctggctgcaggccctgcttacgctggggctggtccaagtgctcctgggcatcctggtggtcaccttcagcatggtggcctcttccgtcaccaccaccgagagcatcaagaggtcctgcccgtcttgggctgggttctcgaacctgctcttcagcgtctgtgggctcaccatttgtgccgctataatctgtacactctctgctattgtctgctgcatccaaatcttctccctggacctcgtgcatacgctggcccctgagcggtcagtctcaggcccactgggacctctgggctgcacgtccccgcccccagcccctctcctacacaccatgctggacctggaggaatttgtcccgcctgtgcccccaccgccctactatcccccagagtatacctgcagctcagaaacagatgcacagagcatcacgtacaatggctccatggacagcccagtgcccttgtaccctaccgattgccccccttcttatgaggcagtcatgggactacgaggaggaaaacaaattcttgtccccctcagaatgagagtggctctttctgatttgcaagggcactatggtcagggcaaaggcatggcccaggtgtttaagtacagggtgacgtgtgcctatgcaatggggtggtaaggcaggcacgaagagtccaaaaaatctaggtggcctctcagctctgccacctctagctgcatgaccttgggcaagctatgtaaccccaattgcctgctccattaaagactgtgaaggtagaatgtttgtaaagctcttaacagtatgtaagccttcaataaatttcagttttccccttgttttcttg

SEQ ID NO: 259472 - DNA, 2379 bp, Artificial Sequence
  derived and/or modified sequence
aaaggacggggccttgggcgcctctgagatgctcccaagtgccagggagggccgagcgaggcgcaggcaaccgggcagcaggcatgatgccctcgcctagtgactccagccgctcgctgaccagccggcccagcaccaggggccttacccacctccgcctccaccgaccctggctgcaggccctgcttacgctggggctggtccaagtgctcctgggcatcctggtggtcaccttcagcatggtggcctcttccgtcaccaccaccgagagcatcaagaggtcctgcccgtcttgggctgggttctcgaacctgctcttcagcgtctgtgggctcaccatttgtgccgctataatctgtacactctctgctattgtctgctgcatccaaatcttctccctggacctcgtgcatacgctggcccctgagcggtcagtctcaggcccactgggacctctgggctgcacgtccccgcccccagcccctctcctacacaccatgctggacctggaggaatttgtcccgcctgtgcccccaccgccctactatcccccagagtatacctgcagctcagaaacagatgcacagagcatcacgtacaatggctccatggacagcccagtgcccttgtaccctaccgattgccccccttcttatgaggcagtcatgggactacgaggagacagccaggccactctctttgaccctcagcttcacgatggctcgtgcatctgtgaacgagtggcctccattgtagacgtgtccatggacagcgggtctctggtgctgtcagccattggtgacctccctgggggctctagcccgtcggaggactcgtgcctgctggagctgcagggctccgtgcgctccgtggactacgttctctttcgctccatccagcgcagccgtgccggctactgcctcagcctggactgtggcctgcggggccccttcgaggaaagccccctgccacggcgccccccacgggctgcccgctcctattcctgctctgcccctgaagctccacccccactgggtgcccccacagctgcccgcagctgccaccggttggagggctggccgccctgggtgggaccctgcttccccgagctgaggcggcgggtcccccggggagggggccgcccagccgcagccccgcccacccgagccccgactcgtcgcttcagcgatagctcaggttccctcaccccaccggggcaccggcctcctcatccggcatccccaccaccgctgctgctgccacggtcccacagcgacccaggcatcacgacctccagtgacactgctgacttcagggacctttataccaaagtgcttgaggaagaagctgcttctgtttcctctgcagatacagggctctgctctgaagcctgcctcttccgcctagcccgctgcccttcccccaagttgctacgtgcccggtcagccgagaaacggcgccctgtgcccaccttccaaaaagttcccctgccctcgggccctgcacctgcccactccctgggggacctaaagggcagctggccaggtcggggcctggtcactcgtttcctccagatatccaggaaagccccagaccccagtgggactggagctcatggacataagcaggtgccccggagcctgtggggccggcctggccgagagagcctccaccttcgcagctgcggagatctgagctctagctcttccctgcggcgtctcctgtctggccgcaggctggagcgtggtacccgcccccacagcctcagcctcaacgggggcagccgggagactgggctctgacctaggcttcttgtcacactgaacacatccagccacaggcaccagctggttgggaccagcagcccccagcatcctcttgcactggctggcacaaaaagaaacctgctgtataccccccaaagtgtccctttccctcctacctctggggtctcttgctgcttgcctctgctgctctggactgggagagcttctgtcctgtgctgcatgggtatttagactgtgggggagatgccccttcttatagcactggaggaggaaaacaaattcttgtccccctcagaatgagagtggctctttctgatttgcaagggcactatggtcagggcaaaggcatggcccaggtgtttaagtacagggtgacgtgtgcctatgcaatggggtggtaaggcaggcacgaagagtccaaaaaatctaggtggcctctcagctctgccacctctagctgcatgaccttgggcaagctatgtaaccccaattgcctgctccattaaagactgtgaaggtagaatgtttgtaaagctcttaacagtatgtaagccttcaataaatttcagttttccccttgttttcttgatca

SEQ ID NO: 259473 - DNA, 729 bp, Artificial Sequence
  derived and/or modified sequence
atgatgccatcccccagcgatagctctcgcagtctaacgtctagaccgagcacacgcggacttacgcacctgcgtttacaccgaccatggctgcaggccttgctgaccctgggcttggtccaggtgttgttggggattctcgtcgtgaccttttcaatggtcgcctcttctgtgacgacaactgagtccatcaagcgctcgtgtccctcatgggcagggtttagcaacctgttgttttcggtgtgtggattgaccatttgtgctgctatcatctgtaccctaagtgccattgtgtgctgcatccagatattttcactcgatctggtacacaccctcgcccctgagcgcagtgtgagcggacccctggggccgctcgggtgcacgtcccctccgccagcacctctgctgcatacgatgctggacttggaagagtttgtcccacctgtcccaccccccccctactacccgcctgaatacacttgctctagcgagacagatgcccagtctattacctacaatgggtcaatggacagtccagttcctctgtaccccactgactgtcctccaagctacgaggccgttatgggcctgcgaggaggaaaacagatcctcgtgccactaaggatgagagttgccctctccgacctccaaggacactatggccagggtaagggcatggcccaggtttttaagtaccgagtgacatgtgcgtatgctatgggctggtag

SEQ ID NO: 259474 - DNA, 1719 bp, Artificial Sequence
  derived and/or modified sequence
atgatgcctagtccatccgatagttcacgatctctgacctcacggccttctacccgaggtctgactcatctgaggctgcaccggccttggctgcaggcgctgttgactttaggtctggttcaagtgttgctcggaatactagtcgtgactttctctatggtcgcttcctcagtgactacaacggaatccattaagcgcagctgtcctagctgggccggattcagtaatttgctgttcagcgtctgcgggcttacaatttgcgccgccattatatgcaccttatccgcaattgtttgctgcatacagatcttctcgctcgacctcgttcatactttggcccccgagcgcagtgtaagcggacctttaggtcctcttggatgcacctcccctccacctgcacccctcctgcacactatgctcgacctggaggagtttgtcccacctgtgcctccccccccatactatcccccagagtatacctgcagctctgagactgatgctcagtccatcacttacaacggtagcatggattcaccagtaccgctctaccccactgattgccctccgagctacgaggcagtgatgggactcagaggcgatagccaagcgacgctgtttgacccccagctgcatgatggctcttgcatctgcgagcgcgtcgcatctatagtggacgtatcaatggactcagggagtctcgtgttgtctgctataggggatctccctggaggctcttcaccaagcgaagattcctgtctgctggaactccaggggtccgtccgttctgtggactatgttctcttcagatcaatccaacgctctcgggcagggtactgccttagtctggattgtggcttgaggggtcctttcgaagagagcccactgccaaggcggccacctagggcagcgcggagctactcatgcagcgcccccgaggcacccccgcccctgggcgcgcctaccgctgccagatcttgccatcggcttgaaggctggcccccttgggtggggccgtgcttccccgagcttcgaagacgggtgcctcgcgggggcgggaggccggccgctgctccccctactcgcgcaccaacacgtcgctttagtgacagcagcgggtctttaaccccacccggtcaccgacctcctcatccagccagccccccccctcttctgctaccccgctcccattctgaccccggtataaccacgtcatccgataccgccgacttcagagatctgtataccaaagtgctggaggaggaagcagcatccgtgagtagcgctgatacgggtctgtgttccgaggcctgcctgtttagacttgcgaggtgccccagccccaagctgctgagggccaggtccgctgaaaaacgccgcccagtccctacgttccagaaagtacccctcccaagcggacccgctcctgcccacagtctgggagatctgaagggaagttggcccggtcgtggactcgtcactaggtttttgcaaataagtcgcaaggccccagacccgagtgggacaggagcccatggccacaagcaagttccaaggtcactttggggtagacccggccgtgaatctctgcacctgcgatcgtgtggggatcttagcagttctagctctctgcggagactcttgtcaggtcgcaggctcgagcgcggcacaagacctcatagtctgtcgctgaacggcgggtctcgcgagaccggcctgtag

SEQ ID NO: 259475 - DNA, 435 bp, Artificial Sequence
  derived and/or modified sequence
atgatgccttccccatcagatagttctagatctttgacaagccgaccttcaactcggggtctgactcacttgcggttacacagaccttggcttcaggcccttcttaccctcggcttggttcaggtactgctggggatcctcgtagtcaccttctcaatggtcgcgagttccgtgacgactaccgaaagtatcaaaaggtcttgcccttcatgggccgggttctcaaatctcctgttcagtgtctgcggcttgacaatttgtgccgccattatatgtacattgagtgcaatagtgtgttgcatccaaatctttagcctggatctcgtacacacgctgacctcgggtaccttcatccctaaatgcctgaggaagaaactgctcctctttccactccagatccaaggatctgctctgaagccggcgtcaagtgcttag

SEQ ID NO: 259476 - DNA, 729 bp, Artificial Sequence
  derived and/or modified sequence
atgatgcccagccccagcgacagcagccgcagcctgaccagccggcccagcacccggggcctgacccacctgcggctgcaccggccctggctgcaggccctgctgaccctgggcctggtgcaggtgctgctgggcatcctggtggtgaccttctccatggtggccagctctgtgaccaccacagagagcatcaagaggagctgccccagctgggccggcttcagcaacctgctcttctctgtgtgtggcctgaccatctgtgccgccatcatctgcaccctgagcgccatcgtgtgctgcatccagatcttcagcctggacctggtgcacaccctggcccctgagaggtctgtgtctggccccctgggccccctgggctgcaccagccccccaccagcccccctgctgcacaccatgctggacctggaggagtttgtgccccctgtgcccccaccaccctactacccacctgagtacacctgcagcagcgagacagatgcccagagcatcacctacaacggctccatggacagccctgtgcccctgtaccccacagactgcccccccagctatgaagctgtgatgggcctgcggggcggcaagcagatcctggtgcccctgaggatgagggtggccctgagtgacctgcagggccactacggccagggcaagggcatggcccaggtgttcaagtacagagtgacctgtgcctatgccatgggctggtag

SEQ ID NO: 259477 - DNA, 1719 bp, Artificial Sequence
  derived and/or modified sequence
atgatgcccagccccagcgacagcagccgcagcctgaccagccggcccagcacccggggcctgacccacctgcggctgcaccggccctggctgcaggccctgctgaccctgggcctggtgcaggtgctgctgggcatcctggtggtgaccttctccatggtggccagctctgtgaccaccacagagagcatcaagaggagctgccccagctgggccggcttcagcaacctgctcttctctgtgtgtggcctgaccatctgtgccgccatcatctgcaccctgagcgccatcgtgtgctgcatccagatcttcagcctggacctggtgcacaccctggcccctgagaggtctgtgtctggccccctgggccccctgggctgcaccagccccccaccagcccccctgctgcacaccatgctggacctggaggagtttgtgccccctgtgcccccaccaccctactacccacctgagtacacctgcagcagcgagacagatgcccagagcatcacctacaacggctccatggacagccctgtgcccctgtaccccacagactgcccccccagctatgaagctgtgatgggcctgcggggggacagccaggccaccctgtttgacccccagctgcatgatggcagctgcatctgtgagcgggtggccagcatcgtggatgtgtccatggacagcggcagcctggtgctgagcgccatcggggacctgcccggcggcagcagccccagcgaggacagctgcctgctggagctgcagggctctgtgcgctctgtggactatgtgctcttccgcagcatccagaggagccgggccggctactgcctgagcctggactgtggcctgcggggcccctttgaggagagccccctgcccaggaggcctccccgggccgcccggagctacagctgcagcgcccctgaggcccccccacccctgggcgcccccacagctgcccggagctgccaccggctggagggctggccaccctgggtgggcccctgcttccctgagctgcggaggagagtgccccggggcggcggccggcctgctgctgccccacccacccgggcccccacccggcgcttcagtgacagcagcggcagcctgaccccacctggccacaggcctccccacccagccagccccccacccctgctgctgcccaggagccacagcgaccccggcatcaccaccagcagtgacacagctgacttccgggacctgtacaccaaggtgctggaggaggaggccgcctctgtgtcctctgctgacaccggcctgtgcagcgaggcctgcctcttccggctggcccgctgccccagccccaagctgctgcgggcccggtctgctgagaagaggaggcctgtgcccaccttccagaaggtgcccctgcccagcggccctgccccagcccacagcctgggggacctgaagggctcctggccaggccggggcctggtgacccgcttcctgcagatcagcaggaaggccccagaccccagcggcaccggggcccacggccacaagcaggtgcccaggagcctgtggggccggcccggccgggagagcctgcacctgcggagctgtggggacctgagcagcagcagcagcctgcggcggctgctgagcggccggcggctggagcggggcacccggccccacagcctgagcctgaatggaggcagccgggagaccggcctgtag

SEQ ID NO: 259478 - DNA, 435 bp, Artificial Sequence
  derived and/or modified sequence
atgatgcccagccccagcgacagcagccgcagcctgaccagccggcccagcacccggggcctgacccacctgcggctgcaccggccctggctgcaggccctgctgaccctgggcctggtgcaggtgctgctgggcatcctggtggtgaccttctccatggtggccagctctgtgaccaccacagagagcatcaagaggagctgccccagctgggccggcttcagcaacctgctcttctctgtgtgtggcctgaccatctgtgccgccatcatctgcaccctgagcgccatcgtgtgctgcatccagatcttcagcctggacctggtgcacaccctgaccagcggcaccttcatccccaagtgcctgaggaagaagctgctgctcttccccctgcagatccagggcagcgccctgaagccagccagcagcgcctag

SEQ ID NO: 259479 - DNA, 729 bp, Artificial Sequence
  derived and/or modified sequence
atgatgcccagccccagcgacagcagccggagcctgaccagccggccctctactcgcgggctgacgcaccttcggctgcaccgaccatggctgcaagccctcttgacactagggctggtgcaggtccttctaggaattttagtagtgaccttcagcatggtggccagcagcgtgactactactgagtctatcaaacggtcctgtccctcgtgggctgggtttagtaacctgctgttcagcgtgtgtggactgactatctgcgcggccattatatgtaccctctcagccattgtctgttgcatccagatctttagcctcgatctcgtgcacaccttggctccagaacgctctgtgtcaggcccactgggtccacttggttgcacctcaccacccccagcccccctgctccataccatgctggatctcgaagaattcgtgccgcccgtgcctccacctccctactacccacccgaatacacatgctcatcagagacggatgctcaaagcattacgtataatggctccatggattcccccgtgccgctttaccctacggattgcccacccagctacgaggctgtgatggggctgcgcggcggtaaacagatcttggtgccgctgcgaatgagggtggctctgtctgatctgcagggtcattacggacagggaaaaggaatggcccaggtttttaaatatagagtcacgtgtgcctacgctatgggttggtag

SEQ ID NO: 259480 - DNA, 1719 bp, Artificial Sequence
  derived and/or modified sequence
atgatgcccagccccagcgacagcagccggagcctgaccagccggccgtccacaagagggcttacccatttgcgcctgcacaggccgtggctacaggctttgttgactctgggcttggttcaagtgctgcttgggattcttgtcgtcactttcagcatggtcgcctctagtgttaccacgacagagtccataaagcgcagctgcccatcctgggccgggttcagtaatctgctgttctccgtgtgtggcctgactatttgtgccgcaatcatttgcaccctaagtgctatagtgtgctgcatccagatcttttctttggatctcgtccatactctcgctcccgaaaggtccgtaagcggtcccctggggcctctcggctgtactagtccgcctccagcaccacttttgcacacaatgttggatcttgaggagtttgtcccaccggtgccgccgccaccatattatcccccagaatacacatgcagcagtgaaacagacgctcagtctattacttacaatggttctatggattcccccgtccccctgtaccccacagactgcccaccatcttatgaagccgtcatgggcctccgaggggatagccaagccaccctattcgacccgcagttacacgatggctcctgcatttgtgaacgagtcgcttccatcgtggacgtgtctatggatagcggaagcctggtgctcagcgctatcggtgacctgcctggcggaagcagtcctagcgaggacagctgtttactcgagcttcagggaagcgtgagatctgttgattatgttctgttccgaagcattcaacgatccagagctggatactgtctttccttggattgcgggttgaggggccccttcgaagagtcaccattgccccgcaggcccccacgtgctgctcgaagttatagttgttctgcaccagaggctccccccccccttggcgccccaacagctgctagaagttgtcatcgcctcgaaggatggcctccctgggttgggccgtgttttcccgagctgagacgccgcgtgcccaggggcgggggccgccctgcagctgcccctccaaccagggctccaactaggcgattcagtgactcatctgggtcattgaccccaccaggacacagacccccacaccctgcctcaccaccacctttactgctgcctcgaagccattccgaccctgggataaccactagcagcgataccgcagatttcagggatctatataccaaggtgctcgaagaagaagcggccagcgttagctccgctgacactggcctgtgctctgaggcgtgtcttttccgacttgctcgctgtccttccccgaagttgctacgagctcgctcagctgagaagagaagacccgtgccaacttttcagaaggtcccacttccaagcgggccggctcccgcccactcccttggggacctgaagggttcatggcccggaagaggccttgtgacgcgtttcctgcagatttcacgcaaagccccagaccccagcggaaccggcgcacacggccataaacaggtcccccgcagcctgtgggggagaccaggcagggagtctttgcacctacgtagttgtggcgacctgtctagcagcagctccctcaggcgactgcttagtggtaggagattagagcgaggaacaaggccgcactctttaagtcttaatggagggtcccgggaaacaggtctctag

SEQ ID NO: 259481 - DNA, 435 bp, Artificial Sequence
  derived and/or modified sequence
atgatgcccagccccagcgacagcagccggagcctgaccagccggcctagtacccggggtctgacccacctcagattgcacaggccctggctgcaggccctcctgaccctcggtttggtacaggtcttgttgggaatactggtggtgaccttctcaatggtggcatctagcgtgaccacgactgaatccatcaagaggtcctgcccttcctgggccggattttcaaatctgttgttctcagtttgcggtttgaccatctgcgcagcaatcatctgtactctctccgcgattgtgtgctgcatccaaattttctccctggacctcgtccatacacttacctctgggacatttatcccaaaatgtctgagaaagaagctgctcctgttccctctgcaaatacaggggagcgccctgaaacccgcatcatccgcctag

SEQ ID NO: 259482 - DNA, 729 bp, Artificial Sequence
  derived and/or modified sequence
atgatgccctctcccagcgacagctctcgcagcttgacgagcagaccaagtactaggggcctcactcacctgagattgcaccgcccttggttacaagctctgctgacactgggtctcgtccaggtgttacttgggatcctcgttgtgacgtttagcatggtggcttcttcagtcactaccacagagtctataaagcgaagctgcccctcctgggccggtttcagtaatcttctgttcagtgtctgcgggctgaccatatgcgcggctatcatttgtaccctttccgccattgtttgctgtatccagatcttctccctggacttagtccataccctagctcctgaacgtagcgtatccgggccattggggccactaggatgcaccagccctccccctgcccctctgctacatacaatgctggatttagaggagttcgtgcccccagtcccaccccctccctattatccacccgagtatacttgctccagcgagaccgacgcccagtccattacttataacggcagtatggattctccggtcccactttacccaacagactgccctcccagttatgaagcagtgatggggttaaggggaggtaagcagatactcgttcccctgagaatgagggtcgccctttccgacctgcaaggacattacggccaggggaagggaatggcccaggtttttaaatatagggtaacctgcgcctatgctatgggctggtag

SEQ ID NO: 259483 - DNA, 1719 bp, Artificial Sequence
  derived and/or modified sequence
atgatgccgagcccgtctgattcctctcgttccctgacaagtcgccctagtacaaggggcctaacgcacctgcgactccatagaccctggctccaggccctgctcactctaggactagtgcaagttctgctcggtatccttgtggtgactttttcgatggtcgcctcgagcgtaacgacaaccgaaagtataaagaggtcatgtccatcatgggcgggattcagcaatctgctcttctccgtgtgcgggctgaccatatgcgcggcaattatttgcactctgtccgctatagtatgttgtatacagatcttcagtctggatctggttcacactttagctccagagaggagcgtctcaggccctcttggtcccctggggtgtacatcccccccacctgctcccctgttgcacaccatgttggatttggaagaattcgttcccccagtgcctcccccaccttactatccaccagagtacacgtgctcttcagagacggacgctcagtccatcacctacaacggcagcatggatagccccgtcccactttaccccacagactgtcctccctcctatgaggctgtgatgggacttcgtggcgactcccaggctaccctgttcgatccacagttgcatgatggttcgtgcatctgtgaacgcgtggcgtctattgtagacgtgtccatggacagtggaagtctcgtgctaagtgccatcggcgatcttcccggaggcagctccccaagcgaagacagctgcctactggagctccaggggagcgtacggtctgtggattatgtattattccgttcaatccagcgttcccgggcagggtactgccttagtcttgattgcggactgcgcggacccttcgaagagtcccccctgcccagacggccacctcgggcagcaagatcttactcatgctccgcacctgaagcacccccacctctgggcgcaccaaccgccgcacggtcttgtcataggttggaaggatggccgccttgggtgggcccttgttttccagaattgcggagacgggtgcccagaggcggaggtcgccctgcagcggctcctcccactcgggctccgactaggagattttctgacagctcaggatcacttacccccccagggcaccggcctccgcacccggctagtccccctcctctgctacttccacgtagtcattctgatcctggcataactacatcatctgacaccgctgacttccgcgatctatatacaaaagttctagaggaggaagccgcttcagtcagttctgcagatacaggactgtgctcggaagcctgtttatttagactggctaggtgccctagtcctaagctacttcgcgcaagatccgctgagaagagacggcctgtgccaacattccagaaggtgccactgccctcaggccctgccccagcccacagtctaggtgacctgaagggttcctggccaggacggggacttgtgactcgctttctgcaaatcagcagaaaagcacctgatccctccggcaccggggcacacgggcataaacaggtgcccaggtcgttgtggggtaggcctggtcgagaatcacttcatttgcgtagctgcggagatctgtcgtcctcttcaagcctcagaagactgttaagtgggcgacggctggagagggggacaagaccccattccctgtcgctaaacggcggatcacgtgaaactgggctgtag

SEQ ID NO: 259484 - DNA, 435 bp, Artificial Sequence
  derived and/or modified sequence
atgatgccttccccgtctgattcgtcacggtctctcaccagtcggccatcaacaagagggctgacccatctacggctgcaccggccttggctgcaggcactactgaccttgggcctcgtgcaagtactgctaggaatccttgtcgttaccttctctatggtggcctctagtgtcacgaccacagagtcgatcaaacgcagctgtcccagctgggcgggttttagcaatctgttattttccgtttgtggcctaactatttgtgcagcgataatctgcactttaagcgccatcgtgtgctgtatccaaatcttttcactggacctggtccacactcttacatcaggcacctttatacctaaatgtctacggaagaaactcctgttgttccctttgcagattcaggggtccgccctcaaaccggcttcgagcgcgtag

SEQ ID NO: 259485 - protein, 358 aa, Artificial Sequence
  derived and/or modified sequence
MAFAPMGPEASFFDVLDRHRESLLAALRRGGREPPTGGSRLASRFEDSVGLQMVSHCTTRKIKSDSPKSAQKFSLILKILSMIYKLVQSNTYATKRDIYYTDSQLFGNQTVVDNIINDISCMLKVSRRSLHILSTSKGLIAGNLRYIEEDGTKVNCTCGATAVAVPSNIQGIRNLVTDAKFVLIVEKDATFQRLLDDNFCNKLSPCIMITGKGVPDLNTRLLVKKLWDTFHVPVFTLVDADPHGIEIMCIYKYGSMSMSFEAHHLTVPAIRWLGLLPSDLKRLNVPKDSLIPLTKRDQMKLDSILRRPYVTCQPFWRKEMEIMADSKMKAEIQALTFLSSDYLSRVYLPNKLKFGGWI

SEQ ID NO: 259486 - protein, 354 aa, Artificial Sequence
  derived and/or modified sequence
MAFAPMGPEASFFDVLDRHRESLLAALRRGGREPPTGGSRLASRFEDSVGLQMVSHCTTRKIKSDSPKSAQKFSLILKILSMIYKLVQSNTYATKRDIYYTDSQLFGNQTVVDNIINDISCMLKVSRRSLHILSTSKGLIAGNLRYIEEDGTKVNCTCGATAVAVPSNIQGIRNAKFVLIVEKDATFQRLLDDNFCNKLSPCIMITGKGVPDLNTRLLVKKLWDTFHVPVFTLVDADPHGIEIMCIYKYGSMSMSFEAHHLTVPAIRWLGLLPSDLKRLNVPKDSLIPLTKRDQMKLDSILRRPYVTCQPFWRKEMEIMADSKMKAEIQALTFLSSDYLSRVYLPNKLKFGGWI

SEQ ID NO: 259487 - DNA, 1077 bp, Artificial Sequence
  derived and/or modified sequence
atggccttcgcccccatgggccccgaggccagcttcttcgacgtgctggacagacacagagagagcctgctggccgccctgagaagaggcggcagagagccccccaccggcggcagcagactggccagcagattcgaggacagcgtgggcctgcagatggtgagccactgcaccaccagaaagatcaagagcgacagccccaagagcgcccagaagttcagcctgatcctgaagatcctgagcatgatctacaagctggtgcagagcaacacctacgccaccaagagagacatctactacaccgacagccagctgttcggcaaccagaccgtggtggacaacatcatcaacgacatcagctgcatgctgaaggtgagcagaagaagcctgcacatcctgagcaccagcaagggcctgatcgccggcaacctgagatacatcgaggaggacggcaccaaggtgaactgcacctgcggcgccaccgccgtggccgtgcccagcaacatccagggcatcagaaacctggtgaccgacgccaagttcgtgctgatcgtggagaaggacgccaccttccagagactgctggacgacaacttctgcaacaagctgagcccctgcatcatgatcaccggcaagggcgtgcccgacctgaacaccagactgctggtgaagaagctgtgggacaccttccacgtgcccgtgttcaccctggtggacgccgacccccacggcatcgagatcatgtgcatctacaagtacggcagcatgagcatgagcttcgaggcccaccacctgaccgtgcccgccatcagatggctgggcctgctgcccagcgacctgaagagactgaacgtgcccaaggacagcctgatccccctgaccaagagagaccagatgaagctggacagcatcctgagaagaccctacgtgacctgccagcccttctggagaaaggagatggagatcatggccgacagcaagatgaaggccgagatccaggccctgaccttcctgagcagcgactacctgagcagagtgtacctgcccaacaagctgaagttcggcggctggatctag

SEQ ID NO: 259488 - DNA, 1065 bp, Artificial Sequence
  derived and/or modified sequence
atggccttcgcccccatgggccccgaggccagcttcttcgacgtgctggacagacacagagagagcctgctggccgccctgagaagaggcggcagagagccccccaccggcggcagcagactggccagcagattcgaggacagcgtgggcctgcagatggtgagccactgcaccaccagaaagatcaagagcgacagccccaagagcgcccagaagttcagcctgatcctgaagatcctgagcatgatctacaagctggtgcagagcaacacctacgccaccaagagagacatctactacaccgacagccagctgttcggcaaccagaccgtggtggacaacatcatcaacgacatcagctgcatgctgaaggtgagcagaagaagcctgcacatcctgagcaccagcaagggcctgatcgccggcaacctgagatacatcgaggaggacggcaccaaggtgaactgcacctgcggcgccaccgccgtggccgtgcccagcaacatccagggcatcagaaacgccaagttcgtgctgatcgtggagaaggacgccaccttccagagactgctggacgacaacttctgcaacaagctgagcccctgcatcatgatcaccggcaagggcgtgcccgacctgaacaccagactgctggtgaagaagctgtgggacaccttccacgtgcccgtgttcaccctggtggacgccgacccccacggcatcgagatcatgtgcatctacaagtacggcagcatgagcatgagcttcgaggcccaccacctgaccgtgcccgccatcagatggctgggcctgctgcccagcgacctgaagagactgaacgtgcccaaggacagcctgatccccctgaccaagagagaccagatgaagctggacagcatcctgagaagaccctacgtgacctgccagcccttctggagaaaggagatggagatcatggccgacagcaagatgaaggccgagatccaggccctgaccttcctgagcagcgactacctgagcagagtgtacctgcccaacaagctgaagttcggcggctggatctag

SEQ ID NO: 259489 - DNA, 1077 bp, Artificial Sequence
  derived and/or modified sequence
atggcgtttgcccctatgggaccggaggctagcttttttgacgtgcttgataggcacagagaatccctccttgcagccctgagacgggggggccgggaaccacccaccggaggatcccggctcgcctcccggttcgaggattccgtgggccttcagatggtgtctcactgtacaacacgcaaaatcaaaagcgacagccccaagagtgcacagaagttcagcttgatccttaagattctgagcatgatctacaagctggttcagtcaaatacgtacgctacaaagcgagacatctactacacagattcccagttgtttggcaatcaaaccgtagtcgacaacatcataaatgatatcagttgtatgctcaaggttagcaggcgctctctgcacatcctaagcacttctaaaggactaattgccggtaacctccgctatatcgaggaggatggaaccaaggtgaactgcacctgcggagccactgctgttgccgtgccctcaaacatccaaggcatccgaaatctggtgactgacgcaaaatttgtgttaatcgtcgagaaagatgcaactttccagcggctccttgatgacaacttttgtaacaaactatccccttgtattatgattacggggaagggagtgccagatctgaatacacgactcctcgtgaagaaactatgggacacatttcatgtgcccgtgtttaccctcgtagacgcagacccacacggaatagaaatcatgtgcatatataaatacgggtccatgtccatgtctttcgaggcacaccatctgaccgtgccagccattcgatggttagggctcctgcccagtgatctaaaacgcctcaatgtgccgaaagattccctgatccccctgaccaagcgtgaccagatgaagctggacagtatccttagacgcccctacgtgacctgtcagcccttctggagaaaggagatggagatcatggccgacagcaaaatgaaggccgagatccaggccttgaccttcctgagtagcgactatttgtcacgggtatacttacctaacaaactcaagttcggtggatggatctag

SEQ ID NO: 259490 - DNA, 1065 bp, Artificial Sequence
  derived and/or modified sequence
atggcctttgccccgatgggcccggaagctagctttttcgacgtcctggatcgccatcgtgaaagcctgttggccgctcttagaaggggaggcagggaacctcctacaggcgggtcacgcctcgccagccgcttcgaggatagcgtgggtctgcaaatggtttcccactgcacaacccgcaagatcaaatcagactccccaaaaagtgcacaaaagttctcgctcatactgaagatcctctcgatgatctataaactggtgcagagcaatacttacgcaacaaagcgcgatatctactacaccgatagccagctattcggcaaccaaacagtcgtcgataacattataaatgatataagttgtatgctcaaggtctcaagacggagcttacacatcttgagtacctccaaggggctcatagccgggaatctcagatacatcgaggaggacggcacaaaagtgaactgcacctgtggcgccaccgccgtcgctgtaccatccaatattcagggtatacgcaatgctaaatttgtgctgatcgtagagaaggacgcaactttccagagacttctcgatgataacttctgcaataaactgtcaccatgcatcatgattactggaaaaggcgtgcctgacctaaacacaaggcttcttgtcaagaagttatgggacacctttcacgtccccgtgttcactttggtggacgccgaccctcatgggattgaaattatgtgcatctacaagtacggatctatgtctatgtccttcgaggcccatcacctgactgtgcctgcaatcagatggcttggccttcttccatcagaccttaagcgactgaatgttccaaaagactccctgatcccactcaccaaacgcgatcagatgaagctggattcgattctccggcgaccctatgtcacatgccaaccgttctggagaaaggaaatggaaatcatggcggacagtaaaatgaaggcggaaatccaagccctgactttcttatcctctgactatctctctagggtttatctgcctaacaagttgaagtttggcgggtggatttag

SEQ ID NO: 259491 - DNA, 1077 bp, Artificial Sequence
  derived and/or modified sequence
atggcctttgcccccatgggccctgaggccagcttctttgatgtgctggacagacaccgggagagcctgctggccgccctgcggcggggcggccgggagccccccaccggcggcagccggctggccagcagatttgaggacagcgtgggcctgcagatggtgagccactgcaccaccaggaagatcaagagtgacagccccaagagcgcccagaagttcagcctcatcctgaagatcctgtccatgatctacaagctggtgcagagcaacacctacgccaccaagagggacatctactacacagacagccagctgtttggaaaccagacagtggtggacaacatcatcaatgacatcagctgcatgctgaaggtgtccagaagaagcctgcacatcctgagcaccagcaagggcctgattgctggcaacctgcgctacattgaagaagatggcaccaaggtgaactgcacctgtggggccacagctgtggccgtgcccagcaacatccagggcatccggaacctggtgacagatgccaagtttgtgctgattgtggagaaggatgccaccttccagaggctgctggatgacaacttctgcaacaagctgagcccctgcatcatgatcaccgggaagggcgtgcctgacctgaacacccggctgctggtgaagaagctgtgggacaccttccacgtgcctgtgttcaccctggtggatgctgacccccatggaattgagatcatgtgcatctacaagtatggctccatgtccatgagctttgaggcccaccacctgactgtgcctgccatccgctggctgggcctgctgcccagcgacctgaagaggctgaatgtgcccaaggacagcctcatccccctgaccaagagggaccagatgaagctggacagcatcctgcggcggccctacgtgacctgccagcccttctggaggaaggagatggagatcatggctgacagcaagatgaaggccgagatccaggccctgaccttcctgagcagtgactacctgagccgggtgtacctgcccaacaagctgaagtttggaggctggatctag

SEQ ID NO: 259492 - DNA, 1065 bp, Artificial Sequence
  derived and/or modified sequence
atggcctttgcccccatgggccctgaggccagcttctttgatgtgctggacagacaccgggagagcctgctggccgccctgcggcggggcggccgggagccccccaccggcggcagccggctggccagcagatttgaggacagcgtgggcctgcagatggtgagccactgcaccaccaggaagatcaagagtgacagccccaagagcgcccagaagttcagcctcatcctgaagatcctgtccatgatctacaagctggtgcagagcaacacctacgccaccaagagggacatctactacacagacagccagctgtttggaaaccagacagtggtggacaacatcatcaatgacatcagctgcatgctgaaggtgtccagaagaagcctgcacatcctgagcaccagcaagggcctgattgctggcaacctgcgctacattgaagaagatggcaccaaggtgaactgcacctgtggggccacagctgtggccgtgcccagcaacatccagggcatcagaaatgccaagtttgtgctgattgtggagaaggatgccaccttccagaggctgctggatgacaacttctgcaacaagctgagcccctgcatcatgatcaccgggaagggcgtgcctgacctgaacacccggctgctggtgaagaagctgtgggacaccttccacgtgcctgtgttcaccctggtggatgctgacccccatggaattgagatcatgtgcatctacaagtatggctccatgtccatgagctttgaggcccaccacctgactgtgcctgccatccgctggctgggcctgctgcccagcgacctgaagaggctgaatgtgcccaaggacagcctcatccccctgaccaagagggaccagatgaagctggacagcatcctgcggcggccctacgtgacctgccagcccttctggaggaaggagatggagatcatggctgacagcaagatgaaggccgagatccaggccctgaccttcctgagcagtgactacctgagccgggtgtacctgcccaacaagctgaagtttggaggctggatctag

SEQ ID NO: 259493 - DNA, 1077 bp, Artificial Sequence
  derived and/or modified sequence
atggccttcgcccccatgggccccgaggccagcttcttcgacgtgctggacagacaccgcgagagtctcctggccgccttgcgaagaggtggtagagaacccccgacaggaggatcccgtctcgcaagccgctttgaagatagcgtgggcctgcaaatggtgtctcattgtactacacgaaagatcaagagcgactcccctaagtctgcccagaagttctccctgatcctcaagatcttatcaatgatctataaactggtgcagtctaacacatatgccacgaagcgcgatatctattacaccgacagccagttgtttggcaatcagacggtggtggacaacatcataaacgacatctcgtgcatgcttaaagtgagtcgtagatcactgcatattctctccacatcgaaaggtctaattgcaggaaatctccgttacattgaggaagacggaacaaaggtgaattgcacttgcggcgcaacagctgttgctgtcccttccaatatccaaggaatcagaaatctcgtgaccgatgcaaagttcgtgctgatagtggagaaagatgccacattccagcggctgctggatgacaacttctgtaataagctgagtccttgtattatgattacaggaaaaggagtgccagacctgaatacaaggctgctggtgaagaaattatgggacactttccatgttcctgttttcacgttggttgacgcagatccccatggaatagagatcatgtgcatctacaaatatggatccatgtctatgtcctttgaggcacaccacctaacagtcccagccattcgctggctgggtttattgccttccgacctcaaacgactgaacgttccaaaggacagtttgattccactcacaaagagggaccagatgaagctagatagtattctccgcaggccatacgtaacttgccaacccttttggcgaaaagagatggagatcatggcggacagcaagatgaaggccgaaattcaagctttaaccttcctgagcagcgactacctgtctcgagtttatttacctaacaagctaaagtttgggggatggatctag

SEQ ID NO: 259494 - DNA, 1065 bp, Artificial Sequence
  derived and/or modified sequence
atggccttcgcccccatgggccccgaggccagcttcttcgacgtgctagatcgacacagggaatccctgttggcagccttgaggaggggtggtcgggaacctcctactggaggatctcggctggcctctcggttcgaagacagtgttggactacaaatggtctctcactgtacaaccaggaagatcaagtcggacagtccaaagtctgcacagaagttctcccttattttgaagatcctgagtatgatctataagctggtacagagcaacacctacgccacaaagcgggatatctactacaccgacagtcagcttttcggcaaccaaactgtggtcgataacatcataaacgacatctcctgcatgctgaaggtcagcagacgtagtttgcatatcctatcgacatctaagggtctgatagcaggtaacctccggtacatcgaggaggacgggaccaaggttaactgcacatgcggcgctaccgcggtagccgtgcctagcaacatacaggggattcgcaacgcaaagttcgttttaattgtggaaaaagatgctactttccagcgccttctcgacgataacttttgcaacaagctctctccatgcattatgatcacagggaagggggtgcctgatttgaacactcgacttctcgtgaagaagctctgggatacctttcacgtgccagtgttcactttagtcgatgctgaccctcacggcatagagataatgtgcatctataagtatggctccatgtctatgtccttcgaggcccaccatctaacagtgccagcaatccggtggctgggcctccttccaagtgatctgaaacggcttaatgtgccaaaagactccctgattcccctcactaagagggaccagatgaagctagacagtattttgcggagaccctatgtaacatgccagcccttttggcggaaagagatggaaatcatggcagacagcaagatgaaggccgagatacaggccctaaccttccttagcagcgattacctcagcagagtctacctgcctaacaagctcaaattcggaggctggatatag

SEQ ID NO: 259495 - DNA, 1077 bp, Artificial Sequence
  derived and/or modified sequence
atggccttcgcccctatgggccctgaggcttctttttttgatgtactggataggcacagggagagccttctggccgctttgagacgtggcggtagggaacctccaacaggcggatcgcgcctggcttcacggttcgaagacagtgtgggtctgcagatggtttctcactgtaccaccagaaaaattaaatctgactcgcctaagtccgcccagaagttttctcttatcctgaagattttatccatgatctataaattagtgcagtcaaacacatacgcaaccaagcgcgacatctattacacagattcccagctatttggtaaccagacagtcgtggacaatataatcaacgatatctcatgtatgctgaaggtgtcgcgtcgcagcctccacattctcagcacatcaaaggggctgatcgctgggaatcttaggtacatcgaggaagacggaacgaaggtgaactgcacgtgtggggctactgctgtggctgtgccaagcaatatccagggtatcaggaatctggttaccgacgccaaatttgtgcttatcgtggaaaaggacgccacatttcagcggctgctggacgacaacttctgcaacaagcttagtccctgtataatgatcaccgggaagggcgtgcccgaccttaatacacgcttactggtcaagaaactgtgggatacctttcacgtgccggtattcaccctggtagatgctgatccccatggcattgagattatgtgtatctacaaatacggctccatgagcatgtcctttgaagcacatcacttgacagttccagcaatcaggtggcttggtctgctgccttccgacttaaaacggttgaacgtccccaaggattctctgataccattgacgaagcgagaccaaatgaagctcgacagcatcttgagaaggccttacgtgacctgccagccattttggcgcaaagagatggaaatcatggccgactcaaaaatgaaagcagagatccaggccctgactttcctgtctagcgactacctctcaagggtctacctgccgaacaaactcaaatttgggggatggatatag

SEQ ID NO: 259496 - DNA, 1065 bp, Artificial Sequence
  derived and/or modified sequence
atggccttcgccccaatggggccagaggcctcgtttttcgatgtattagaccggcacagagagagtcttctcgcggctttgcggaggggtgggagggagccacctaccggcggaagtcgccttgcttcacgatttgaagattccgtgggtttacagatggtgtcacactgtaccacccggaagattaaatctgatagccccaaatctgctcagaagttctcattgatcctcaagatcttgtcaatgatctacaaattagtgcagtccaatacctacgcgaccaaacgggatatttactatactgacagccagctgttcggaaaccaaacagtggtcgataacataatcaacgatatcagctgcatgctgaaggtgtctaggagatcactgcacatcctcagcacttcaaagggactgatcgctggaaacttgcgttacatcgaggaggacggaactaaggtcaattgtacgtgtggggctactgcagtagccgtgccatctaacattcaagggattaggaacgctaaatttgtgttaatcgtcgagaaggatgccacctttcagcgcttgttggacgataacttctgtaataagttatcaccctgtatcatgatcaccggtaaaggagtgccagacttaaatactcgcttactggttaaaaaactgtgggacaccttccacgttcctgtgtttacactggtcgatgcagatccccatgggatcgagattatgtgtatttacaagtatggctccatgtccatgtcctttgaagcacatcacctgaccgtccccgcaataagatggcttggactcctacctagcgacctcaaacggttgaacgtacctaaagatagcctgattcccctgaccaaacgggatcagatgaagcttgacagtattttgagaaggccatacgtgacatgccagcccttctggaggaaggagatggagatcatggccgatagcaagatgaaagccgaaatacaggcgctgactttcctttcctcagactacctctcaagggtttacctgccaaacaaactgaagtttgggggttggatttag

SEQ ID NO: 259497 - DNA, 1666 bp, Artificial Sequence
  derived and/or modified sequence
caagggcgcagcctaggacaggggcttctggagcttctggcagccgtctgccctcatggcctttgcacctatggggcccgaggcctcgttcttcgacgttttggaccgacacagggagtccctgctggctgccctgaggagaggtggcagggagcccccaactgggggaagccgcctggcctccaggtttgaagattctgtgggtcttcagatggtatcccattgcaccaccagaaagatcaaaagtgattcaccaaaatcagctcaaaaattttctctaatccttaaaatattgtccatgatttataaattagtacagagcaacacttatgcaaccaaaagggacatatattacactgacagtcaactctttggtaaccagactgtcgtcgacaatattatcaatgacatttcttgcatgttaaaagtgtcaaggaggagtctacatatattatctacatcaaaaggtttaattgctggcaacttaagatacatcgaggaagatggcaccaaagtgaattgtacctgtggtgcaacggctgttgctgtgccatcgaatattcaaggaattcggaatttagttacagatgcaaagtttgtattaattgtagaaaaagatgcaacatttcagcggctcctagatgacaacttttgcaacaaattgtctccttgcatcatgattacgggaaagggagttcctgatctaaacacaagacttttagtcaagaaactgtgggatacatttcatgttcctgttttcactcttgtagatgctgatccacatggcatagaaataatgtgcatctataagtatggatctatgtctatgtcttttgaagctcatcatctcacagttccagctattagatggcttggtcttctcccttctgatcttaaaagattaaatgtacctaaagatagtttgattccactgacaaaaagggaccaaatgaaacttgacagtatcctgaggagaccttatgttacctgccaaccattttggagaaaagaaatggaaataatggcagactctaaaatgaaggcagaaattcaagctttgactttcctatcatcagattatctttccagagtgtacttacctaacaaattaaaatttggaggatggatataaaaataaatcagaagaacttctgattgccagaggcttttcattagttttgttttgattggcaaatactattgtggaaagaacatatattatattcttaattctgtaaaagtgaaataaaataactttccgttaattatatatttttgtcaaaacaaatgctgtactccaattttctttgcaaggccttattcttgcctctatagagacagatttctgtcctatcttctaaagcaaattataaaagaatatgttattttgacctttaaattatttttgaaaaaataatattttatacatgtcatcaaagtctacaaaatatttaccttctacgatacaactaatgttaacgcataaagtatcttactggtaacaaaaatcataatgatctgaatttgagatgttgcaaatgaattgtggtgtccggtagtttcttcttacattttcctttgcctttatactttaggggtcttactccattaattcatttgttacattagtaaaattcagtatgaataaatatttggattgatgtag

SEQ ID NO: 259498 - DNA, 1608 bp, Artificial Sequence
  derived and/or modified sequence
tctgccctcatggcctttgcacctatggggcccgaggcctcgttcttcgacgttttggaccgacacagggagtccctgctggctgccctgaggagaggtggcagggagcccccaactgggggaagccgcctggcctccaggtttgaagattctgtgggtcttcagatggtatcccattgcaccaccagaaagatcaaaagtgattcaccaaaatcagctcaaaaattttctctaatccttaaaatattgtccatgatttataaattagtacagagcaacacttatgcaaccaaaagggacatatattacactgacagtcaactctttggtaaccagactgtcgtcgacaatattatcaatgacatttcttgcatgttaaaagtgtcaaggaggagtctacatatattatctacatcaaaaggtttaattgctggcaacttaagatacatcgaggaagatggcaccaaagtgaattgtacctgtggtgcaacggctgttgctgtgccatcgaatattcaaggaattcggaatgcaaagtttgtattaattgtagaaaaagatgcaacatttcagcggctcctagatgacaacttttgcaacaaattgtctccttgcatcatgattacgggaaagggagttcctgatctaaacacaagacttttagtcaagaaactgtgggatacatttcatgttcctgttttcactcttgtagatgctgatccacatggcatagaaataatgtgcatctataagtatggatctatgtctatgtcttttgaagctcatcatctcacagttccagctattagatggcttggtcttctcccttctgatcttaaaagattaaatgtacctaaagatagtttgattccactgacaaaaagggaccaaatgaaacttgacagtatcctgaggagaccttatgttacctgccaaccattttggagaaaagaaatggaaataatggcagactctaaaatgaaggcagaaattcaagctttgactttcctatcatcagattatctttccagagtgtacttacctaacaaattaaaatttggaggatggatataaaaataaatcagaagaacttctgattgccagaggcttttcattagttttgttttgattggcaaatactattgtggaaagaacatatattatattcttaattctgtaaaagtgaaataaaataactttccgttaattatatatttttgtcaaaacaaatgctgtactccaattttctttgcaaggccttattcttgcctctatagagacagatttctgtcctatcttctaaagcaaattataaaagaatatgttattttgacctttaaattatttttgaaaaaataatattttatacatgtcatcaaagtctacaaaatatttaccttctacgatacaactaatgttaacgcataaagtatcttactggtaacaaaaatcataatgatctgaatttgagatgttgcaaatgaattgtggtgtccggtagtttcttcttacattttcctttgcctttatactttaggggtcttactccattaattcatttgttacattagtaaaattcagtatgaataaatatttggattgatgtag

SEQ ID NO: 259499 - DNA, 279 bp, Artificial Sequence
  derived and/or modified sequence
atgctctacttggaggactacctcgagatgattgagcaattgccaatggatctccgtgatcgcttcactgagatgagagagatggacttgcaggttcagaacgctatggaccaattagaacaacgagtgtcagagttctttatgaatgccaaaaagaacaagccagagtggcgcgaagagcaaatggctagcatcaagaaggattactataaagctctggaggacgcagatgagaaagttcagctagccaatcagatttacgacttacaacacttctag

SEQ ID NO: 259500 - DNA, 1222 bp, Artificial Sequence
  derived and/or modified sequence
tttttttttttttgccggagtcgagcgggtgctgctagcggaggcgccatattggaggggacaaaactccggcgacagcgagtgacacaaataaacccctggacccccttgttccctcagctctaagggccgcgatgttgtacctagaagactatctggaaatgattgagcagcttcctatggatctgcgggaccgcttcacggaaatgcgcgagatggacctgcaggtgcagaatgcaatggatcaactagaacaaagagtcagtgaattctttatgaatgcaaagaaaaataaacctgagtggagggaagagcaaatggcatccatcaaaaaagactactataaagctttggaagatgcagatgagaaggttcagttggcaaaccagatatatgacttgcagcacttctaaaagattgaaaacaccaagaagatagatagaatattcactatttctcatattgatgcaattgtggtgctctttttcatttgaaacatcttctcctaaaatatacactttaagaaatagtcatttctgtttttgcattaaagtaaattaaagcagaaaacacatgctcacttttggctaacttcagtgtatagatttcatacttatgttgtctttcctgggtacagatttattactgaacaagtacgtgtaagtaaaatgtcattggtgagcaggacacaagataaaaggtgaacaccacatatggtgtgaattgtaaatgcttataccacaaacttgaaaatgtgtcatgtagagccatggaaaatgtctagttgtttttatgtagtacacacattttaatggtgctaacaacctgggctcttttgttcatagagttattctgaaaaaaatttcataaaagacactgcctaaagataggtagaataggctgtagcttgatttactgtggaataaaaaccaaaaaaaaaaaggtcttaattgtttcagtctttaattatgtctataaacttagaaaaaggcatttacatttgaatctagactaatttgtttagtaacattcttcctcatattcaatgactgtatgtatcagtccttatttagagactgcctgctttttaattcatatagctctttggttctattctttgttttgtttattattttgttgttttattgcttgttagacctttactaaagatattttgtgtatttagaaaaaatataacataaatatatgctttttaaatatg

SEQ ID NO: 259501 - DNA, 279 bp, Artificial Sequence
  derived and/or modified sequence
atgctgtacctggaggactacctggagatgattgagcagctgcccatggacctgcgggaccgcttcacagagatgagggagatggacctgcaggtgcagaatgccatggaccagctggagcagagggtgtctgagttcttcatgaatgccaagaagaacaagccagagtggagggaggagcagatggccagcatcaagaaggactactacaaggccctggaggatgctgatgagaaggtgcagctggccaaccagatctatgacctgcagcacttctag

SEQ ID NO: 259502 - DNA, 279 bp, Artificial Sequence
  derived and/or modified sequence
atgctgtacctggaggactacctggagatgatcgagcagctgcccatggacctcagggatagattcacggagatgcgggaaatggacctgcaggtgcagaacgctatggaccaacttgagcagcgggtttccgaattttttatgaatgcaaaaaagaacaagcccgaatggagggaagagcagatggcatcaatcaaaaaggattactacaaggccttggaagacgccgatgagaaagtgcagcttgccaaccagatttatgatctgcaacacttctag

SEQ ID NO: 259503 - DNA, 279 bp, Artificial Sequence
  derived and/or modified sequence
atgctgtaccttgaggattacctcgagatgatagaacagcttcccatggatctgcgggacaggttcactgagatgagagaaatggatttgcaagttcaaaacgccatggatcagctcgagcagcgtgtcagcgagttctttatgaatgctaaaaagaataagcccgagtggagggaggagcagatggcttctattaagaaagattactacaaggccttggaagacgcagatgagaaagtccagctcgctaaccaaatctacgatctgcaacacttctag

SEQ ID NO: 259504 - DNA, 279 bp, Artificial Sequence
  derived and/or modified sequence
atgctgtacctggaggactacctggagatgatcgagcagctgcccatggacctgagagacagattcaccgagatgagagagatggacctgcaggtgcagaacgccatggaccagctggagcagagagtgagcgagttcttcatgaacgccaagaagaacaagcccgagtggagagaggagcagatggccagcatcaagaaggactactacaaggccctggaggacgccgacgagaaggtgcagctggccaaccagatctacgacctgcagcacttctag

SEQ ID NO: 259505 - protein, 1630 aa, Artificial Sequence
  derived and/or modified sequence
MPFAKRIVEPQWLCRQRRPAPGPAVDASGGSAEPPPPLQPPGRRDLDEVEAPGPEEPARAVPAPSGLPPPPPPLPAPADQTQPPHGEASVAGEESTAGIPEAAPAAGEASSAAAAAAVLLMLDLCAVSNAALARVLRQLSDVARHACSLFQELESDIQLTHRRVWALQGKLGGVQRVLSTLDPKQEAVPVSNLDIESKLSVYYRAPWHQQRNIFLPATRPPCVEELHRHARQSLQALRREHRSRSDRREQRAAAPLSIAAPPLPAYPPAHSQRRREFKDRHFLTSHPPEDEDTDVMLGQRPKNPIHNIPSTLDKQTNWSKALPLPTPEEKMKQDAQVISSCIIPINVTGVGFDREASIRCSLVHSQSVLQRRRKLRRRKTISGIPRRVQQEIDSDESPVARERNVIVHTNPDPSNTVNRISGTRDSECQTEDILIAAPSRRRIRAQRGQSIAASLSHSAGNISALADKGDTMFTPAVSSRTRSRSLPREGNRGGDAEPKVGAKPSAYEEGESFVGDHERTPNDFSEAPSSPSAQDHQPTLGLACSQHLHSPQHKLSERGRSRLSRMAADSGSCDISSNSDTFGSPIHCISTAGVLLSSHMDQKDDHQSSSGNWSGSSSTCPSQTSETIPPAASPPLTGSSHCDSELSLNTAPHANEDASVFVTEQYNDHLDKVRGHRANSFTSTVADLLDDPNNSNTSDSEWNYLHHHHDASCRQDFSPERPKADSLGCPSFTSMATYDSFLEKSPSDKADTSSHFSVDTEGYYTSMHFDCGLKGNKSYVCHYAALGPENGQGVGASPGLPDCAWQDYLDHKRQGRPSISFRKPKAKPTPPKRSSSLRKSDGNADISEKKEPKISSGQHLPHSSREMKLPLDFANTPSRMENANLPTKQEPSWINQSEQGIKEPQLDASDIPPFKDEVAESTHYADLWLLNDLKTNDPYRSLSNSSTATGTTVIECIKSPESSESQTSQSESRATTPSLPSVDNEFKLASPEKLAGLASPSSGYSSQSETPTSSFPTAFFSGPLSPGGSKRKPKVPERKSSLQQPSLKDGTISLSKDLELPIIPPTHLDLSALHNVLNKPFHHRHPLHVFTHNKQNTVGETLRSNPPPSLAITPTILKSVNLRSINKSEEVKQKEENNTDLPYLEESTLTTAALSPSKIRPHTANKSVSRQYSTEDTILSFLDSSAVEMGPDKLHLEKNSTFDVKNRCDPETITSAGSSLLDSNVTKDQVRTETEPIPENTPTKNCAFPTEGFQRVSAARPNDLDGKIIQYGPGPDETLEQVQKAPSAGLEEVAQPESVDVITSQSDSPTRATDVSNQFKHQFVMSRHHDKVPGTISYESEITSVNSFPEKCSKQENIASGISAKSASDNSKAEETQGNVDEASLKESSPSDDSIISPLSEDSQAEAEGVFVSPNKPRTTEDLFAVIHRSKRKVLGRKDSGDMSVRSKSRAPLSSSSSSASSITSPSSNVTTPNSQRSPGLIYRNAKKSNTSNEEFKLLLLKKGSRSDSSYRMSATEILKSPILPKPPGELTAESPQSTDDAHQGSQGAEALSPLSPCSPRVNAEGFSSKSFATSASARVGRSRAPPAASSSRYSVRCRLYNTPMQAISEGETENSDGSPHDDRSSQSST

SEQ ID NO: 259506 - DNA, 4893 bp, Artificial Sequence
  derived and/or modified sequence
atgccttttgccaaaaggattgtagaacctcagtggctgtgtcgtcagcgcagacccgctccaggtcctgcggtggacgcgagcggcgggtccgcagaacccccgccaccgctgcagccgcccggcagaagggacctggacgaagttgaggctcctggccctgaagaacccgccagagctgtgcccgcgccctcgggtctccctcccccccctcccccgcttcctgcacctgcagaccagacacagcccccgcacggtgaagcctccgtggccggagaggagagcaccgccgggataccagaggccgctccggcagctggagaggctagtagcgcagccgccgccgccgccgtgttgctgatgctggatctatgtgccgtttctaacgccgccctggcccgcgtactgcgacagcttagtgacgtagcacggcatgcgtgtagcttattccaggagcttgagagtgacatacagctgacgcaccgacgggtttgggccctgcaaggcaaattaggaggagtgcagcgtgtactcagtaccttggatccaaagcaggaagcagtcccagtgagtaatctggacattgaatcaaagctcagcgtgtactaccgggccccctggcaccagcaacggaacatttttctgccagctactagaccaccctgcgtggaagagctgcatagacacgcacgccagtccctccaggctcttcgcagagagcatcggtcacgcagtgatcgacgcgagcagcgggcagccgcgcctctgtccatagctgccccacccctgcccgcatacccccctgcacactcccaaaggaggagagaattcaaggacaggcactttctgacctcacatccccccgaggatgaggataccgatgtgatgttaggccagcgcccaaagaatcccatccacaatatccccagcacccttgataagcaaaccaattggtctaaggccctccccctcccgacaccggaggagaagatgaaacaggacgcccaggtcataagctcctgtatcattcctatcaacgttacaggagttggtttcgatagggaggcttcgataagatgtagccttgtgcattctcagtcggtcttacagcggaggaggaagcttcggcggagaaagacaatctcagggatccctcgacgggtgcagcaagagatcgactctgacgagtctccagtggcccgggaacgcaacgtaatcgttcataccaatcccgacccatctaatacagtgaatagaatcagcggtacgagagacagtgagtgccaaacggaagatatcctgatcgctgccccctcgaggcgaagaataagagctcagagaggccaatccattgcggcatctctttcccattcagcaggaaacattagcgctcttgcagataaaggcgacactatgttcacgcctgccgtgtcttccagaacgcgatctaggagtctgccccgggagggcaaccggggaggcgacgcagaaccaaaagtgggcgctaagccttcagcgtatgaagagggagagtcctttgtgggagatcacgaaagaactcccaatgacttttcggaggcgccaagcagtccaagcgctcaggaccaccagcctactcttggactcgcttgtagccaacaccttcatagcccacagcacaaacttagtgagagggggagaagcagactatctcggatggccgcggattcaggcagttgcgatatatctagcaattctgatacgtttggttctcctatccattgcatcagcaccgccggcgtgctcttgtcatctcacatggaccagaaagacgatcaccaaagctctagcgggaattggtccggctcttcttctacctgtcccagtcagacttctgaaaccatcccgccggcagcgagccccccattgacaggaagcagccattgcgacagcgaattatccctcaacaccgctccgcacgcaaacgaagatgcctccgtgtttgtcactgaacagtacaatgaccatcttgacaaagttagggggcacagggcaaactcgttcacatccacagtagccgacctgcttgacgaccctaacaattcaaacacaagtgattcggagtggaactatctccaccatcatcacgatgcctcttgtagacaggacttctcgcccgagcggcccaaggcagatagtttggggtgtcccagctttaccagcatggcgacgtacgattcatttcttgagaagtcgccttcagacaaagccgacacttcaagccacttcagcgtcgacaccgagggctactatactagcatgcatttcgattgcggcctgaaggggaacaaatcctacgtgtgtcactacgcagcactcggacctgaaaatgggcagggcgtgggcgcatcgcccggcctgcccgactgtgcatggcaggactatttggaccacaagagacagggaaggccaagcattagctttcgtaagccaaaggccaaaccaacacctcccaaacggtcttcttctctacggaagtcagatggcaacgctgatatcagcgaaaagaaggaacctaaaatatccagtggccagcacttacctcatagctcccgggaaatgaaactccctctggacttcgcgaacactccttctagaatggagaatgctaatctgccaactaaacaggagccatcctggatcaatcaaagcgaacagggcatcaaagaaccccagttagatgccagcgatattcccccttttaaagacgaagttgccgagtcgactcactatgccgacttgtggttgctcaacgatctcaaaacgaacgatccataccgttcactgagcaatagtagcacagccactggcacgactgtaatcgagtgcattaagtccccagagtcctcagagtcacaaacatctcagtctgagagccgggccaccactccttcgcttccatcggtagacaatgaatttaaattggctagcccagagaaactggcaggtctagcttcacctagcagcggctattccagtcagagcgaaacccctacaagctccttcccaacggcatttttctctggcccattgtctcctggagggagtaagcgcaagccgaaagtgcctgagagaaaaagcagcctgcagcagccctccttgaaggacggtactatcagtctgagtaaagatctggagttaccaattattcccccaacgcacctggatctcagcgcgctgcataatgtcctgaataaacctttccatcacaggcatcctttgcacgtgttcacacacaacaagcagaacaccgttggcgaaacgctgaggtctaaccctccccccagcctggccattactccgactatcctgaaatcggtcaatctgcggtctataaataagtccgaagaggttaaacagaaagaggaaaacaacacagacctgccatacttggaggagtcaactcttaccacagctgccttatctccctctaaaatacgcccacacaccgcaaacaaatcggtgtcgagacagtatagcacggaagacactatactctctttcttagactcatcagcagtcgagatgggacccgataagctgcatctggagaagaactccacatttgatgtcaagaatcgctgcgacccggaaacaatcaccagtgctggatctagtcttctggacagcaatgtcacaaaggatcaagtgcgcaccgagaccgagcccataccagagaacacacctaccaagaattgcgcatttccaacggaaggcttccagagagtttctgccgcgcggcctaatgatttggatgggaagataatccagtacggccctggtccagacgagaccctcgaacaggttcagaaggcacctagtgccggacttgaggaggttgcccagcctgaatcggtggatgtcataacatcgcaaagcgattcaccaaccagagccaccgatgtgagtaaccaattcaaacatcagttcgtgatgtctcgccaccacgacaaggtccccggcacaataagttatgagagtgaaatcacgagcgttaattcatttcctgaaaaatgtagcaagcaggagaacatcgcgagtggtatctccgccaagtcagcttctgataatagcaaggcggaggagactcaagggaacgtggatgaggcctctttgaaagagtcctctccgtcagacgactcaataatctctcctctttccgaggatagtcaggccgaagctgaaggggtctttgtaagtcctaataagccccgtacgacagaggacctgtttgcagtgattcatcgcagcaagaggaaagtcttagggagaaaagactcgggcgacatgtcggtgagaagcaaatcccgtgcccctctgtctagtagcagctcttctgctagctcaattaccagcccatctagcaatgtgaccaccccaaacagccaaaggagtcccggccttatctaccggaacgccaagaaaagcaacaccagcaacgaagaattcaagctgctgctgttgaaaaaaggaagccgcagtgactcaagttatcgtatgtccgcgacggaaatcttgaaaagcccaatcctccccaaaccgccaggggaactgaccgccgaatcccctcagtctaccgatgatgcccatcagggcagccagggagccgaggccctgagccctttgagtccatgcagtcctcgtgttaacgcagaggggttttcaagcaagagcttcgctacatctgcgtctgccagagtgggaagatccagagctcctcccgcagcgtcgtcctcccgatacagcgtgaggtgccgcctgtacaatacgcccatgcaggcgatttcagagggcgagaccgaaaactcagacggcagtccacacgacgataggagttctcagagctcaacctag

SEQ ID NO: 259507 - DNA, 4893 bp, Artificial Sequence
  derived and/or modified sequence
atgccctttgccaagagaattgtggagccccagtggctgtgccggcagaggaggcctgcccctggccctgctgtggatgccagcggcggcagcgctgagcccccaccacccctgcagcccccaggaagaagagacctggatgaggtggaggcccctggccctgaggagcccgcccgggctgtgcctgcccccagcggcctgcccccacctcctccacccctgcctgccccagctgaccagacccagccccctcatggagaggcctctgtggccggggaggagagcacagctggcatccctgaggccgccccagctgctggggaggccagcagcgctgctgctgctgctgctgtgctgctgatgctggacctgtgtgctgtgtccaatgctgccctggcccgggtgctgcggcagctgagtgatgtggcccggcatgcctgcagcctcttccaggagctggagagtgacatccagctgacccaccggcgggtgtgggccctgcagggcaagctgggcggcgtgcagagggtgctgagcaccctggaccccaagcaggaggccgtgcctgtgagcaacctggacatcgagagcaagctgtctgtgtactaccgggccccctggcaccagcagaggaacatcttcctgcctgccacccggcccccctgtgtggaggagctgcacagacatgcccggcagagcctgcaggccctgcggcgggagcacaggagcagaagtgacagaagagagcagagagctgctgcccccctgagcattgctgccccacccctgcctgcctaccccccagcccacagccagaggcggcgggagttcaaggacagacacttcctgaccagccaccccccagaagatgaggacacagatgtgatgctgggccagaggcccaagaaccccatccacaacatccccagcaccctggacaagcagaccaactggagcaaggccctgcccctgcccaccccagaggagaagatgaagcaggatgcccaggtgatcagcagctgcatcatccccatcaacgtgactggagtgggctttgaccgggaggccagcatccgctgcagcctggtgcacagccagagcgtgctgcagaggaggaggaagctgcggcggaggaagaccatcagcggcatcccccggcgggtgcagcaggagattgacagtgatgagagccctgtggcccgggagagaaatgtcatcgtgcacaccaacccagaccccagcaacacagtgaaccgcatcagcggcacccgggacagcgagtgccagacagaggacatcctgattgctgcccccagcagaagacgcatccgggcccagaggggccagagcattgctgccagcctgagccacagcgctggcaacatcagcgccctggccgacaagggggacaccatgttcaccccagctgtgagcagcaggaccaggagccgcagcctgccccgggagggcaacagaggaggagatgctgagcccaaggtgggcgccaagcccagcgcctatgaggagggggagagctttgtgggggaccacgagaggaccccaaatgacttcagcgaggcccccagcagccccagcgcccaggaccaccagcccaccctgggcctggcctgcagccagcacctgcacagcccccagcacaagctgtctgagcggggccgcagccggctgagcaggatggctgctgacagcggcagctgtgacatcagcagcaacagcgacaccttcggcagccccatccactgcatcagcacagctggggtgctgctgagcagccacatggaccagaaggatgaccaccagagcagcagcggcaactggagcggcagcagcagcacctgccccagccagaccagcgagaccatccccccagctgccagcccccccctgaccggcagcagccactgtgacagcgagctgagcctgaacacagcccctcatgccaatgaagatgcctctgtgtttgtgacagagcagtacaatgaccacctggacaaggtgcggggccaccgggccaacagcttcaccagcacagtggccgacctgctggatgaccccaacaacagcaacaccagtgacagcgagtggaactacctgcaccaccaccatgatgccagctgccggcaggacttcagccctgagcggcccaaggctgacagcctgggctgccccagcttcacctccatggccacctatgacagcttcctggagaagagccccagcgacaaggctgacaccagcagccacttctctgtggacacagagggctactacacctccatgcactttgactgtggcctgaagggcaacaagagctatgtgtgccactacgccgccctgggcccagaaaatggccagggcgtgggcgccagccctggcctgcctgactgtgcctggcaggactacctggaccacaagaggcagggccggcccagcatctccttcaggaagcccaaggccaagcccaccccacccaagaggagcagcagcctgaggaagagtgatggaaatgctgacatcagcgagaagaaggagcccaagatcagcagcggccagcacctgccccacagcagccgggagatgaagctgcccctggactttgccaacacccccagcaggatggagaatgccaacctgcccaccaagcaggagcccagctggatcaaccagagcgagcagggcatcaaggagccccagctggatgccagtgacatcccccccttcaaggatgaggtggccgagagcacccactatgctgacctgtggctgctgaatgacctgaagaccaatgacccctaccgcagcctgagcaacagcagcacagccaccggcaccaccgtgattgagtgcatcaagagccctgagagcagcgagagccagaccagccagagcgagagccgggccaccacccccagcctgcccagcgtggacaatgagttcaagctggccagccctgagaagctggccggcctggccagccccagcagcggctacagcagccagagcgagacccccaccagcagcttccccacagccttcttcagcggccccctgagccctgggggcagcaagaggaagcccaaggtgcctgagaggaagagcagcctgcagcagcccagcctgaaggatggcaccatcagcctgagcaaggacctggagctgcccatcatcccccccacccacctggacctgagcgccctgcacaacgtgctgaacaagcccttccaccaccgccaccccctgcacgtgttcacccacaacaagcagaacacagtgggggagaccctgcggagcaaccccccacccagcctggccatcacccccaccatcctgaagtctgtgaacctgcggagcatcaacaagtctgaggaggtgaagcagaaggaggagaacaacacagacctgccctacctggaggagagcaccctgaccacagctgccctgagccccagcaagatccggccccacacagccaacaagtctgtgtcccggcagtacagcacagaggacaccatcctgtccttcctggacagcagcgctgtggagatgggccctgacaagctgcacctggagaagaacagcacctttgatgtgaagaacagatgtgaccctgagaccatcaccagcgctggcagcagcctgctggacagcaatgtgaccaaggaccaggtgaggacagaaacagagcccatccctgagaacacccccaccaagaactgtgccttccccacagagggcttccagagggtgtctgctgcccggcccaatgacctggatggcaagatcatccagtatggccctggcccagatgagaccctggagcaggtgcagaaggcccccagcgctggcctggaggaggtggcccagcctgagagcgtggatgtgatcaccagccagagcgacagccccacccgggccacagatgtgagcaaccagttcaagcaccagtttgtgatgagccgccaccacgacaaggtgcccggcaccatctcctatgagagcgagatcacctctgtgaacagcttccctgagaagtgcagcaagcaggagaacatcgccagcggcatcagcgccaagagcgccagtgacaacagcaaggccgaggagacccagggcaatgtggatgaggccagcctgaaggagagcagccccagtgatgacagcatcatcagccccctgtctgaggacagccaggccgaggccgagggcgtgtttgtgagccccaacaagcccaggaccacagaggacctgtttgctgtgatccacaggagcaagaggaaggtgctgggcaggaaggacagcggggacatgtctgtgcgcagcaagagccgggcccccctgagcagcagcagcagcagcgccagcagcatcaccagccccagcagcaatgtgaccacccccaacagccagaggagccctggcctcatctacagaaatgccaagaagagcaacaccagcaatgaggagttcaagctgctgctgctgaagaagggcagcagaagtgacagcagctacaggatgtctgccacagagatcctgaagagccccatcctgcccaagcccccaggagagctgacagctgagagcccccagagcacagatgatgcccaccagggcagccagggcgctgaggccctgagccccctgagcccctgcagcccccgggtgaatgctgagggcttcagcagcaagagctttgccaccagcgccagcgcccgggtgggccgcagccgggcccccccagctgccagcagcagccgctacagcgtgcgctgccgcctgtacaacacccccatgcaggccatcagcgagggggagacagagaacagtgatggcagcccccatgatgacaggagcagccagagcagcacctag

SEQ ID NO: 259508 - DNA, 8761 bp, Artificial Sequence
  derived and/or modified sequence
ggtggcgacggcgagcacagaaacgatggagttgagccagtcgaccctggttggaagcaagtgagaagagaccaggcgcacccctaaatttctgtgcggagcgcttgtcatcctccccagggaacggtgcacccaaaggaggactggctggactgatttgctagggagagggcggggaagaggaggcaaggtgagcagagaagccccctgcgtatccggactgccagatcgcgcttttgccggactcctgccccctccctgctcaggtgggcgcgcccggtctccagctcacaggggcgcttggaggagaccagaaagtcgccgcctggctgcgcgggatgcctttcgccaagcggatcgtggagccgcaatggctgtgcaggcagcggcgccctgcgcccggcccagcagtggacgcgagcggaggcagcgctgagccgccgccgcccttgcagccgccgggccggagggacctggacgaggtcgaggcgccagggccagaggagccagcccgcgccgtccctgcaccttcagggctgccaccgccgccgccgccactgcccgcgccggccgaccagactcagccgccgcacggagaggcgtccgtggctggcgaggagagcacggcggggatcccggaggcggcgcccgcagccggcgaggcgtcctcggcggcggcggcggcggccgtgctgctcatgctggacctatgcgcggtcagcaacgccgctctggcccgtgtcctccggcagctctcggacgtggcccggcacgcttgcagcctcttccaggagctcgagagcgacatccagctcacccaccgccgcgtctgggcgctgcagggcaagctcggcggcgtgcagcgcgtcctcagcacgcttgaccctaagcaggaggcagtgcccgtctccaacctggacatagagagtaagctgagtgtgtactaccgcgccccgtggcaccagcagcgcaacatcttcctcccagccacaaggccaccctgcgtggaggagctgcaccgccacgcccggcagagcctgcaagccctgcgcagagaacaccggagccggagcgatcgccgagagcaaagagcagctgcccccctttccattgcagctcctccactgccagcctaccctccagctcacagccagaggaggcgtgagtttaaggaccgtcactttttaacgtcccatcccccagaggatgaagatacagatgtcatgttagggcagaggccgaaaaacccaatacacaatatcccttccacactggacaagcagaccaactggagcaaagcactacctctcccgacgccagaggagaagatgaaacaagatgcccaagtgatttcttcttgcattattcccatcaatgttactggagttggctttgacagagaggctagtatacgctgctctctggttcattcacaatcggtactacagcggagacgaaaattgaggaggaggaaaaccatctcgggtatccccagaagagttcaacaagaaatagattctgatgaatcaccagtggccagggaaaggaatgtgattgtgcacacaaacccagacccctccaacactgtcaataggatatccggaaccagggactctgagtgccaaaccgaggatattctgattgctgccccatccagaaggagaatcagagctcaaaggggtcaaagcattgcagcttccctttctcattctgctggcaacatttctgccctagcagacaaaggtgacaccatgtttactcctgcagtgagcagccgcacaagatctcggagccttccccgggaaggtaatagaggtggggatgctgagcccaaagttggcgctaaaccctcagcatatgaagagggagagtcttttgtgggtgaccatgaaagaacccctaatgatttcagtgaggctccaagcagcccgagtgcccaggaccaccagcctactttgggcctggcctgctctcaacatcttcacagcccccagcacaaattaagtgagaggggaaggtcacgtctgtcccgaatggctgctgactctggcagctgtgacatctcctccaactcagacacgtttgggagccccatccactgcatctccacggctggcgtcctccttagcagccacatggaccagaaagatgaccaccagtcatccagtggcaactggagtgggagcagctccacgtgcccctcgcagacctcagaaaccatccctcctgcagcttctcctccactcactggctcttcacactgtgactcggagttgtcactaaacacagcccctcatgccaatgaggatgccagtgttttcgtgacagagcaatacaatgaccacttggataaagtgagaggccatcgggcaaactcctttacctccactgttgcagacctgctggatgatcccaacaacagcaacacaagtgacagtgagtggaattacctacaccaccaccatgatgcctcctgccgccaggattttagtcctgagcgtcccaaggcagacagcctgggctgcccaagcttcacaagcatggccacttatgacagctttctggaaaagtctccatcagacaaagcggacactagctctcacttttcagtagacacggaaggatactatacctccatgcactttgactgtggtctcaaaggtaataagagctatgtctgtcactatgcagccctgggcccagagaatggccagggtgtaggggcttcccctggtcttccagattgtgcctggcaggactacttagaccacaagaggcagggaagaccaagcatctctttcaggaaaccaaaggcaaagccgaccccacctaaacgtagctcatcattgaggaagtctgatggaaacgcagatatttctgagaagaaagaaccaaagataagcagtggtcagcacctgcctcacagttccagggaaatgaagctgcctcttgatttcgccaacacgccttctcgaatggaaaacgccaatcttcccaccaagcaggaaccttcttggataaaccagagtgaacaaggcattaaggaacctcagttagatgcttcggatattccaccattcaaagatgaagttgccgaatccacacactatgcagacctctggctcctaaatgacttgaaaacaaatgatccttatagatctctatctaattcaagcaccgctacgggtaccacagtcattgaatgcatcaaatctccagagagctctgaatcccaaacatcacaatcagaatcaagagccaccaccccatctcttccttctgttgacaatgagtttaaactggcttcaccagaaaagctggctggcttggcatctccatcaagtggctattcaagccagtctgaaacgccaacatcctctttccctacagctttcttttcaggtccattgtctcccggaggtagcaaaagaaaacctaaagtcccagaaagaaaatcctcactacagcaaccctctttaaaagatggaactatatcactgagtaaagaccttgaacttccaattatacctcctacccatcttgatctaagtgctcttcataatgtcttgaacaaaccattccaccaccgtcatccactgcatgtttttactcataataagcagaacacagtaggagaaacactgaggtcgaatcctccaccgtcccttgcaattacaccaacgatcctgaaatctgttaaccttaggtccatcaacaagtctgaagaagttaagcaaaaagaagaaaacaatacagatctcccttatttagaggaaagcacactcacaacggctgccttgtctccaagtaagattaggccgcatacagcaaataaatcagtatctcgtcaatactccactgaagacaccatactgtcctttttagactcttctgcagttgagatgggaccagataaactacatttagaaaaaaactctacttttgatgtgaagaatcgctgcgatccagaaaccataacatcagctggtagcagtcttctagattcaaatgtcacaaaagaccaagtgcgtacagagactgagcctattccagaaaacacgccaaccaaaaactgtgcttttcccacagaaggatttcagagggtctctgctgcccgcccaaatgatttggatggtaaaataatacaatatggacctggtccagacgaaactctagaacaggtacagaaggcaccctctgcaggtctggaggaagttgcacaacctgaatctgtggatgtaatcacatctcagtcagactcaccaactagagcaacagatgtaagcaatcaatttaagcatcaatttgttatgagccgccaccatgacaaagtgcctggtactatcagctatgaatcggagataacatctgtaaattcattccctgaaaaatgttccaagcaggaaaatattgcttcaggtatttcagccaaaagtgcctctgataacagcaaagcagaggagacccaaggaaatgtggatgaggcttcattgaaagaatcatcaccgagtgatgactccatcatttcaccacttagtgaagactcccaagctgaagcagagggtgtgttcgtgtctccaaacaaacctcgaacaactgaggatttatttgcagtcattcacagatccaagaggaaagtacttggaagaaaagattccggggacatgtctgttcgaagcaaatcgagagctcccctcagcagtagcagcagcagcgccagttccatcacttcacccagcagtaatgtgacaacccccaacagccagaggtctcctggtctcatataccgaaatgccaaaaagtccaacacatccaatgaagagtttaagctgttactgctcaagaaaggcagtcgctcagattctagttaccgcatgtctgccactgagatcctgaagagccccatactgcccaaacctcctggggagctcacagcagagtcccctcagagcaccgatgatgcccatcaggggtcacaaggggctgaggcattgtccccactctctccatgctccccacgagttaatgcagaaggcttttcctcgaagagctttgccacctcagcatcagcaagggttggacgttctcgggcccctcctgcagccagcagcagccgctacagtgtccgctgccggctgtacaatacgcccatgcaggcaatctccgagggagagacggaaaattctgacgggagcccacatgacgaccgttcctcccagagttcaacatagactgcctgtaccaggctgcctggcaaaggccaaaacccttactcacatgaggatggaggaacagaacagaggacttgggaaaagtctcaacttgatggggtagcatcactgctaagcaatgaatgaatttctaaatacagtatgtgctgggtaaacagaaagtggtttagacattcttgattagtttccatattttaagtagctgcagtctttcatgtttttctttagcatagtttgatttacgcaatctccttccttgtgaaaatagaggatacaaaattgtctaattttcatgacacctagaaaacgttttcccagagctgcctattcagaaactaaagccctcactgtcattattctttaagaagatgaaattactctggatgtttggtatttttttacattaaaacaaactaaagcaaaatttagaagaaagaactacacatatgtaaataccatatttttgataaaaatgtgtaaatagatttatcaatgatgagtggacatgtggtcaattatctactgcacaccaactgtttatagaatacacaaaaataaaatgtaataactgtattctgtgaataccattttcatatcaaatgccatatttaaatgtccaccaatatgatttctgagtggtaaacctcaaatatgaattttaaactggtgaactaaaggaaatcttgaggtcatatactgaaatatgaataaattaaaataatgaattcagatctaatcatttttatgacaaattgcagcaccaaacaaactaatagcaacccatggctgtgatttgttgtgtggtaatttggacagaatgaaaagcatgcttttgattttttttttaatcagtgagagaagtcatcattctcaacacaaagccctgaacaacagcatttgacagtgtcctttagattttaattttttcaatggattgctttaaagagaatgagtagggaaaatagtagttaattttaggttatgttttatattaggctactggggacataaacggtcataactaatgactgtaatcattaaactccttaaacagtttagaaattagctccaggttcttaaactaacaaaaataaaacctaagcatgccacagagctattgattaatcagtaagtacctgtaatgagttttcagtgaagctttctctctgtgctgatgagattcatgctacctaaaaattaacagaaatgacactgtgaacaatgtagttggaaaataggtatgtgtatatgcattatttatactcattgttaaactgggaatggggaacagctctggttcacaatactacatacaactgagtttttgtctggttttactatagtgtctgcttgatggcaaaaggggagggtggagggtgggagaggaaatgtcagggcatgtgctctgataaaataaaggcagggaaacaagctgaattacttgaaattacttgaattttcttgtcttaaaactgaaaaaaaaatgtagttacacgttaaaatctgcaaatggtttttacacctctgattttaacatgaacttatactaatgtttggaatcttatgtcagaaatataagcagctatgtacttagaataggttttgaatgggagaggtagaacagagagagaattaagaagggatctgacttataaaagactagaatgtgattagagtgatagaacataccaatgttaccaagaaattgacaagctgctggctttaagcttatgcaagtggtagttgggaaagtaggaggtgtggaagagggtttgcattttggattaattcatgcaaaatgaaggaggaagcctggtctaagaagatactgtctttcaatagaaatgatttctaaactgctacagattaagaatagataatctgattgctgttgttttgtttgtttggaaagaaaaaaaatgtctggcttcttctactatttgttttcactaccaaactgtgttactaaatttcttgtcatccttgtatgtaaaatgggtgctgggggtggaggggtataagaggagggagagtcagagagagtgtgtatgggtgtgtgtgagtgtgagtgtgtgtgtacgcacacacactggggatagataagctacctggtaaagggtttgaacatttacaaaatgtcacactttttcttaaaagaaaaatattttggggtttgaataaaatggaccaccatttctcattggaacccattaattaagaaaaccagcatggtttgacaccacatgggaacatgaataaatctgtctcatgatttgaaaagtacaccttgcaaagttttaaaaataaagtttttaggcaaatgcgataagaaaccgtcatttccagtcacagtaggcgatctttcgtaatttcataaaagcagttcgtttgcagtatggcttttgtgtagttaggggttttttaagtgtgaagaaaggtatgtgggctttaaaagtgattctaaatcttgaatagaaaacacatgaattggctttaataaaaatgtcacctttttattattgacattaagtaatggtaccatatattttttaaaatacatattgacttgaattgtgaggcaataagataccttctatatgtaatgatcacagaactaacccttataatatagttttacttattttgtttactctaaaaatctatagcagagtttctctattttatatttcatagatttaaaaaacccaaataaagatggatttaaaattcactgtggaaaagagtattgagttacaaactgagaagaaaaagcaggaagttccctaataatctggaatattctacatggcttgattacatagcaaacaagaccaagatttagggctgtcttaaacatcactgccgtcttgaagcagggtacacacgttaggtattgtgaagaacatcaatccgaacttttcttctgttgtttgcactgatgcgattttttgttcttttatgtttatacaacgtatctatgttgtgtaggggaaattttttcattttttaaaaattctactttggttttgttgttgttttgatttgtttttggctaagtagaggacatggactagttgtagcaaacagaacatgctgtttgctcttgccaaaggtcagtgagtgagtgcatttgctgcagtggtggcacgtagagaactagatggtaataaagatttaaaactatgaagaaggttacagtgtaactattttggtactagaaccagttcatgctggccgaaacgacaatggtttatggacttgcatccattttgtatttttgtaatatttgtaaatatgaactttttaaattgctgcaaagatggtttcttttgtaagatgttttcaacgtttacattcaatccaagcctttgtatattttagagctgtgcaacactttaagtcttgtatttatttttagtaaaaatggtgacagtttcattgtgaacccctctcaaaaaaaatgtatcagaaaagtttgattacctagaaagtgtgtatagaaactgcaaataaacgtgactgcaattaaa

SEQ ID NO: 259509 - DNA, 4893 bp, Artificial Sequence
  derived and/or modified sequence
atgcccttcgccaagcggatcgtggagccccagtggctgtgccggcagagacgccctgcacctggtccagctgtggatgccagcggcggcagcgcagagcccccccccccactgcagcctcccggccggcgtgacctggacgaggtggaagcacccgggcctgaggagcccgcgagggcagtgcccgctccaagcggactcccccccccacctccacccctccccgctcccgcagaccagacacagcccccccacggcgaggcatctgtagcaggagaagagtccacggccggcattcccgaagcggcgcccgccgcaggtgaggcctcctccgctgctgccgccgccgccgtgttgctgatgcttgacttatgtgccgtgtcaaatgctgcactcgcccgggtactgcgacaattgtccgatgtcgcccgccatgcttgcagcctattccaggagcttgagtcggacattcagctcacccaccgacgcgtttgggcactgcagggtaagctcggcggcgtgcagcgagtgctcagcaccctcgatccgaaacaggaggccgttcctgtgtcaaatttagatatagaatctaaactcagcgtgtattaccgggccccttggcaccagcagcgaaatattttcctccccgcaacccgccctccttgcgtcgaagagctgcatagacacgctcggcagagtcttcaggctttaagaagggagcatcggtcacgatctgatcgaagagaacagagagcggccgcacccttgtctattgctgcacccccgcttccagcctacccccccgcccactctcagaggagacgtgagtttaaggaccgacacttccttacatcacacccccctgaagacgaggacacagacgtcatgttaggtcagaggccaaagaaccccatccacaacatcccctctactttagacaagcagaccaattggagtaaggcactgcctcttccaacccctgaggagaaaatgaagcaggatgctcaggtcattagtagttgtattatcccgatcaatgtgactggggtcggatttgacagagaagcatctataagatgctctctagtgcatagccagtccgtccttcagcgacgcagaaagctgcgacgccggaaaactatttctggaataccaagacgcgtccaacaggaaatcgatagcgacgagtccccagttgcgcgggaaaggaatgttattgtgcacaccaatcccgacccaagtaataccgtgaataggatctcagggacgagagactcagagtgtcaaactgaggacatcttaattgcagcgccaagccgcagaagaatccgggcacaacgtggccagtccatagcagcaagcctcagccatagcgctggtaacattagcgctctggccgacaagggagacacaatgttcacaccagctgtctcatcccgcacccgctcgcgcagcttgcctagggagggaaatagggggggtgacgccgagcccaaagtgggagccaagccgagtgcctatgaggagggagaaagtttcgtgggcgatcatgagcgtacgcccaatgacttctctgaggccccaagcagtcccagtgcacaggaccaccagcccactctgggcttggcgtgctcccaacacttgcacagtccacagcacaagttatctgaacgcggaagatctcgcctcagccggatggccgcggattctggctcctgtgatattagctcaaactccgacacatttggatcccctattcactgcattagcaccgctggcgtcctcctcagttcccacatggatcaaaaagacgaccatcaatcgtccagtggaaactggtctggctcatcgtctacatgcccgtcgcaaacaagcgagaccatcccgcctgccgcatcaccccccctgaccggaagctctcattgcgactcagagctcagccttaacactgcacctcatgccaatgaggatgcctccgtgttcgtgacagagcaatacaacgaccacctcgacaaggtgaggggccatagagctaacagcttcacaagtaccgtcgctgatctcctggacgacccaaacaactccaacacgagcgatagcgaatggaattacctgcaccaccaccatgatgccagctgccgtcaggacttttcgccagagagacccaaggctgatagtttgggctgtccatcatttacaagtatggcaacatacgattcttttctcgagaaatcgccatccgacaaagcggacacttcaagccacttttccgtggatactgagggctactatacatcgatgcacttcgattgtgggctgaaaggcaataagagttatgtctgtcactacgccgccttagggcccgagaatggccaaggtgtgggagcttctcctggtctcccagactgcgcatggcaggactatctggaccacaagaggcagggtagaccctcaatctcctttcgtaagcctaaggccaaacctacacctccaaaaaggtcctctagcctgcgtaagtcagacgggaatgctgacatttcagagaagaaggaacctaagatatcaagcggccaacacctcccacactccagtagggaaatgaagcttccactcgactttgctaataccccctcacgcatggagaacgcaaatctgcctaccaaacaagaacctagttggatcaatcagtccgagcaggggattaaagagccacagctcgatgcctctgatatccccccttttaaagacgaagttgccgaaagtactcactatgcagacctgtggctgctgaacgacttaaagaccaacgacccttacaggagtttgagcaactccagcacagcaacaggcactacggtgatcgaatgtattaagtcaccagaatcttctgagagtcaaacaagtcaaagcgagtcccgggccaccactccgtcactgccatcggtggataatgagttcaagcttgcgtctccagagaaacttgccgggctcgcctctccttccagcgggtattcgagtcagtcagagacacccacttcaagctttcctactgccttcttcagcgggcccctctcaccaggtggcagtaaacgtaagcccaaggttcctgaacgaaaatcaagcctccagcagcctagcctaaaggatggtacgataagtctctctaaggatttggagctgccaattattccacccactcacctggacctctccgccctgcataacgttcttaataagccctttcatcacaggcatccactgcacgtgttcactcacaataaacaaaataccgtgggagagacgctccgatctaatcctcctccctctcttgctatcaccccaaccatactcaagtccgtgaatttgaggtctattaacaagtctgaggaggtgaagcaaaaggaagagaacaataccgaccttccatatcttgaggagtcaacactcactacagccgcgctttcgccctctaagatcaggccacatacagccaacaagagcgtgagccggcagtactcgaccgaagacacaatcctgagttttctcgactctagtgctgtcgagatgggtcccgataagctgcacctcgagaaaaactccactttcgatgtaaaaaaccgatgcgacccggagaccattacgtcagccggttctagcctgctagactccaacgtcaccaaagaccaggtcaggaccgagaccgaacccattcccgagaatacacctactaaaaattgtgcgtttccgacagaaggctttcagcgagtttccgcagctaggcccaatgacctggatgggaagatcatacaatatggccctggcccagacgagacgttggagcaggtgcaaaaggcaccctctgcgggcctagaggaagttgcacaacccgagtcagttgacgttattacgagccagtccgattcacccaccagagctacagacgtcagcaaccagttcaaacatcaattcgttatgagcaggcaccacgacaaggtgccaggcacaatttcctatgagtccgaaattacctctgtgaatagcttccctgagaaatgttctaagcaggagaacatcgcctccggtattagcgcgaaaagcgcctccgacaatagtaaagctgaggaaacccagggcaatgtagacgaagcctcactcaaggagagttcacccagtgatgatagtatcataagtcctctttcagaagactctcaagcagaagccgaaggcgttttcgtgtcacccaacaaaccacgtaccacagaggatctatttgctgtaattcaccggagtaaacgtaaggtgctgggccggaaagactcaggtgacatgtctgtgagatccaaatctcgtgcgccactcagttctagctcaagcagtgcatccagtatcacgagcccctctagtaatgtgacaactcctaatagtcagcgcagccccgggcttatctataggaatgctaagaagtccaataccagcaacgaggaatttaagctgctcctcttgaagaaaggttccaggagcgattcctcgtatcggatgtcagctactgaaatcctgaagagcccaattctgccaaaaccccctggggagctgactgccgagagcccgcagtcaacagacgatgcccaccaaggtagccagggcgcggaagctctgtcccccttatctccttgcagccccagagtcaacgccgaagggttctctagcaagtcctttgccacctccgcgagcgccagggtgggccgatcacgggctcctcctgcagcatccagctcacggtactccgtgagatgtcggctgtataacacacccatgcaggctatctctgaaggagaaacagagaattccgacggcagtccgcacgacgataggtcttctcaatccagcacgtag

SEQ ID NO: 259510 - DNA, 4892 bp, Artificial Sequence
  derived and/or modified sequence
atgcccttcgccaagcgcatcgtcgaaccacaatggctttgccgccaacggcgacccgcaccaggacccgctgtcgacgcaagcggaggctcagcggagcctccaccacctctgcagcccccaggaaggagagacctggacgaggtagaggcccctggccctgaagaaccagcacgggcagtccccgctccttctgggctgcctcccccacctcctccgctgcctgcaccagcggaccagactcagcctcctcatggggaggcgagcgtggcaggagaagagagcaccgcaggcatcccagaggctgctcctgccgctggggaggcttccagcgcagcagcagccgctgctgtactgctcatgctggacctatgcgcagtcagtaacgctgccctggccagggttctgcgccagctctcagacgtggcaagacatgcatgcagtctgtttcaggaactcgaatccgatattcagctgactcacagacgcgtctgggctctgcaggggaaacttggcggagtccagcgggtcctgagtaccctcgatcctaagcaggaggccgtgcccgtgtctaatctggatattgaatctaagctgtctgtctactaccgcgcaccgtggcaccaacagcggaatatctttttgcccgctacccgaccaccttgcgtagaagagctccatagacatgctaggcagagcctacaggcgctcagacgagaacaccgctcacggtcagacaggagagagcaacgtgccgctgccccactttctatagccgcacctcctttgcctgcgtaccctcccgcacattcacaacgaagaagggagtttaaggatcggcattttcttacatcacaccctcccgaggacgaagacaccgatgtgatgttgggccagcgccctaagaaccctatccacaacatcccatctactcttgacaaacaaaccaattggtccaaagctctgcccttgcccactccggaggaaaaaatgaagcaggatgcccaggtaatctcgtcatgtattattcccatcaatgtaaccggcgtcgggttcgatagagaggcttctattcgatgttcgctcgtccattcacaaagcgtgctgcaacgtagacgtaagcttaggaggagaaagaccatttccggcatccctcgtcgggttcagcaggagattgactccgacgagagccccgtggcgagggaacggaacgtaattgtgcacactaatccagacccctctaataccgttaatcggatctccggcactagagattcggagtgccagaccgaggatattttgatagccgctccatcccggaggaggatcagagcccaaagagggcagtccattgccgcatctctgagccactccgccggaaatatctcagctctggcagacaagggcgacaccatgtttacacccgctgtcagctcccgaaccagatcgcgcagcctgccacgcgagggaaacaggggtggggatgcagagccaaaagtcggcgctaaacctagcgcctacgaagaaggggaatctttcgtgggagaccatgagagaacaccaaatgattttagtgaagccccttcaagcccatccgcacaagaccatcagccaacattgggcctggcctgttcccagcacctgcattctcctcaacacaagctttcagagagggggagatccagacttagtcgcatggcagccgacagcggctcttgcgatatcagctccaattctgacacattcggctcccccatccattgtatatcaacagccggagtcctgctgtcgtctcacatggatcagaaggatgatcaccaatcctcatccgggaactggtctggcagcagcagtacctgcccatcccagacgagtgagacgataccgcctgcggcatccccccctctgaccgggagctcacattgcgattccgaacttagtttgaatacagcccctcatgccaacgaggatgcttctgtgttcgtcaccgagcagtacaacgaccacctagataaggtaagagggcaccgggctaatagctttactagcacggtggcggaccttctggacgatcccaataactccaacacctcggacagcgagtggaactatctgcaccatcatcatgatgcctcctgccggcaggacttttctcctgagcgcccaaaggcagattcactcgggtgccccagtttcacatctatggctacatacgacagttttctggagaagtcacccagtgataaggcagatacatcgagccacttcagcgttgacaccgagggctattacacatcgatgcacttcgattgtgggcttaagggcaacaagtcgtatgtgtgccattatgctgcgctggggcctgaaaatgggcagggggtcggcgcaagcccgggtctccctgactgtgcctggcaggactatctcgatcataagcgccagggacggccaagtatttccttccggaagcctaaagccaagccaaccccgccaaagcgcagctcttcactccgaaagtctgacggaaatgcagatatatcagagaagaaagagcccaagatcagctccggacagcacttgccccatagcagccgcgagatgaagctgcccttggacttcgccaacacaccctcccgcatggagaatgctaatctccctacaaaacaggagccaagctggatcaaccaatcagagcaaggaatcaaggaaccccagctcgatgctagcgacatccctccttttaaagacgaggtcgcagagtccacacactatgccgacctctggctccttaacgacctaaagactaatgacccataccggagcctgagcaactctagtacagcaaccggtactaccgtcatagaatgcataaaatcacccgagagctctgagtcacaaacatcacagtctgaaagccgggctaccaccccttctctgccttccgtggacaacgaatttaagctcgcatcaccagagaagctggctggtctggccagtcctagttctggttacagcagtcaatccgaaaccccaacatccagctttccgacggcttttttcagcgggccattgagtccaggaggatctaaaagaaagcctaaagtgccagagagaaagagttcactccagcagcccagtctgaaggatggcacaatcagcctctccaaggacctggaactccccataatccctccgactcacctcgacctctccgcgctgcataatgtactgaataagccattccaccatcggcacccacttcatgtgttcacccataataagcagaacactgttggagaaactctgcgatccaatcctcccccttcactggcaataactccaacgattttgaaatcggtgaatcttaggtccatcaacaaatcggaagaggttaagcagaaggaagagaataataccgacttgccctatcttgaagagagcactctgaccaccgcagcactctctccaagtaagatcaggcctcacaccgccaacaagtcggtctctcgccagtatagcaccgaggatactattctcagctttctggatagttcagctgtggaaatgggccctgataaactgcacttggagaaaaacagcacattcgatgttaagaatagatgcgaccccgagacaatcacatccgcgggaagcagcctcttggactcaaacgtgacaaaagatcaggtgagaactgaaacagaacctattccagagaacacccctactaagaattgtgcattccccaccgaagggttccagagggtcagcgccgctaggccaaacgacctcgatggcaagatcatccaatacggacctggcccagacgagaccctcgagcaggtccaaaaggcgccatcagctgggctcgaggaggttgcccagcctgagtccgtggatgtgatcacatctcagtcagactcacccacacgcgcaactgacgtgagtaatcaattcaagcaccagtttgttatgagccgacatcatgacaaggtccctggtacgatcagctacgagagtgagatcacctctgtcaattcctttcctgaaaagtgctcgaaacaagaaaatatcgcttcagggatttctgctaagtcagccagcgataactctaaagcggaggagactcaggggaatgtggacgaagcgagcctcaaggagtccagcccgtctgacgacagcatcatttcaccactgagcgaggatagccaggcggaggcagaaggggtgtttgtcagcccaaataagccacgtacaactgaggacctctttgcggtgatacaccgttcaaaaaggaaggtcctagggaggaaagattccggagacatgtccgtgcgctctaagagtcgagcccctctcagctcctcatcttcatccgctagctcaattacctccccatccagcaacgtcacaacccctaatagccagcgctctcctggacttatctatagaaacgccaaaaagtccaatacgtcaaacgaggagtttaagctgctcctgctaaagaagggctcgagaagcgattcgtcttatcgaatgtcagctactgagatcctcaagtccccaatactccctaaacctcccggtgagcttaccgccgagagcccacagagtaccgacgatgcccaccaggggtcacaaggtgctgaggcattgtcccccctgtctccttgctccccccgagtaaatgccgaaggttttagcagcaagagctttgcgaccagtgccagcgctcgggtcggcagaagccgcgctccacccgctgccagcagctctagatatagtgtccgttgccggctgtataatacccctatgcaggccatttcggagggcgagacagagaacagtgacggctccccacatgatgataggtcctctcagtcttcaaccta

SEQ ID NO: 259511 - DNA, 4893 bp, Artificial Sequence
  derived and/or modified sequence
atgcccttcgccaagagaatcgtggagccccagtggctgtgcagacagagaagacccgcccccggccccgccgtggacgccagcggcggcagcgccgagccccccccccccctgcagccccccggcagaagagacctggacgaggtggaggcccccggccccgaggagcccgccagagccgtgcccgcccccagcggcctgccccccccccccccccccctgcccgcccccgccgaccagacccagcccccccacggcgaggccagcgtggccggcgaggagagcaccgccggcatccccgaggccgcccccgccgccggcgaggccagcagcgccgccgccgccgccgccgtgctgctgatgctggacctgtgcgccgtgagcaacgccgccctggccagagtgctgagacagctgagcgacgtggccagacacgcctgcagcctgttccaggagctggagagcgacatccagctgacccacagaagagtgtgggccctgcagggcaagctgggcggcgtgcagagagtgctgagcaccctggaccccaagcaggaggccgtgcccgtgagcaacctggacatcgagagcaagctgagcgtgtactacagagccccctggcaccagcagagaaacatcttcctgcccgccaccagacccccctgcgtggaggagctgcacagacacgccagacagagcctgcaggccctgagaagagagcacagaagcagaagcgacagaagagagcagagagccgccgcccccctgagcatcgccgccccccccctgcccgcctacccccccgcccacagccagagaagaagagagttcaaggacagacacttcctgaccagccacccccccgaggacgaggacaccgacgtgatgctgggccagagacccaagaaccccatccacaacatccccagcaccctggacaagcagaccaactggagcaaggccctgcccctgcccacccccgaggagaagatgaagcaggacgcccaggtgatcagcagctgcatcatccccatcaacgtgaccggcgtgggcttcgacagagaggccagcatcagatgcagcctggtgcacagccagagcgtgctgcagagaagaagaaagctgagaagaagaaagaccatcagcggcatccccagaagagtgcagcaggagatcgacagcgacgagagccccgtggccagagagagaaacgtgatcgtgcacaccaaccccgaccccagcaacaccgtgaacagaatcagcggcaccagagacagcgagtgccagaccgaggacatcctgatcgccgcccccagcagaagaagaatcagagcccagagaggccagagcatcgccgccagcctgagccacagcgccggcaacatcagcgccctggccgacaagggcgacaccatgttcacccccgccgtgagcagcagaaccagaagcagaagcctgcccagagagggcaacagaggcggcgacgccgagcccaaggtgggcgccaagcccagcgcctacgaggagggcgagagcttcgtgggcgaccacgagagaacccccaacgacttcagcgaggcccccagcagccccagcgcccaggaccaccagcccaccctgggcctggcctgcagccagcacctgcacagcccccagcacaagctgagcgagagaggcagaagcagactgagcagaatggccgccgacagcggcagctgcgacatcagcagcaacagcgacaccttcggcagccccatccactgcatcagcaccgccggcgtgctgctgagcagccacatggaccagaaggacgaccaccagagcagcagcggcaactggagcggcagcagcagcacctgccccagccagaccagcgagaccatcccccccgccgccagcccccccctgaccggcagcagccactgcgacagcgagctgagcctgaacaccgccccccacgccaacgaggacgccagcgtgttcgtgaccgagcagtacaacgaccacctggacaaggtgagaggccacagagccaacagcttcaccagcaccgtggccgacctgctggacgaccccaacaacagcaacaccagcgacagcgagtggaactacctgcaccaccaccacgacgccagctgcagacaggacttcagccccgagagacccaaggccgacagcctgggctgccccagcttcaccagcatggccacctacgacagcttcctggagaagagccccagcgacaaggccgacaccagcagccacttcagcgtggacaccgagggctactacaccagcatgcacttcgactgcggcctgaagggcaacaagagctacgtgtgccactacgccgccctgggccccgagaacggccagggcgtgggcgccagccccggcctgcccgactgcgcctggcaggactacctggaccacaagagacagggcagacccagcatcagcttcagaaagcccaaggccaagcccaccccccccaagagaagcagcagcctgagaaagagcgacggcaacgccgacatcagcgagaagaaggagcccaagatcagcagcggccagcacctgccccacagcagcagagagatgaagctgcccctggacttcgccaacacccccagcagaatggagaacgccaacctgcccaccaagcaggagcccagctggatcaaccagagcgagcagggcatcaaggagccccagctggacgccagcgacatcccccccttcaaggacgaggtggccgagagcacccactacgccgacctgtggctgctgaacgacctgaagaccaacgacccctacagaagcctgagcaacagcagcaccgccaccggcaccaccgtgatcgagtgcatcaagagccccgagagcagcgagagccagaccagccagagcgagagcagagccaccacccccagcctgcccagcgtggacaacgagttcaagctggccagccccgagaagctggccggcctggccagccccagcagcggctacagcagccagagcgagacccccaccagcagcttccccaccgccttcttcagcggccccctgagccccggcggcagcaagagaaagcccaaggtgcccgagagaaagagcagcctgcagcagcccagcctgaaggacggcaccatcagcctgagcaaggacctggagctgcccatcatcccccccacccacctggacctgagcgccctgcacaacgtgctgaacaagcccttccaccacagacaccccctgcacgtgttcacccacaacaagcagaacaccgtgggcgagaccctgagaagcaaccccccccccagcctggccatcacccccaccatcctgaagagcgtgaacctgagaagcatcaacaagagcgaggaggtgaagcagaaggaggagaacaacaccgacctgccctacctggaggagagcaccctgaccaccgccgccctgagccccagcaagatcagaccccacaccgccaacaagagcgtgagcagacagtacagcaccgaggacaccatcctgagcttcctggacagcagcgccgtggagatgggccccgacaagctgcacctggagaagaacagcaccttcgacgtgaagaacagatgcgaccccgagaccatcaccagcgccggcagcagcctgctggacagcaacgtgaccaaggaccaggtgagaaccgagaccgagcccatccccgagaacacccccaccaagaactgcgccttccccaccgagggcttccagagagtgagcgccgccagacccaacgacctggacggcaagatcatccagtacggccccggccccgacgagaccctggagcaggtgcagaaggcccccagcgccggcctggaggaggtggcccagcccgagagcgtggacgtgatcaccagccagagcgacagccccaccagagccaccgacgtgagcaaccagttcaagcaccagttcgtgatgagcagacaccacgacaaggtgcccggcaccatcagctacgagagcgagatcaccagcgtgaacagcttccccgagaagtgcagcaagcaggagaacatcgccagcggcatcagcgccaagagcgccagcgacaacagcaaggccgaggagacccagggcaacgtggacgaggccagcctgaaggagagcagccccagcgacgacagcatcatcagccccctgagcgaggacagccaggccgaggccgagggcgtgttcgtgagccccaacaagcccagaaccaccgaggacctgttcgccgtgatccacagaagcaagagaaaggtgctgggcagaaaggacagcggcgacatgagcgtgagaagcaagagcagagcccccctgagcagcagcagcagcagcgccagcagcatcaccagccccagcagcaacgtgaccacccccaacagccagagaagccccggcctgatctacagaaacgccaagaagagcaacaccagcaacgaggagttcaagctgctgctgctgaagaagggcagcagaagcgacagcagctacagaatgagcgccaccgagatcctgaagagccccatcctgcccaagccccccggcgagctgaccgccgagagcccccagagcaccgacgacgcccaccagggcagccagggcgccgaggccctgagccccctgagcccctgcagccccagagtgaacgccgagggcttcagcagcaagagcttcgccaccagcgccagcgccagagtgggcagaagcagagccccccccgccgccagcagcagcagatacagcgtgagatgcagactgtacaacacccccatgcaggccatcagcgagggcgagaccgagaacagcgacggcagcccccacgacgacagaagcagccagagcagcacctag

SEQ ID NO: 259512 - protein, 490 aa, Artificial Sequence
  derived and/or modified sequence
MTIGRMENVEVFTAEGKGRGLKATKEFWAADIIFAERAYSAVVFDSLVNFVCHTCFKRQEKLHRCGQCKFAHYCDRTCQKDAWLNHKNECSAIKRYGKVPNENIRLAARIMWRVEREGTGLTEGCLVSVDDLQNHVEHFGEEEQKDLRVDVDTFLQYWPPQSQQFSMQYISHIFGVINCNGFTLSDQRGLQAVGVGIFPNLGLVNHDCWPNCTVIFNNGNHEAVKSMFHTQMRIELRALGKISEGEELTVSYIDFLNVSEERKRQLKKQYYFDCTCEHCQKKLKDDLFLGVKDNPKPSQEVVKEMIQFSKDTLEKIDKARSEGLYHEVVKLCRECLEKQEPVFADTNIYMLRMLSIVSEVLSYLQAFEEASFYARRMVDGYMKLYHPNNAQLGMAVMRAGLTNWHAGNIEVGHGMICKAYAILLVTHGPSHPITKDLEAMRVQTEMELRMFRQNEFMYYKMREAALNNQPMQVMAEPSNEPSPALFHKKQ

SEQ ID NO: 259513 - DNA, 1473 bp, Artificial Sequence
  derived and/or modified sequence
atgaccatcggcagaatggagaacgtggaggtgttcaccgccgagggcaagggcagaggcctgaaggccaccaaggagttctgggccgccgacatcatcttcgccgagagagcctacagcgccgtggtgttcgacagcctggtgaacttcgtgtgccacacctgcttcaagagacaggagaagctgcacagatgcggccagtgcaagttcgcccactactgcgacagaacctgccagaaggacgcctggctgaaccacaagaacgagtgcagcgccatcaagagatacggcaaggtgcccaacgagaacatcagactggccgccagaatcatgtggagagtggagagagagggcaccggcctgaccgagggctgcctggtgagcgtggacgacctgcagaaccacgtggagcacttcggcgaggaggagcagaaggacctgagagtggacgtggacaccttcctgcagtactggcccccccagagccagcagttcagcatgcagtacatcagccacatcttcggcgtgatcaactgcaacggcttcaccctgagcgaccagagaggcctgcaggccgtgggcgtgggcatcttccccaacctgggcctggtgaaccacgactgctggcccaactgcaccgtgatcttcaacaacggcaaccacgaggccgtgaagagcatgttccacacccagatgagaatcgagctgagagccctgggcaagatcagcgagggcgaggagctgaccgtgagctacatcgacttcctgaacgtgagcgaggagagaaagagacagctgaagaagcagtactacttcgactgcacctgcgagcactgccagaagaagctgaaggacgacctgttcctgggcgtgaaggacaaccccaagcccagccaggaggtggtgaaggagatgatccagttcagcaaggacaccctggagaagatcgacaaggccagaagcgagggcctgtaccacgaggtggtgaagctgtgcagagagtgcctggagaagcaggagcccgtgttcgccgacaccaacatctacatgctgagaatgctgagcatcgtgagcgaggtgctgagctacctgcaggccttcgaggaggccagcttctacgccagaagaatggtggacggctacatgaagctgtaccaccccaacaacgcccagctgggcatggccgtgatgagagccggcctgaccaactggcacgccggcaacatcgaggtgggccacggcatgatctgcaaggcctacgccatcctgctggtgacccacggccccagccaccccatcaccaaggacctggaggccatgagagtgcagaccgagatggagctgagaatgttcagacagaacgagttcatgtactacaagatgagagaggccgccctgaacaaccagcccatgcaggtgatggccgagcccagcaacgagcccagccccgccctgttccacaagaagcagtag

SEQ ID NO: 259514 - DNA, 1473 bp, Artificial Sequence
  derived and/or modified sequence
atgacgattggaaggatggagaacgtggaggtatttacagcggaagggaaaggaaggggcctaaaggctaccaaggagttttgggctgccgatatcatcttcgccgaacgggcctactcagccgtcgtgtttgacagccttgtgaatttcgtctgccacacttgttttaagcgtcaggaaaaactgcacagatgtgggcagtgtaagttcgcgcactattgtgatcgcacctgtcagaaagacgcatggctgaaccataaaaacgaatgtagtgctatcaaacgctacggtaaggtgccaaacgagaacatccgtcttgccgcacgtattatgtggagagtggagagggaaggcactggcctgactgaaggctgcttggtgagcgtggacgacctacaaaatcatgtggagcacttcggtgaggaggaacagaaggatctgcgggtggatgtggatacgttcttgcagtactggccaccgcagtcccagcagtttagtatgcagtacatatcacacatctttggtgtcattaactgcaacgggtttactttaagtgaccaacgaggcctgcaagcggtgggagtgggcatctttccaaatctaggccttgttaatcacgattgctggcccaactgcacagtcatctttaacaatgggaaccatgaggccgtaaagagcatgttccacacacagatgcgcattgaactcagggccttaggaaaaatctcggagggagaggaattaacggtaagttacatcgattttctgaacgttagtgaggagcgcaaaaggcagctgaaaaaacagtactattttgattgcacttgtgaacattgccaaaaaaagttgaaggatgacttgtttctgggggtgaaagataatccaaaaccaagtcaggaagtcgtcaaagagatgatccagttctctaaagacacgttagaaaagatagataaagccagatctgaaggtctgtaccacgaggttgtcaagctatgcagggagtgcctggaaaagcaggagcccgtatttgctgatacaaacatctatatgcttcggatgctgtccattgtcagcgaagtcctgtcttatctgcaggctttcgaggaggcttccttctatgcgcggcgcatggtggatggatatatgaagctgtatcaccccaataacgcccagctgggcatggctgttatgcgagccggactaactaactggcatgccggcaacattgaggtcgggcatggcatgatttgcaaggcgtacgcgattctcttggttacccacggcccatctcatccgatcacaaaagatctcgaggcaatgagagttcagaccgaaatggagctacggatgtttcgacagaatgagttcatgtactataaaatgagggaggccgccctgaataaccagcccatgcaggttatggccgagcccagcaacgaacccagtccagcgctttttcacaagaaacaatag

SEQ ID NO: 259515 - DNA, 1473 bp, Artificial Sequence
  derived and/or modified sequence
atgaccatcggccgcatggagaatgtggaggtgttcaccgctgagggcaagggccggggcctgaaggccaccaaggagttctgggccgctgacatcatctttgctgagcgggcctacagcgctgtggtgtttgacagcctggtgaactttgtgtgccacacctgcttcaagaggcaggagaagctgcaccgctgtggccagtgcaagtttgcccactactgtgacaggacctgccagaaggatgcctggctgaaccacaagaatgaatgttctgccatcaagagatatggcaaggtgcccaatgaaaacatccggctggccgcccgcatcatgtggagggtggagcgggagggcaccggcctgacagagggctgcctggtgtctgtggatgacctgcagaaccacgtggagcactttggagaggaggagcagaaggacctgcgggtggatgtggacaccttcctgcagtactggccaccccagagccagcagttctccatgcagtacatcagccacatctttggagtcatcaactgcaatggcttcaccctgagtgaccagaggggcctgcaggccgtgggcgtgggcatcttccccaacctgggcctggtgaaccacgactgctggcccaactgcaccgtcatcttcaacaacggcaaccatgaagctgtgaagtccatgttccacacccagatgagaattgagctgcgggccctgggcaagatcagcgagggggaggagctgactgtgtcctacatcgacttcctgaatgtgtctgaggagaggaagaggcagctgaagaagcagtactactttgactgcacctgtgagcactgccagaagaagctgaaggatgacctcttcctgggcgtgaaggacaaccccaagcccagccaggaggtggtgaaggagatgatccagttcagcaaggacaccctggagaagattgacaaggcccggtctgagggcctgtaccacgaggtggtgaagctgtgccgggagtgcctggagaagcaggagcctgtgtttgctgacaccaacatctacatgctgaggatgctgagcatcgtgtctgaggtgctgagctacctgcaggcctttgaggaggccagcttctacgcccggaggatggtggatggctacatgaagctgtaccaccccaacaatgcccagctgggcatggctgtgatgagagctggcctgaccaactggcacgccggcaacatcgaggtgggccacggcatgatctgcaaggcctatgccatcctgctggtgacccacggccccagccaccccatcaccaaggacctggaggccatgagggtgcagacagagatggagctgaggatgttccggcagaatgagttcatgtactacaagatgagggaggccgccctgaacaaccagcccatgcaggtgatggccgagcccagcaatgagcccagccctgccctcttccacaagaagcagtag

SEQ ID NO: 259516 - DNA, 1473 bp, Artificial Sequence
  derived and/or modified sequence
atgaccatcggccggatggagaacgtggaggtgttcaccgccgaggggaaagggcgaggtctaaaggccacaaaagaattctgggccgccgatatcatatttgccgaaagagcatatagcgcagtcgtgttcgactctctcgtgaactttgtgtgccacacctgcttcaaacggcaggagaaactgcacagatgcgggcagtgtaagtttgcccactactgcgatagaacctgtcagaaggatgcttggctgaatcacaagaatgagtgttctgcgattaagcgctacggaaaggtgcccaacgaaaacatccggttggcggcacggatcatgtggagagtcgaaagggaagggacagggttaaccgaggggtgtctggtatcagttgatgacctccagaaccatgtggagcattttggggaggaggagcaaaaagatctgcgagtcgatgtcgacaccttccttcagtactggccaccccagagccaacaattctctatgcagtatatcagtcacatctttggcgtgattaactgtaacggatttacccttagcgaccagcgcggtttgcaggccgtgggcgtcgggatctttcccaacttgggcttagtgaatcatgactgctggcccaattgcacggttatctttaacaacgggaaccacgaggcggttaaatctatgttccatacgcagatgcgtattgaactacgtgccctaggcaaaatcagcgaaggtgaggagctaacagtctcgtacatcgacttcttgaatgttagtgaagagaggaagagacagctgaagaagcagtactattttgactgtacctgtgaacattgccaaaagaaactgaaagatgacctgttcttgggtgtgaaggataatcctaaacctagccaagaagtagtgaaggagatgattcagttctccaaagatactttggaaaaaattgataaagccaggtccgaaggcctctatcacgaggtggtgaagctttgtagggagtgtctggagaagcaggaacccgtcttcgccgacactaacatttacatgctgagaatgttgtccatcgtttctgaagtcctcagctacctccaggcatttgaagaagcgtctttctacgcacggcgcatggtagatggctacatgaaattataccacccaaacaatgcccagctgggtatggcagttatgcgcgccgggcttaccaactggcacgcagggaacatcgaggtcggtcatggaatgatttgcaaggcctatgctatcctcctggtgactcacggcccttcacacccaataaccaaggatctggaggcaatgagggttcagaccgaaatggagctgcggatgttcagacagaacgagttcatgtactacaaaatgagggaggccgctttgaacaaccagccgatgcaggtgatggcggagcctagtaatgagccatcaccggcgctcttccacaaaaagcagtag

SEQ ID NO: 259517 - DNA, 4433 bp, Artificial Sequence
  derived and/or modified sequence
gggatgctgaaggtgctgaaatagcaatgacaagagacttggctcagtgttaaataactgccgcgctggcctgacagtctctgagatgacaatagggagaatggagaacgtggaggtcttcaccgctgagggcaaaggaaggggtctgaaggccaccaaggagttctgggctgcagatatcatctttgctgagcgggcttattccgcagtggtttttgacagccttgttaattttgtgtgccacacctgcttcaagaggcaggagaagctccatcgctgtgggcagtgcaagtttgcccattactgcgaccgcacctgccagaaggatgcttggctgaaccacaagaatgaatgttcggccatcaagagatatgggaaggtgcccaatgagaacatcaggctggcggcgcgcatcatgtggcgggtggagagagaaggcaccgggctcacggagggctgcctggtgtccgtggacgacttgcagaaccacgtggagcactttggggaggaggagcagaaggacctgcgggtggacgtggacacattcttgcagtactggccgccgcagagccagcagttcagcatgcagtacatctcgcacatcttcggagtgattaactgcaacggttttactctcagtgatcagagaggcctgcaggccgtgggcgtaggcatcttccccaacctgggcctggtgaaccatgactgttggcccaactgtactgtcatatttaacaatggcaatcatgaggcagtgaaatccatgtttcatacccagatgagaattgagctccgggccctaggcaagatctcagaaggagaggagctgactgtgtcctatattgacttcctcaacgttagtgaagaacgcaagaggcagctgaagaagcagtactactttgactgcacatgtgaacactgccagaaaaaactgaaggatgacctcttcctgggggtgaaagacaaccccaagccctctcaggaagtggtgaaggagatgatacaattctccaaggatacattggaaaagatagacaaggctcgttccgagggtttgtatcatgaggttgtgaaattatgccgggagtgcctggagaagcaggagccagtgtttgctgacaccaacatctacatgctgcggatgctgagcattgtttcggaggtcctttcctacctccaggcctttgaggaggcctcgttctatgccaggaggatggtggacggctatatgaagctctaccaccccaacaatgcccaactgggcatggccgtgatgcgggcagggctgaccaactggcatgctggtaacattgaggtggggcacgggatgatctgcaaagcctatgccattctcctggtgacacacggaccctcccaccccatcactaaggacttagaggccatgcgggtgcagacggagatggagctacgcatgttccgccagaacgaattcatgtactacaagatgcgcgaggctgccctgaacaaccagcccatgcaggtcatggccgagcccagcaatgagccatccccagctctgttccacaagaagcaatgaggactgcccagtggaggaggggcgatgtggctggggagctagggagagactctggaggtggtgggtctctcgggagacccctaatgaggaagttgaggtaatgcttaacattgttgctgtgagaatttactgccctatgtttcccagagccattttggctcaattcaagtctattcaattcaagttaactctagcccagcccagatcaactcctcctacaaatattattggatgataggccctagaacccaataaaggagctccaaatgtcgttgggtggggaagcaaaatgtagagaaacatttaaagcacactgtaataataaatgcaattataaactatatggaggagggtgcagaggagggaatgtgtctggtgtgtgatgtgtgtgtgtgcagtgggggtatcacagagagtatgacatctgagttgagggtagcaggtgcctggagtctcaggtggctgctcacccatctgtgcaggtgtctctggggctgctggtctcacctgtggtctgcagtagacacaattggctgagcaggatatgtgatactgtgtggttggtgtggagttttgaagaaggggctgtgtttgggccacgtaggctctactcagagacctgaaaccacttcagaatggtgcatatgtcgaaagagctggctgggggccttgcccaaaccaactgaggtcttaaagtccagggaaaaaaagtctgggttccaactagaattctagaaatatttctagaacacacagagagggaataagtccctctatcacccttattaccaagccttgtggttccctgtgattttagataatgtctgatatttttctggctatttgcctagtaggatttaaaaaatattttcaaagtgaagctgagagagaatcttggaaacacacatacctgttgatcatgggccctgcagaattggcccttgggggctttatttggttacatgtgcctgggtggtctttaccagcttagactctatcatgggcccccatgaagctccattctcaatactgaataattattacttcccttgttgagtttctttttctgtcatgccctgggggcttctgctcttctcaccagaaagaacatttgaatctggattcttgtacacctgggttagaccctgttcagaggtgtggccaatttatcccgatctcctggaaggctgttgtgatttccatctaagaaatgagggtcttgagaatcaaccagtcccaagattagcctgttatcctgttatctactgagaccccaaatttctcaccaatgttttgggagatcctggaaaagatcccttcagtttggggtgtcaccaagacttctacacaacccaggactaccattgacctcagagctgtaccccacatcttgaagtaaattgatcccaccaggtcccacgtttgttatctctgcctaaatgttagcttctccatcctcaccacatgatgacctgctgtgtccctctgagcactacccagtggctgaaaactctgcaaatgggccacacttttgcaaaatacttgtatctgacacttaggtcttgtttgaagaatttcctttctggaaggttttacaagaagactgatagtctttcaagcccccacatcacaggcttagggacggcactaactttctcccagggatctaactggctagttcaaattatcactcttttaccttcatataaaatgtctcccccaaacctttttcccttctttgtcattgttatctgctaagcccctggtcatttccccatattcgtagtctttttttccatcctatctttctaatatttgttgtctttaacaaactgtgttctgtgtctgtgctcctccttccctctcagaccactggaatgcaagtccttcttccctttggaatgtactctggatcccttcccctgctttgacccccagactttgctccatctattattgcttctccatcctggatccttgacatttgtcaccccactggccttctcaggtgcaatcagtaaaaatgctgagaactcttggatcttaatcttcatgactgagttttttttagttgtatagttatcatctgcctttcttcactttgcatttcttcttgaatccattgcagattgacttccactcccactccttcactaaaagggctcttaccaagatcaaatctaatgggtacattttagttcctatgtgatttggcctttcgatgtcaatcatcactcccagccattgattttggtgacccacttccctgtgatgatcttctgatctagtttctcaggttccttcgctggtcctttttctttccctgcccctgacatattgacatttcctggagttggttttgtccttgattcattctcatgtcattctgcacacagtctctgcatgaactcaggcagacccttcatttaatgaccaccttagggctgatgattctcaaatctgtattccccgatcttgcatttgagctccagccccactcatcctctcggatgttctgcaggcccagcaaactcatcatgtccaaagtgaaactttttctctttcctgtctcctctcctctgatctgttctttcttggaacaccacccaagaacgtcacctcctccatcagattgtgagctcctggagggcaggagctgtgtccttctattcatcttcctatccccagaaccttgcacagatcctggaatgtggtaggtgctcagtaaatgtgtgttgaataaatgaatgaatgaatgaacaaatgaatgaatttgcttacttcaaggcaaaagaaccatgaaactgtattttgagtttctatgttatagcagtcagcaaatcctattaaatactttgtgtttccaagcaaataa

SEQ ID NO: 259518 - DNA, 1473 bp, Artificial Sequence
  derived and/or modified sequence
atgacgattggtaggatggagaacgtcgaagtgtttaccgcagagggcaaaggcagaggtctgaaggccacaaaggagttctgggcagctgatattatcttcgccgagagagcttacagtgccgtagtgtttgactccctggtcaatttcgtctgtcatacatgtttcaagcgacaggaaaagttgcatcgttgcggtcagtgcaaattcgcccattattgcgatcgtacgtgccagaaagatgcttggcttaatcataaaaatgaatgctccgcgattaagagatacggtaaggtgcccaatgaaaatattagactcgcagctcgaattatgtggcgcgtagaaagagaaggtactgggctgactgagggttgccttgtctccgtggacgacctccaaaaccacgtagagcacttcggcgaagaggaacagaaagatctccgtgtggatgtcgacacctttttgcagtattggcccccacagagtcagcagttcagcatgcagtacatatctcatatctttggggtgatcaattgtaatggttttaccctcagcgaccagcggggactgcaagcggtgggcgttgggatcttccctaatctgggcctagtcaatcatgattgttggcccaattgtaccgtaatcttcaataatggtaaccatgaagcagtgaagagcatgttccacactcagatgcgcatagagcttcgagctctggggaaaatatcagagggggaagaattgactgttagttacatcgatttcctgaacgtttctgaagagagaaaacgacagctgaagaagcaatattatttcgattgtacctgcgaacattgtcaaaagaagttgaaggatgacttatttctcggtgtcaaggacaatcccaaaccctcgcaggaagtggtgaaagaaatgattcaattttctaaggacaccctcgagaaaattgacaaagcaaggagcgaaggcttataccacgaggtcgttaaattgtgcagggagtgcctggaaaagcaggagcctgtatttgcagatactaatatctatatgctgcggatgttaagcatcgtgagtgaggttcttagctatcttcaggcctttgaagaggcttctttctacgctagacgtatggtagacgggtacatgaaactttaccatcccaacaatgcacagttaggcatggcggtcatgagggctgggctgactaattggcacgctggcaacatagaggtgggtcacggaatgatctgtaaggcctatgccattctacttgtgacccacggcccaagtcatccgataacaaaagaccttgaggctatgcgggtgcagacagagatggagttgcgcatgtttagacagaacgagttcatgtactacaagatgagagaggcagcattaaataaccagccaatgcaggttatggctgaaccaagtaacgaaccatctcccgctctattccacaaaaaacaatag

SEQ ID NO: 259519 - protein, 235 aa, Artificial Sequence
  derived and/or modified sequence
MQQRGAAGSRGCALFPLLGVLFFQGVYIVFSLEIRADAHVRGYVGEKIKLKCTFKSTSDVTDKLTIDWTYRPPSSSHTVSIFHYQSFQYPTTAGTFRDRISWVGNVYKGDASISISNPTIKDNGTFSCAVKNPPDVHHNIPMTELTVTERGFGTMLSSVALLSILVFVPSAVVVALLLVRMGRKAAGLKKRSRSGYKKSSIEVSDDTDQEEEEACMARLCVRCAECLDSDYEETY

SEQ ID NO: 259520 - DNA, 708 bp, Artificial Sequence
  derived and/or modified sequence
atgcagcaacgtggtgctgccgggagcagaggttgcgcgctgttccccctgttaggcgtgctttttttccagggcgtctatatagtgttctctctggaaatcagggctgacgcccatgtgcgaggctacgtcggggagaagatcaaattaaaatgtacgttcaaatccacttcagatgtgactgataagctgactatagactggacataccgccctccttcctcgtctcatacagtaagcatttttcactaccagtcttttcagtatccgacgactgcagggacattccgtgaccgcatctcttgggttggcaacgtctataaaggagatgcctctattagtatctctaatcctactattaaggataacgggactttttcatgcgcggtgaaaaatccaccagacgtacatcataacatacctatgacagagttaaccgttacagaacggggtttcggtacaatgctgtcttccgtggcccttttgagtattctagtttttgtgccctcagctgtcgttgtcgccctgctcctggtccgcatgggcaggaaagccgccggactgaagaaacggtcccggtccggctacaagaagtcctcgatagaggtttctgacgataccgaccaagaggaagaggaggcctgtatggcgaggttgtgcgtcagatgtgctgagtgcctggactctgactacgaggagacctactag

SEQ ID NO: 259521 - DNA, 708 bp, Artificial Sequence
  derived and/or modified sequence
atgcagcagagaggagctgctggcagccggggctgtgccctcttccccctgctgggcgtgctcttcttccagggcgtgtacatcgtgttcagcctggagatccgggcagatgcccacgtgcggggctacgtgggggagaagatcaagctgaagtgcaccttcaagagcaccagtgatgtgacagacaagctgaccatcgactggacctaccggccccccagcagcagccacacagtgtccatcttccactaccagagcttccagtaccccaccacagctggcaccttccgggaccgcatctcctgggtgggcaatgtgtacaagggagatgccagcatcagcatcagcaaccccaccatcaaggacaatggcaccttcagctgtgctgtgaagaaccccccagatgtgcaccacaacatccccatgacagagctgactgtgacagagcggggcttcggcaccatgctgagctctgtggccctgctgagcatcctggtgtttgtgcccagcgctgtggtggtggccctgctgctggtgaggatgggcaggaaggccgccggcctgaagaagaggagccgcagcggctacaagaagagcagcattgaggtgtctgatgacacagaccaggaggaggaggaggcctgcatggcccggctgtgtgtgcgctgtgctgaatgtctggacagcgactatgaggagacctactag

SEQ ID NO: 259522 - DNA, 3964 bp, Artificial Sequence
  derived and/or modified sequence
tgtgtcgttaccgggagctgtaaacaaggtgtgcaagcatctgaagagctgccgggatgcagcagagaggagcagctggaagccgtggctgcgctctcttccctctgctgggcgtcctgttcttccagggtgtttatatcgtcttttccttggagattcgtgcagatgcccatgtccgaggttatgttggagaaaagatcaagttgaaatgcactttcaagtcaacttcagatgtcactgacaaacttactatagactggacatatcgccctcccagcagcagccacacagtatcaatatttcattatcagtctttccagtacccaaccacagcaggcacatttcgggatcggatttcctgggttggaaatgtatacaaaggggatgcatctataagtataagcaaccctaccataaaggacaatgggacattcagctgtgctgtgaagaatcccccagatgtgcatcataatattcccatgacagagctaacagtcacagaaaggggttttggcaccatgctttcctctgtggcccttctttccatccttgtctttgtgccctcagccgtggtggttgctctgctgctggtgagaatggggaggaaggctgctgggctgaagaagaggagcaggtctggctataagaagtcatctattgaggtttccgatgacactgatcaggaggaggaagaggcgtgtatggcgaggctttgtgtccgttgcgctgagtgcctggattcagactatgaagagacatattgatgaaagtctgtatgacacaagaagagtcacctaaagacaggaaacatcccattccactggcagctaaagcctgtcagagaaagtggagctggcctggaccatagcgatggacaatcctggagatcatcagtaaagactttaggaaccacttatttattgaataaatgttcttgttgtatttataaactgttcaggaactctcataagagactcatgacttcccctttcaatgaattatgctgtaattgaatgaagaaattcttttcctgagcaaaaagatactttttgattcatctttgctctggaatgtattacatgttttcttccaactgtttgaaggagaattttgaatgtttgccacaccgctgatacccaaataattttttaaatgaagtggagcttgtggcttcctgatgtgtcaccagacaaaatattcgcttgggatatgtattctttgttttttgctccatgtacactttcagctgtgagttagtatagggcgtatacttaccggtttaatgacctcaacctcagttgtgtttggataacttagggtgtatacccttagtttccttagagttggtaggatcaagtcattggtttgctttgactgggtttttaaagtattaagtacagtgtcatcaatttacagttaaggaaaggaatcgtgaagtagaaaaattattttctttagtcttgctggtacaatttgggctaaggagtctttgttattttctgtcttgcttttttttttttttttttttttttgaggcagagtctcactctgtcgccaggctggagtgcagtggtgtgatcttggctcactgcaacctctgcctcctgggttcaagcgattcttgtgcctcagcctctcgagtagctgggattacaggcatgcgccaccacacccagctaatttttgtgtttttagtagagacggggtttcaccattttggccaggatggtctcaatcccctgacctcgtgatccacctgcctcggcctcccaaagtgttgggattacaggcatgagccactgtgcttggcctgttattttattttcttataactacaacttttcttcttgaattttcaggtcagaggcaagaaaaactctttacaggtttttagtggggggcttatggagtatttcaggagttctttgcaaattaaatcatcttttcacttgtattgtttttcaaaactttgttgatttctaaaatgtgccaactgtgagtaaactatggtatttgcaagtggtttttacataatatttgagatgaggaagtgagattgtgcatgacatacttctcctttgtattctctcagtgccttacagcaggttactccattctgctatgacaacttgtttcaaatgttaatttacataggattttttataagccattaaggcatatgtatagtatatcagtaaagatggatggtgcatatataaatagtcttctgtaatagtgattggatttacttctcaattatgagagacaaaaattatcccctcacctgtctctattctttcaacaggttgatcccttttcatgatttttcattaggtggttcaggaagtttccatattacagcgcttcagactgtatatgttagtttaaaaatcacttttctctctctcaacttctttcttttttttttgaagacttaatttaaaaaatttgggttgttagatccgtatcatagatttggcctagcctcttctgttaacctagtccacagatgagcgaatctggttagttgaaggacattgtgatttgactctggtcacgcgaggaagtagaagggcaaagacaggaccggcagtttacatttccagtggttaaacctcacggtactttgggactgcttgttaacttttgtggttgtctgaggccaatctaacgtgaccatttctgacacctcaacagagagaggaaagcaacttgagcaatgagagtaaataacttgggctctcagagatttgaagatagagatctcattgtgagggggactattttgcaggtcctcatttctccaagaaagagatggtgttacaggaacccactgaaagccatatcccattaaatgaggaactaattttggctgggccttcttgtaatgtcctcgcaggtgtgttgtgaagattaatgcagggtagtatgtttgtagattgacacctagtctaaacttgaggtaattggtgctctgtgaatactcagtcgtgttcttttatagccttaatcatgatttgaactagtcccttgctttttaaatgactgaatgaagtccttcgtggtaagggagtacgttgataacttagtttactatatgggtttgtggtcgcatcccagtcatcagctgctatcattttccttcttcatcccttatactgagatttgggttacagctttttattcttcgaaggatcacaaagcagtgtacagacacctgccttctttaaggatgaaaggaagataaagtggtctttttttgtttacttatttgtttcacctcttgtttgagtaacttctaaggtgctattctctctctctttttgctacctcatgagctcttgtcacagccatggaaaccagcctcgtttagaaagggaacttagttcagaaggggttaaaagccttccagaatttttctttagctgctgaagtttttacatgtggttacatgactttaagttttatgcattacgctcttaattctattacaaaatgtggactcaccaattgctttgtgttttccatgtgacctgttacttcaggctacttggggaacatcttagtcctctgtagctcctgaacccagcactggtgcttcaagagagaaggtagcacgtctttgttcaaaacaaaacaaaacgacacttctggaggccacatcctgaatatgaatgttctactaagtcactcagttatggttctaaagggaaactgtaagaagacccacaaggagtggaccaagactattatttaattgcacaacttgaaactttgctgccagaagaggcagctccattcctttgactccagtgttgggctgttaactgctgcacctcattgcctttttttgtttttgtttttgttttgtaggagggtaggcactgttgggccatatgcacaaatattgtaactcttggtatctttactgcatcatagtcaataaacttctttgtaccctttg

SEQ ID NO: 259523 - DNA, 708 bp, Artificial Sequence
  derived and/or modified sequence
atgcagcagcggggcgccgccggcagccggggctgcgccctgttccccttactcggtgtactgttttttcagggcgtctacattgttttctctctggaaatcagagccgatgcgcacgttcgtggttatgttggggaaaagataaaactcaaatgcacattcaagagcacctccgacgtgacagataagctgaccatagactggacctacagaccgccctcatcctcacataccgtctcaatcttccactaccagtccttccaatatcctacaacagcaggaacattcagggacaggatcagctgggtcgggaacgtctataagggggatgcctctatttctatctcaaatcccacaattaaggataatggaactttcagttgtgcggttaaaaatccgcccgacgttcaccataacattccaatgactgaacttacagtcacagaacgcgggtttggaacgatgctgagcagcgtggccctgctgtccatcctggtgttcgtgccatccgccgtcgttgtagctctgctcttagtgaggatgggacggaaggcggctggccttaagaagaggtctaggtcaggttataaaaagtcctcgattgaggtgtcggatgacaccgaccaagaggaggaggaagcctgtatggcaagattatgtgtccgctgtgccgaatgcctggattctgactatgaagagacctactag

SEQ ID NO: 259524 - DNA, 708 bp, Artificial Sequence
  derived and/or modified sequence
atgcagcagaggggtgcagcaggttcgagaggatgcgctctcttccccttactcggggttctcttcttccagggggtctacatagttttctcactggagatcagagctgacgcgcatgtaagggggtatgtcggggaaaaaatcaaacttaagtgtaccttcaagagcacctctgacgttacagacaagttgactattgactggacatacagacctcccagttccagccacacggtgagcatatttcattatcagtcctttcagtatccaacaactgccggtaccttccgcgatcggattagttgggtcggcaatgtctataagggggacgcatctatatcaataagtaaccctacaatcaaggacaatggaacctttagctgcgccgttaagaacccccctgacgtccaccacaatatccccatgacagaactgacagtgactgaacggggttttggcacaatgctcagctctgtcgcgttactgtctatccttgtgtttgtaccctctgccgtggtggtggccctgctgctggttcggatgggaagaaaggcggcagggctaaagaaacgatcacgaagcggctacaagaaaagttccatcgaggtcagcgacgataccgaccaagaggaggaggaagcatgtatggctaggctttgtgtgagatgcgcagagtgtctggacagcgattatgaggagacttactag

SEQ ID NO: 259525 - DNA, 708 bp, Artificial Sequence
  derived and/or modified sequence
atgcagcagagaggcgccgccggcagcagaggctgcgccctgttccccctgctgggcgtgctgttcttccagggcgtgtacatcgtgttcagcctggagatcagagccgacgcccacgtgagaggctacgtgggcgagaagatcaagctgaagtgcaccttcaagagcaccagcgacgtgaccgacaagctgaccatcgactggacctacagaccccccagcagcagccacaccgtgagcatcttccactaccagagcttccagtaccccaccaccgccggcaccttcagagacagaatcagctgggtgggcaacgtgtacaagggcgacgccagcatcagcatcagcaaccccaccatcaaggacaacggcaccttcagctgcgccgtgaagaacccccccgacgtgcaccacaacatccccatgaccgagctgaccgtgaccgagagaggcttcggcaccatgctgagcagcgtggccctgctgagcatcctggtgttcgtgcccagcgccgtggtggtggccctgctgctggtgagaatgggcagaaaggccgccggcctgaagaagagaagcagaagcggctacaagaagagcagcatcgaggtgagcgacgacaccgaccaggaggaggaggaggcctgcatggccagactgtgcgtgagatgcgccgagtgcctggacagcgactacgaggagacctactag

SEQ ID NO: 259526 - protein, 505 aa, Artificial Sequence
  derived and/or modified sequence
MRSSLAPGVWFFRAFSRDSWFRGLILLLTFLIYACYHMSRKPISIVKSRLHQNCSEQIKPINDTHSLNDTMWCSWAPFDKDNYKELLGGVDNAFLIAYAIGMFISGVFGERLPLRYYLSAGMLLSGLFTSLFGLGYFWNIHELWYFVVIQVCNGLVQTTGWPSVVTCVGNWFGKGKRGFIMGIWNSHTSVGNILGSLIAGIWVNGQWGLSFIVPGIITAVMGVITFLFLIEHPEDVDCAPPQHHGEPAENQDNPEDPGNSPCSIRESGLETVAKCSKGPCEEPAAISFFGALRIPGVVEFSLCLLFAKLVSYTFLYWLPLYIANVAHFSAKEAGDLSTLFDVGGIIGGIVAGLVSDYTNGRATTCCVMLILAAPMMFLYNYIGQDGIASSIVMLIICGGLVNGPYALITTAVSADLGTHKSLKGNAKALSTVTAIIDGTGSIGAALGPLLAGLISPTGWNNVFYMLISADVLACLLLCRLVYKEILAWKVSLSRGSGSSMVLTHQ

SEQ ID NO: 259527 - DNA, 1518 bp, Artificial Sequence
  derived and/or modified sequence
atgagaagcagcctggcccccggcgtgtggttcttcagagccttcagcagagacagctggttcagaggcctgatcctgctgctgaccttcctgatctacgcctgctaccacatgagcagaaagcccatcagcatcgtgaagagcagactgcaccagaactgcagcgagcagatcaagcccatcaacgacacccacagcctgaacgacaccatgtggtgcagctgggcccccttcgacaaggacaactacaaggagctgctgggcggcgtggacaacgccttcctgatcgcctacgccatcggcatgttcatcagcggcgtgttcggcgagagactgcccctgagatactacctgagcgccggcatgctgctgagcggcctgttcaccagcctgttcggcctgggctacttctggaacatccacgagctgtggtacttcgtggtgatccaggtgtgcaacggcctggtgcagaccaccggctggcccagcgtggtgacctgcgtgggcaactggttcggcaagggcaagagaggcttcatcatgggcatctggaacagccacaccagcgtgggcaacatcctgggcagcctgatcgccggcatctgggtgaacggccagtggggcctgagcttcatcgtgcccggcatcatcaccgccgtgatgggcgtgatcaccttcctgttcctgatcgagcaccccgaggacgtggactgcgcccccccccagcaccacggcgagcccgccgagaaccaggacaaccccgaggaccccggcaacagcccctgcagcatcagagagagcggcctggagaccgtggccaagtgcagcaagggcccctgcgaggagcccgccgccatcagcttcttcggcgccctgagaatccccggcgtggtggagttcagcctgtgcctgctgttcgccaagctggtgagctacaccttcctgtactggctgcccctgtacatcgccaacgtggcccacttcagcgccaaggaggccggcgacctgagcaccctgttcgacgtgggcggcatcatcggcggcatcgtggccggcctggtgagcgactacaccaacggcagagccaccacctgctgcgtgatgctgatcctggccgcccccatgatgttcctgtacaactacatcggccaggacggcatcgccagcagcatcgtgatgctgatcatctgcggcggcctggtgaacggcccctacgccctgatcaccaccgccgtgagcgccgacctgggcacccacaagagcctgaagggcaacgccaaggccctgagcaccgtgaccgccatcatcgacggcaccggcagcatcggcgccgccctgggccccctgctggccggcctgatcagccccaccggctggaacaacgtgttctacatgctgatcagcgccgacgtgctggcctgcctgctgctgtgcagactggtgtacaaggagatcctggcctggaaggtgagcctgagcagaggcagcggcagcagcatggtgctgacccaccagtag

SEQ ID NO: 259528 - DNA, 1518 bp, Artificial Sequence
  derived and/or modified sequence
atgcgctcgagcttagcaccgggggtatggttttttcgcgcctttagcagagacagctggttccgcggtcttatcctccttctgactttcctcatctatgcgtgctaccacatgtctaggaagcctatttcaattgtcaagagcagacttcaccagaactgcagcgagcagattaagcccatcaatgacacacactcgttgaacgatacaatgtggtgttcatgggcacctttcgataaagacaattataaggaactgcttgggggggtcgacaatgcatttctgatcgcgtacgccataggcatgtttatctccggcgtctttggagagcgcttgccgctcaggtactatctcagcgccgggatgttactgtccggtctgttcacaagtctgtttggcctgggatatttctggaatatacacgaactctggtacttcgtcgttatccaggtatgcaacggcttagtccagaccaccggatggccttcagtcgtgacatgcgtgggcaattggttcggcaaagggaaaaggggatttattatggggatttggaatagccacaccagtgtgggaaatatcctggggtccctgatcgccggaatatgggtcaacggacagtggggcctatcattcattgtccccggtatcatcaccgccgtcatgggtgtcattacttttctgtttttgattgaacacccggaggacgtggactgcgcccccccccagcatcatggtgagccagctgagaatcaggataatccggaagaccctgggaactcaccctgctcaatcagagagagcgggctggaaaccgtggctaaatgtagcaaaggcccatgcgaagaacccgctgcaatctcgttctttggcgcgctacggattcccggggtggtggaattcagcctgtgtcttctcttcgcaaaactggtttcctacaccttcctctactggctgccactctatattgccaacgtggcccatttcagcgccaaggaagctggggatttaagcactctgtttgacgtgggcggcatcattggcggaatcgtggctgggctagtgagcgactataccaatgggcgcgcgacaacatgctgtgttatgttaatacttgccgccccaatgatgtttctgtataattatatcggccaagacggcatcgcaagcagcattgtcatgctaatcatctgcggcgggctagtgaacgggccttatgccttgatcactactgccgtttccgcggatctgggaactcacaaaagtctgaagggcaacgccaaggctctgagcactgtgacggcgattattgatggcaccggctcaatcggcgccgctttagggccccttctcgcaggactgatttcccccaccggctggaataatgtgttttatatgctgatatcagctgatgtgctggcttgtctactgctctgcagactggtatataaggaaattttagcgtggaaggtcagcctctcaaggggatcgggcagctctatggtcctaacccatcaatag

SEQ ID NO: 259529 - DNA, 1518 bp, Artificial Sequence
  derived and/or modified sequence
atgaggagttctctggccccaggtgtctggtttttcagagctttttctcgggattcttggtttagggggttgatcttgttgctcacattccttatttatgcctgctaccacatgagtcgcaagcccattagcattgtaaagagccgacttcatcagaactgttctgagcaaattaaacctattaatgatacacacagtctcaacgatacaatgtggtgtagctgggccccctttgacaaggacaactataaggagctgctcggtggtgtagacaacgcgttcctcatcgcttatgcaattggcatgtttatatcaggcgtttttggagaacggctccccctgcggtactacctgagcgccggaatgctgctgagcggactcttcacctctcttttcggtcttggctacttctggaacattcatgaattgtggtacttcgtcgtgattcaggtgtgtaacggattggtgcagactaccggctggccgagcgtggttacatgcgtggggaattggtttggcaaaggcaagagaggctttattatgggtatatggaattcccatacatctgtggggaacatcctaggcagccttattgccggaatttgggtgaacgggcagtggggactatcttttatagtgccaggaatcatcacagcagttatgggtgtgataactttccttttcctcatcgagcatccagaagacgtggactgcgcccctccccagcaccacggggaacccgccgaaaaccaggacaaccccgaagatcccggaaattcaccttgtagcatccgtgagtcagggctggagaccgtagcaaaatgttcaaaaggtccctgcgaggagccggccgctatctcattctttggagcgctcagaattccaggggttgtggagttttctctctgcctcctgtttgccaagttagtctcgtacaccttcttgtattggctgcccctctacattgctaacgtggcacatttttcagccaaggaggccggagatctttccaccctgtttgatgtcggaggaatcattggtggcattgtggctggactggtttccgattatactaacggaagggctacaacatgttgcgtgatgctgattctagcggctccaatgatgttcttatataattatattggccaggatggtatagcaagtagtatagtaatgctcatcatatgcgggggtctggtgaacgggccgtacgcacttatcactactgcggtgtcagccgacctcggaacccataagtcgttaaaggggaatgctaaggctctgtccacggtgacagccatcatcgatggaaccggttctattggggcagctctggggcccttgctggctggcctcatctcaccaacggggtggaataatgtgttctacatgctgatttccgctgacgtgctggcatgcctgctgctgtgtcgacttgtgtacaaagagatcttagcttggaaagtgagcttgtcccggggaagtgggagttccatggtactcacccatcagtag

SEQ ID NO: 259530 - DNA, 1518 bp, Artificial Sequence
  derived and/or modified sequence
atgaggagcagcctggcccctggggtgtggttcttccgggccttcagccgggacagctggttccggggcctcatcctgctgctgaccttcctgatctatgcctgctaccacatgagcaggaagcccatcagcatcgtgaagagccggctgcaccagaactgcagcgagcagatcaagcccatcaatgacacccacagcctgaatgacaccatgtggtgctcctgggccccctttgacaaggacaactacaaggagctgctgggcggcgtggacaatgccttcctgattgcctatgccatcggcatgttcatctctggagtgtttggagagcggctgcccctgcgctactacctgtctgctggcatgctgctgagcggcctcttcaccagcctgtttggcctgggctacttctggaacatccacgagctgtggtactttgtggtgatccaggtgtgcaatggcctggtgcagaccaccggctggcccagcgtggtgacctgtgtgggcaactggtttgggaagggcaagaggggcttcatcatgggcatctggaacagccacacctctgtgggcaacatcctgggcagcctgattgctggcatctgggtgaatggccagtggggcctgtccttcatcgtgcccggcatcatcacagctgtgatgggcgtcatcaccttcctgttcctgattgagcacccagaagatgtggactgtgccccaccccagcaccacggggagcctgctgagaaccaggacaacccagaagatcctggcaacagcccctgcagcatccgggagagcggcctggagaccgtggccaagtgcagcaagggcccctgtgaggagcctgctgccatctccttctttggagccctgcgcatccctggggtggtggagttcagcctgtgcctgctgtttgccaagctggtgtcctacaccttcctgtactggctgcccctgtacatcgccaacgtggcccacttcagcgccaaggaggccggggacctgagcaccctgtttgatgtgggcggcatcatcggcggcatcgtggccggcctggtgtctgactacaccaacggccgggccaccacctgctgcgtgatgctgatcctggccgcccccatgatgttcctgtacaactacatcggccaggacggcatcgccagcagcatcgtgatgctgatcatctgtggcggcctggtgaatggcccctatgccctgatcaccacagctgtgtctgctgacctgggcacccacaagagcctgaagggaaatgccaaggccctgagcacagtgacagccatcattgatggcaccggcagcatcggggccgccctgggccccctgctggccggcctcatcagccccaccggctggaacaacgtgttctacatgctgatctctgcagatgtgctggcctgcctgctgctgtgccgcctggtgtacaaggagatcctggcctggaaggtgtccctgagccggggcagcggcagctccatggtgctgacccaccagtag

SEQ ID NO: 259531 - DNA, 1518 bp, Artificial Sequence
  derived and/or modified sequence
atgcggagcagcctggcccccggcgtgtggttcttccgggccttcagcagggactcatggttccgcggacttatcttgctgctgactttcctcatctatgcttgctatcacatgagtagaaaaccaattagtatcgtaaagtctaggctgcatcaaaactgcagcgaacaaattaagcccatcaacgatacccactcactgaacgataccatgtggtgctcgtgggccccttttgacaaggataactataaggagcttctgggcggagtcgataacgcattcctgatcgcttacgctataggaatgttcataagtggcgtgttcggagagcgcttacctctaaggtactatctgtcagccgggatgttactctccggactgttcacctccctcttcggacttggttacttctggaatatccacgagctctggtactttgtcgtgattcaagtgtgcaacggactggtacagacgacaggctggccctccgtagtgacttgtgttgggaactggttcggcaagggcaagcgcggctttatcatgggtatctggaacagccatacctccgtggggaacatcttagggagcctaattgctgggatctgggtgaacgggcagtggggtctcagctttatcgtaccaggaatcatcacggctgtcatgggcgtgataacatttctctttctcatcgagcatccggaagacgtggactgcgcccctccacagcaccacggtgagcctgccgagaaccaggataacccagaggatcctgggaactccccgtgctccattagagagtctggactcgagaccgtagctaagtgttccaagggaccttgcgaagagcccgccgcaatttcgttttttggagctttgagaatacccggagtggtcgagtttagcctgtgtctcttgttcgccaagcttgtgagttacacctttctgtattggctccccctgtacatcgccaatgtcgcgcacttttctgcaaaagaggcaggagacctgagcacccttttcgatgtgggaggcataattggtggaatagtcgccggcctcgtcagtgattatacaaacggacgcgccacaacatgttgcgtcatgcttattctggcagctcctatgatgttcctgtataactatataggccaggatggaatcgcctccagcatcgttatgcttattatttgtggtggccttgtgaacggcccatacgctcttattaccacggctgtgtcagctgacctgggcacccataaatccctcaagggtaatgccaaggccctgtcaacagtcacggctataatagatgggactggatcaataggcgccgcccttgggcccctgttggcggggttgatttctccaacgggctggaacaatgttttttatatgctgataagtgctgatgtcctggcatgcttgctactatgtcgtctggtatacaaagagatcctggcctggaaagtctccctgagcaggggatccggatcgagtatggtgttgactcaccagtag

SEQ ID NO: 259532 - DNA, 1518 bp, Artificial Sequence
  derived and/or modified sequence
atgcggagcagcctggcccccggcgtgtggttcttccgggccttctcgcgcgatagttggttccgcggcttgatcctcctgctgactttccttatatatgcctgctaccacatgagtagaaagcccatttctattgtcaagtctcggttacatcagaactgcagcgaacagattaaaccaattaacgatacacattctctgaacgacactatgtggtgttcctgggcaccctttgacaaagataactataaggagttactcggtggggttgataatgcttttttgattgcttatgccattgggatgttcatttccggggtgtttggagagaggctcccactgcggtactacctgagcgccggtatgctcctgtctggtttgttcacctccctattcgggttgggctatttttggaatatccatgagctttggtatttcgtcgttattcaagtctgcaacggtttggtgcagaccacaggatggccgagcgtggtgacttgcgtcggcaactggtttgggaagggtaagcggggtttcattatggggatctggaactctcacacctccgtggggaacattctcgggtctcttatcgccggtatttgggtgaacggccaatggggcttgtcgttcattgtgcctggtattatcactgccgttatgggcgtgattacgtttctctttctgatagagcatccagaagacgtagattgtgcacctccccagcatcacggcgaaccagccgagaaccaagacaatccggaggatccgggcaactcgccgtgctctatccgcgaatccggcctcgagacagttgcgaaatgctcaaaaggaccctgtgaggaacctgctgccatttcattctttggcgcactccgaatcccaggggtcgtggagttttcactgtgtctcttgtttgcaaaactggtgagctacacctttctctattggcttccattgtacattgccaacgttgcccacttttccgccaaggaggccggagatctgagcaccctgttcgacgtaggaggaatcataggggggatcgtggccgggctcgtttctgactatacaaacggacgggcaacgacgtgttgcgtgatgctgatcctcgccgccccaatgatgtttctatataactacatcggtcaggatggcattgcatcttctatcgtcatgttgattatttgcggagggttggtgaatgggccctacgctctgattaccacagcagtgtccgctgatcttggaactcataagtccttgaaggggaatgcaaaagctctttccactgttaccgcgatcatagacggtacagggtccatcggggcagccctcggccccttgttagccggcctaattagcccaaccgggtggaataacgtgttctatatgttgatctctgccgacgtgttggcctgcctgttgctgtgccgcctggtatacaaggagattcttgcctggaaagtgagtctatccaggggatccgggagtagcatggtgcttacccaccagtag

SEQ ID NO: 259533 - DNA, 1518 bp, Artificial Sequence
  derived and/or modified sequence
atgcgttctagcttggccccaggcgtctggtttttccgggcattcagtagagactcttggttccggggactgattttgttgctgacgtttctaatttatgcctgctatcacatgtccaggaagccaatctccatcgtgaaatcaaggttgcaccagaactgcagcgaacagataaagcccattaatgacacacattctcttaacgacacaatgtggtgctcctgggccccatttgataaggataactacaaggaactgctgggtggagtggataatgccttcctcattgcttacgcaataggaatgttcatctcgggagtgttcggggaaaggctgccactgcgctattacctcagcgctggcatgctgctgagcgggctatttacatctttgttcgggcttggctacttttggaacatacatgaactctggtatttcgtggtcatacaggtatgtaacggcctggttcagacaactggctggcctagtgtcgtcacctgtgttggaaactggttcggaaaggggaagagaggatttattatgggcatttggaactctcacaccagtgtcgggaatatcctgggaagtcttatcgcaggaatctgggttaatggacagtggggcttaagctttatcgtcccaggaattattacagctgtcatgggggtcattaccttcctgtttctgatagaacatccagaggacgtcgattgtgcccctccccagcaccacggcgagccagccgagaatcaggacaatcctgaagacccaggaaattccccgtgcagcatcagagagtctggactggaaacagtggccaagtgtagcaaagggccttgcgaagagcctgcagccatctcgttttttggcgctttgaggatccccggtgtcgtggaattcagtctttgcctgctctttgctaaactcgtgtcctacacttttctctactggctgcctttgtatattgcgaatgtcgcgcactttagcgcaaaagaggccggtgacctgagcacactgttcgacgtgggcggtattatcgggggaatcgtggccggtctggttagcgattacacaaatggtcgcgcaaccacctgctgcgtgatgctgatcctcgcggctccgatgatgttcctatacaattatatcggtcaggatggaattgcttctagcattgtaatgttgatcatatgtggaggcttggttaacgggccatacgctctaatcacaactgcggttagcgctgatctcggtactcacaagtcccttaagggaaacgccaaggccctgtccacagtaaccgctattattgacggaaccggctccatcggcgcagccctcggacctcttctcgccggattaatcagtccaactggctggaacaacgtgttctatatgctaatttcggcagacgtgctcgcctgtctgctgctgtgccggctggtatacaaagagatcctagcctggaaagtcagcctgtcccgcggttccgggtcatctatggttctgacccaccagtag

SEQ ID NO: 259534 - DNA, 1518 bp, Artificial Sequence
  derived and/or modified sequence
atgcggtcaagccttgccccaggcgtttggttcttccgggcattctctcgggacagctggtttcgtggcttgatcctgctcctgacattcctgatctacgcctgctatcatatgtctaggaaacccatatctatcgtgaagtctagactccatcaaaactgctccgagcagatcaagcccatcaacgatacgcacagcctgaatgacaccatgtggtgttcttgggcacccttcgacaaggacaattataaagaattactgggaggagtggacaacgcttttttaattgcctacgctattggtatgtttatcagcggcgtcttcggcgagcgcttaccactgcgatactacctatctgctgggatgctgctctctggactattcactagcctgttcggtctgggctatttttggaatatacatgagttgtggtatttcgtggttattcaagtgtgcaacggtctggtgcagaccacaggctggcctagcgtggtgacctgtgtggggaattggttcgggaagggaaagagagggtttattatggggatatggaactcacacacatctgtggggaatatcctggggtctctcattgcaggaatctgggtgaacgggcaatggggcttgtcctttatcgtgccagggatcatcacagcagtgatgggagtgatcactttcctattcctgatagagcacccggaggacgtggactgtgcacccccacagcaccacggcgagcccgcagagaatcaggataacccagaagaccccggaaactcgccatgcagcattagagaatccggcctcgagaccgttgcgaaatgcagcaagggaccgtgtgaagaacccgctgccatcagtttctttggggcactgcggattcctggcgtcgtggagttctcactgtgtctcctctttgccaagctggtgtcatacacattcttgtattggctccctctctatatcgctaacgtcgcccacttctcagctaaagaagccggtgacctctcgactttatttgatgtcgggggaataattggcggaatagtggccggattggtaagcgattacacgaatggaagggctaccacctgttgtgttatgctcatcttggctgccccaatgatgttcttatacaactacattggtcaggacggcatcgcctcctcgatcgtgatgttgatcatttgcgggggattagttaatggtccatatgcccttatcaccacagccgtgagtgccgacctgggcacccataagtccctcaagggtaatgctaaggctctaagcaccgtgacggcgatcattgacggcacggggtctattggagccgctttggggcctttattagctggcttgatctctcctactggatggaataacgtgttctatatgctgatttcggctgatgtgcttgcctgtctcctgctgtgtcgactggtctacaaggagatactggcctggaaagtgtccctgtccagagggtcaggatcaagtatggtgctgacgcaccagtag

SEQ ID NO: 259535 - DNA, 2696 bp, Artificial Sequence
  derived and/or modified sequence
gtcgactcagccttaggtaccggtcaggcaaaatgcggtcctccctggctccgggagtctggttcttccgggccttctccagggacagctggttccgaggcctcatcctgctgctgaccttcctaatttacgcctgctatcacatgtccaggaagcctatcagtatcgtcaagagccgtctgcaccagaactgctcggagcagatcaaacccatcaatgatactcacagtctcaatgacaccatgtggtgcagctgggccccatttgacaaggacaactataaggagttactagggggcgtggacaacgccttcctcatcgcctatgccatcggcatgttcatcagtggggtttttggggagcggcttccgctccgttactacctctcagctggaatgctgctcagtggccttttcacctcgctctttggcctgggatatttctggaacatccacgagctctggtactttgtggtcatccaggtctgtaatggactcgtccagaccacaggctggccctctgtggtgacctgtgttggcaactggttcgggaaggggaagcgggggttcatcatgggcatctggaattcccacacatctgtgggcaacatcctgggctccctgatcgccggcatctgggtgaacgggcagtggggcctgtcgttcatcgtgcctggcatcattactgccgtcatgggcgtcatcaccttcctcttcctcatcgaacacccagaagatgtggactgcgcccctcctcagcaccacggtgagccagctgagaaccaggacaaccctgaggaccctgggaacagtccctgctctatcagggagagcggccttgagactgtggccaaatgctccaaggggccatgcgaagagcctgctgccatcagcttctttggggcgctccggatcccaggcgtggtcgagttctctctgtgtctgctgtttgccaagctggtcagttacaccttcctctactggctgcccctctacatcgccaatgtggctcactttagtgccaaggaggctggggacctgtctacactcttcgatgttggtggcatcataggcggcatcgtggcagggctcgtctctgactacaccaatggcagggccaccacttgctgtgtcatgctcatcttggctgcccccatgatgttcctgtacaactacattggccaggacgggattgccagctccatagtgatgctgatcatctgtgggggcctggtcaatggcccatacgcgctcatcaccactgctgtctctgctgatctggggactcacaagagcctgaagggcaacgccaaagccctgtccacggtcacggccatcattgacggcaccggctccataggtgcggctctggggcctctgctggctgggctcatctcccccacgggctggaacaatgtcttctacatgctcatctctgccgacgtcctagcctgcttgctcctttgccggttagtatacaaagagatcttggcctggaaggtgtccctgagcagaggcagcggctctagtatggtcctaacccaccagtgatagtattttcctcaagtcccatgacttttgtataaagaaatatgaggccccaattggaacagcagcatggagggtcccagttgggtccccaacgtgctccccatgggcaagacaatggaaacttccacaagcagggaaggcaaaccctctttattgaacattagccagcccagcccagaccccagggctgcctaaggacacagagattctccatgggaaggggactgccaagcatgaggaaatagaagattcaggggcctgagctctggaagctgcaagcaaaagggatgggactagggctgagttgtgtctccattttgataaggaaaggatatgctcagactcttgcttgttcagattccaagacagaaggcttcacaaggccaacgcctggaaaatgggcatctctccttcccatgttaagctttaacctctgtaatctgcctgtatctataggtgggcatctcactccaccaaaggagcccagcctctctttgtccctctatccatgcaacagtcttctctgtgcatttccccaagctgggccctcttctactctccatttaggcctgttgataactccattacccgcccatcactgctgttcctccagggccagcactcgggcgaggcaggggagctgccttcggtacataatttgaaggggcactccctcttgggcacatgccggccctgagtgcctcccttgcctcactctgatcctggccccataatgtcctcagtggaaggtgatgggggccggtgctgtggggagagtagaaagaggggttggcatgactaaaaataccagtatgtgtattaagtattttgagaatgaaatgccaaggagtgcctactatatgccagctctaggaatggagtagacagtggacacaagaaggacttacgccctgagcacaggtgccaatggtgacaagactggcaagacgtgagggcatgaatggttcattcaggcagctgctgcagatgtggtcacctggtgccatctgctgctcccttttccacttttctatgtcctccttccaccccaagtcccggatcactcgctgttttctggctagctcttggcatctccatctgagcctaaagttgcccactggcaccaatagattctgtttgacctgc

SEQ ID NO: 259536 - DNA, 1769 bp, Artificial Sequence
  derived and/or modified sequence
agtggcggggaagcaaagcacaggagcgctgtggtgccagcggccgggctagggacgactggcgggtttgcgctggacccgaccccgagggcgggcgcaagggggcgggcgctgccgtactcaggccgcggggccagggcgggccggccggcggggcatttaaaccccgctgacagccagtccagcccgggacacgcgcccagctctgtagcctcctccgtcgactcagccttaggtaccggtcaggcaaaatgcggtcctccctggctccgggagtctggttcttccgggccttctccagggacagctggttccgaggcctcatcctgctgctgaccttcctaatttacgcctgctatcacatgtccaggaagcctatcagtatcgtcaagagccgtctgcaccagaactgctcggagcagatcaaacccatcaatgatactcacagtctcaatgacaccatgtggtgcagctgggccccatttgacaaggacaactataaggagttactagggggcgtggacaacgccttcctcatcgcctatgccatcggcatgttcatcagtggggtttttggggagcggcttccgctccgttactacctctcagctggaatgctgctcagtggccttttcacctcgctctttggcctgggatatttctggaacatccacgagctctggtactttgtggtcatccaggtctgtaatggactcgtccagaccacaggctggccctctgtggtgacctgtgttggcaactggttcgggaaggggaagcgggggttcatcatgggcatctggaattcccacacatctgtgggcaacatcctgggctccctgatcgccggcatctgggtgaacgggcagtggggcctgtcgttcatcgtgcctggcatcattactgccgtcatgggcgtcatcaccttcctcttcctcatcgaacacccagaagatgtggactgcgcccctcctcagcaccacggtgagccagctgagaaccaggacaaccctgaggaccctgggaacagtccctgctctatcagggagagcggccttgagactgtggccaaatgctccaaggggccatgcgaagagcctgctgccatcagcttctttggggcgctccggatcccaggcgtggtcgagttctctctgtgtctgctgtttgccaagctggtcagttacaccttcctctactggctgcccctctacatcgccaatgtggctcactttagtgccaaggaggctggggacctgtctacactcttcgatgttggtggcatcataggcggcatcgtggcagggctcgtctctgactacaccaatggcagggccaccacttgctgtgtcatgctcatcttggctgcccccatgatgttcctgtacaactacattggccaggacgggattgccagctccatagtgatgctgatcatctgtgggggcctggtcaatggcccatacgcgctcatcaccactgctgtctctgctgatctggggactcacaagagcctgaagggcaacgccaaagccctgtccacggtcacggccatcattgacggcaccggctccataggtgcggctctggggcctctgctggctgggctcatctcccccacgggctggaacaatgtcttctacatgctcatctctgccgacgtcctagcctgcttgctcctttgccggttagtatacaaagagatcttggcctggaaggtgtccctgagcagaggcagcggctctagtatggtcctaacccaccagtga

SEQ ID NO: 259537 - protein, 379 aa, Artificial Sequence
  derived and/or modified sequence
MPHSSLHPSIPCPRGHGAQKAALVLLSACLVTLWGLGEPPEHTLRYLVLHLASLQLGLLLNGVCSLAEELRHIHSRYRGSYWRTVRACLGCPLRRGALLLLSIYFYYSLPNAVGPPFTWMLALLGLSQALNILLGLKGLAPAEISAVCEKGNFNVAHGLAWSYYIGYLRLILPELQARIRTYNQHYNNLLRGAVSQRLYILLPLDCGVPDNLSMADPNIRFLDKLPQQTGDHAGIKDRVYSNSIYELLENGQRAGTCVLEYATPLQTLFAMSQYSQAGFSREDRLEQAKLFCRTLEDILADAPESQNNCRLIAYQEPADDSSFSLSQEVLRHLRQEEKEEVTVGSLKTSAVPSTSTMSQEPELLISGMEKPLPLRTDFS

SEQ ID NO: 259538 - protein, 253 aa, Artificial Sequence
  derived and/or modified sequence
MPHSSLHPSIPCPRGHGAQKAALVLLSACLVTLWGLGEPPEHTLRYLVLHLASLQLGLLLNGVCSLAEELRHIHSRYRGSYWRTVRACLGCPLRRGALLLLSIYFYYSLPNAVGPPFTWMLALLGLSQALNILLGLKGLAPAEISAVCEKGNFNVAHGLAWSYYIGYLRLILPELQARIRTYNQHYNNLLRGAVSQRLYILLPLDCGVPDNLSMADPNIRFLDKLPQQTGDHAGIKDRVYSNSIYELLENGQR

SEQ ID NO: 259539 - DNA, 1140 bp, Artificial Sequence
  derived and/or modified sequence
atgccccacagcagcctgcaccccagcatcccctgccccagaggccacggcgcccagaaggccgccctggtgctgctgagcgcctgcctggtgaccctgtggggcctgggcgagccccccgagcacaccctgagatacctggtgctgcacctggccagcctgcagctgggcctgctgctgaacggcgtgtgcagcctggccgaggagctgagacacatccacagcagatacagaggcagctactggagaaccgtgagagcctgcctgggctgccccctgagaagaggcgccctgctgctgctgagcatctacttctactacagcctgcccaacgccgtgggcccccccttcacctggatgctggccctgctgggcctgagccaggccctgaacatcctgctgggcctgaagggcctggcccccgccgagatcagcgccgtgtgcgagaagggcaacttcaacgtggcccacggcctggcctggagctactacatcggctacctgagactgatcctgcccgagctgcaggccagaatcagaacctacaaccagcactacaacaacctgctgagaggcgccgtgagccagagactgtacatcctgctgcccctggactgcggcgtgcccgacaacctgagcatggccgaccccaacatcagattcctggacaagctgccccagcagaccggcgaccacgccggcatcaaggacagagtgtacagcaacagcatctacgagctgctggagaacggccagagagccggcacctgcgtgctggagtacgccacccccctgcagaccctgttcgccatgagccagtacagccaggccggcttcagcagagaggacagactggagcaggccaagctgttctgcagaaccctggaggacatcctggccgacgcccccgagagccagaacaactgcagactgatcgcctaccaggagcccgccgacgacagcagcttcagcctgagccaggaggtgctgagacacctgagacaggaggagaaggaggaggtgaccgtgggcagcctgaagaccagcgccgtgcccagcaccagcaccatgagccaggagcccgagctgctgatcagcggcatggagaagcccctgcccctgagaaccgacttcagctag

SEQ ID NO: 259540 - DNA, 1140 bp, Artificial Sequence
  derived and/or modified sequence
atgccgcacagctccctgcatccatcaattccgtgcccaagaggacacggcgcccaaaaggctgcactagtattgctttccgcatgtctggttaccctatgggggctgggcgagccacccgaacacacgctgagatatctggttttacacctggcttccctgcagctggggctgctgcttaatggagtatgctcattggcagaggaactgcgccatattcatagcagatatcgcgggtcctactggaggacagtccgcgcgtgtcttgggtgtccgctgaggcgtggagctttactgcttctctccatttatttttattactcattgcccaacgccgtggggccaccctttacctggatgctggccctcctggggctcagccaggcactgaacatcctactgggtctcaagggcctggccccggccgagattagtgccgtgtgcgaaaagggaaattttaatgtggcacacgggctagcctggagctattatattggatacttgcgactgatcctcccagagctgcaagcccggatcagaacctacaatcagcattacaacaatttgctgagaggggccgtttcccagagattgtacatccttctcccactagactgtggagtcccagataacctgagcatggcagatccaaacatccggttcttagataagctgccccagcaaaccggcgaccacgctggtatcaaggatcgggtctatagtaactctatctatgagctgctggagaacggccagcgggccggtacttgtgtcctggaatatgcgacacccctccagaccttgtttgccatgagccagtatagccaagcaggattctctagggaagacagactggaacaggctaagctgttttgccgcaccctggaagatatacttgccgatgccccagaaagccagaacaattgtagattaatagcttaccaggaacccgcagacgatagttcattctcgttgtcccaagaagttctccggcaccttcggcaggaagaaaaagaagaagttaccgtggggagccttaagacatccgctgtgccaagcactagtaccatgtcccaggagccggagcttctgatcagcggcatggagaagccactcccactgagaaccgacttcagctag

SEQ ID NO: 259541 - DNA, 1140 bp, Artificial Sequence
  derived and/or modified sequence
atgccccacagcagcctgcaccccagcatcccctgcccccggggccacggggcccagaaggccgccctggtgctgctgagcgcctgcctggtgaccctgtggggcctgggggagcccccagagcacaccctgcgctacctggtgctgcacctggccagcctgcagctgggcctgctgctgaatggagtgtgcagcctggccgaggagctgcggcacatccacagccgctaccggggcagctactggaggacagtgcgggcctgcctgggctgccccctgcggcggggggccctgctgctgctgagcatctacttctactacagcctgcccaatgctgtgggcccccccttcacctggatgctggccctgctgggcctgagccaggccctgaacatcctgctgggcctgaagggcctggccccagctgagatctctgctgtgtgtgagaagggcaacttcaacgtggcccacggcctggcctggagctactacatcggctacctgcggctcatcctgcctgagctgcaggcccgcatccgcacctacaaccagcactacaacaacctgctgcggggagctgtgtcccagaggctgtacatcctgctgcccctggactgtggggtgcctgacaacctgtccatggctgaccccaacatccgcttcctggacaagctgccccagcagacaggagaccatgctggcatcaaggacagagtgtacagcaacagcatctatgagctgctggagaatggccagagagctggcacctgtgtgctggagtatgccacccccctgcagaccctgtttgccatgagccagtacagccaggccggcttcagccgggaggaccggctggagcaggccaagctgttctgcaggaccctggaggacatcctggctgatgcccctgagagccagaacaactgccgcctcatcgcctaccaggagccagcagatgacagcagcttcagcctgagccaggaggtgctgcggcacctgcggcaggaggagaaggaggaggtgacagtgggcagcctgaagaccagcgctgtgcccagcaccagcaccatgagccaggagcctgagctgctgatcagcggcatggagaagcccctgcccctgaggacagacttctcctag

SEQ ID NO: 259542 - DNA, 1140 bp, Artificial Sequence
  derived and/or modified sequence
atgccccacagcagcctgcaccccagcatcccctgcccccggggccacggggctcagaaggctgcccttgtgctgctctcagcttgccttgtcactttgtggggattgggggaaccccctgaacataccctccgctatttggtgctccacctcgccagtctgcagctggggttgctcttaaacggtgtttgcagcctggcagaagagctgcgacacatccactcacggtacagagggagctactggaggaccgtcagggcctgcctgggttgccctctgaggcggggtgcattattgctgctcagcatctatttttactactccctccccaacgcagtcgggccacccttcacctggatgcttgcacttttgggcctctctcaggccctgaatattctcctaggcctcaaagggttagcccctgccgagatctcagccgtgtgcgaaaaaggcaattttaatgtggcacatggcttggcatggtcctactacatcggctacctgagacttatactgccggaactccaagcgcggattcggacttataatcaacactataacaatctgttaagaggggccgtgtcccagcggctctacatcttactgcctctggattgcggcgtgccagacaatctgtccatggcagaccctaatatccggtttctcgacaagctgccgcaacaaaccggagaccatgctgggatcaaagaccgcgtgtactcaaacagcatctatgaattactggagaacgggcagagagctgggacatgcgtcttggagtacgctacacccctacagactctttttgcaatgtctcagtatagccaggcaggattctctcgggaagacagactggagcaagccaagctattctgccgaactctggaggacatcctggctgacgcccctgagtcacaaaacaattgcaggctgatagcttaccaggagccggccgatgattcatccttcagtctctcccaagaagtcctccggcacctcaggcaggaagagaaagaggaggtcaccgtcggtagcctaaagacctctgcagttccaagcacatcgacgatgtctcaggagcctgagctacttatcagtggaatggagaagccattgccactcaggaccgatttctcctag

SEQ ID NO: 259543 - DNA, 1140 bp, Artificial Sequence
  derived and/or modified sequence
atgccccacagctcattgcatcccagtattccctgtcctcggggacatggagcccagaaggctgcgctggtgctgctgagtgcgtgtttggtcacactatggggcctaggcgaaccaccagaacacactctgcgttatctggtgcttcacttagcaagtttgcaacttggccttctgctcaatggagtgtgttccctcgcagaggagctccgccacatacactcacggtacaggggctcctattggcgaaccgttcgggcatgtctgggttgcccgctgaggagaggggcacttttacttctgagcatttatttttattattcccttccaaatgccgtgggaccgcctttcacttggatgctcgctctcctgggactgagtcaagccctgaacatcttgctgggacttaagggccttgctcccgctgagataagtgctgtttgtgagaagggaaactttaacgtggcacacggattagcatggagctactacatcggatatctccggctgattctgccagagctgcaggcccgtatcagaacctacaaccagcactacaataacctgctgaggggtgcagtgtcccagcggttatatatccttttgcccttggactgcggggtgccagataatcttagtatggctgatcccaatatccgcttcctggacaagctcccccaacagacgggtgaccatgctggaatcaaagacagagtgtactctaattctatatatgaattattggaaaatgggcaacgagcaggcacttgtgtgctggagtatgccaccccactgcagacactcttcgccatgtcccagtactcacaggccggattttctcgtgaggatcgattggagcaggcaaaactgttctgtaggacactggaagatatcttagcggatgctcctgagagccaaaataattgccggctgattgcataccaggagccagcggacgattcgtccttctccttgagccaggaggttctacgccatcttcggcaagaggaaaaagaagaggttacagtcggctcactcaaaacttccgctgtcccttcaacttctacgatgtcccaggagccagaactccttatctcggggatggagaaacctctgcccctgcgaacagatttttcgtag

SEQ ID NO: 259544 - DNA, 1771 bp, Artificial Sequence
  derived and/or modified sequence
tataaaaatagctcttgttaccggaaataactgttcatttttcactcctccctcctaggtcacacttttcagaaaaagaatctgcatcctggaaaccagaagaaaaatatgagacggggaatcatcgtgtgatgtgtgtgctgcctttggctgagtgtgtggagtcctgctcaggtgttaggtacagtgtgtttgatcgtggtggcttgaggggaacccgctgttcagagctgtgactgcggctgcactcagagaagctgcccttggctgctcgtagcgccgggccttctctcctcgtcatcatccagagcagccagtgtccgggaggcagaagatgccccactccagcctgcatccatccatcccgtgtcccaggggtcacggggcccagaaggcagccttggttctgctgagtgcctgcctggtgaccctttgggggctaggagagccaccagagcacactctccggtacctggtgctccacctagcctccctgcagctgggactgctgttaaacggggtctgcagcctggctgaggagctgcgccacatccactccaggtaccggggcagctactggaggactgtgcgggcctgcctgggctgccccctccgccgtggggccctgttgctgctgtccatctatttctactactccctcccaaatgcggtcggcccgcccttcacttggatgcttgccctcctgggcctctcgcaggcactgaacatcctcctgggcctcaagggcctggccccagctgagatctctgcagtgtgtgaaaaagggaatttcaacgtggcccatgggctggcatggtcatattacatcggatatctgcggctgatcctgccagagctccaggcccggattcgaacttacaatcagcattacaacaacctgctacggggtgcagtgagccagcggctgtatattctcctcccattggactgtggggtgcctgataacctgagtatggctgaccccaacattcgcttcctggataaactgccccagcagaccggtgaccatgctggcatcaaggatcgggtttacagcaacagcatctatgagcttctggagaacgggcagcgggcgggcacctgtgtcctggagtacgccacccccttgcagactttgtttgccatgtcacaatacagtcaagctggctttagccgggaggataggcttgagcaggccaaactcttctgccggacacttgaggacatcctggcagatgcccctgagtctcagaacaactgccgcctcattgcctaccaggaacctgcagatgacagcagcttctcgctgtcccaggaggttctccggcacctgcggcaggaggaaaaggaagaggttactgtgggcagcttgaagacctcagcggtgcccagtacctccacgatgtcccaagagcctgagctcctcatcagtggaatggaaaagcccctccctctccgcacggatttctcttgagacccagggtcaccaggccagagcctccagtggtctccaagcctctggactgggggctctcttcagtggctgaatgtccagcagagctatttccttccacagggggccttgcagggaagggtccaggacttgacatcttaagatgcgtcttgtccccttgggccagtcatttcccctctctgagcctcggtgtcttcaacctgtgaaatgggatcataatcactgccttacctccctcacggttgttgtgaggactgagtgtgtggaagtttttcataaactttggatgctagtgta

SEQ ID NO: 259545 - DNA, 2312 bp, Artificial Sequence
  derived and/or modified sequence
gatacacgctaggcatgtccagacattaaccgtaatcagaagcctcctagggttgcaagcctccttggctaatggttgggctttgtgcctcactcttctcttacacctggggagtcaagtctggatcctctgctccatatttatttagcaaataaaacactgatctcaaacagcaacggaacctgtgtacttgaggtgttttttgaaaactaatcagaagaggaatgcttatctcccaagaaaattgaaaccatctgtaaaagaatcttggctgtgctgtgttttgattagattgaagcttggtgtaaagagaaaacacaaaagaccgcagaatatttacaacatttgaattcctgtttctccatcaaagcacattgtcatcaaagctactttgggtatagaaaaaaggtcaattccaattcccaggaatccttaaccacaactttacttggaaatttccggtaatacttaaaacaccattttgcagcaattctttatgataaactgtaaaatacagctacccgaaaatgactgacaaatcaatcgtcattctgagcctgatggtttttcacagctctttcataaatggaaaaacatgtagacggcaattggtggaagaatggcatccacaaccctcatcatatgtggtaaattggacactaacagaaaacatctgcttggacttctacagagattgctggtttttgggtgtaaacactaaaatagatacttcaggcaatcaagctgttccccagatttgccctttgcaaattcaattaggagatatccttgtaatttcttctgaaccatctcttcaatttccagaaataaatttgatgaatgtttctgaaacatctttcgttggctgtgtgcaaaataccacaacggaagatcagttactttttggctgcagactaaaaggaatgcacactgttaattctaagtggctgagtgttgggacacattattttatcacagttatggcaagtggtccatcaccttgtccactgggacttcgactaaatgtgacagtgaaacagcagttctgccaggaatctctgagttcagaattttgctctggtcatggtaaatgtcttagtgaagcttggagcaagacatatagctgccattgccagcctccattttctggaaaatactgccaggaacttgatgcatgttcttttaaaccatgtaaaaataatggcagttgcattaataaaagagaaaattgggatgagcaagcatatgaatgtgtctgtcacccaccatttacaggaaagaattgctcagaaataattggccagtgtcaaccacatgtctgtttccatggaaactgcagcaatattacttcaaatagtttcatttgtgaatgtgatgagcaattttcaggtccattctgtgaggtgtcagcaaaaccttgtgtttctctgcttttttggaaaagaggaatttgcccaaatagcagttctgcttatacttatgaatgcccaaaaggatcttccagccaaaatggtgaaactgatgtcagtgagttttcattagtaccatgtcagaatggtactgactgcatcaaaatatcaaatgatgttatgtgcatctgttcaccaatatttacagatttgctttgtaagagcattcaaacatcatgtgagtcatttcctttgaggaataatgctacatgtaagaaatgtgagaaagattatccttgcagctgtatatcaggatttactgaaaaaaactgtgagaaagcaattgaccactgtaaactgctcagcatcaactgtctgaatgaagaatggtgtttcaatataattggaagattcaaatatgtatgcattccagggtgcacaaaaaatccatgttggtttttgaagaatgtttacctaattcatcaacacctctgctactgtggagtcaccttccatggtatttgccaagataaaggtcctgctcaatttgaatatgtgtggcaattgggatttgcaggatctgaaggcgaaaagtgccaaggggttattgatgcctatttctttctggctgcaaactgcactgaagatgcaacctatgtgaacgatcctgaagataataattcttcatgttggttcccacatgaaggcacaaaagagatttgtgcaaatggatgcagttgtttgagtgaagaagacagtcaggaatatcggtatctatgttttctcagatgggctggcaacatgtatctggaaaatacaactgatgatcaagaaaatgagtgtcaacatgaagctgtttgtaaagatgaaattaatagacccaggtatttatgtatcatttga

SEQ ID NO: 259546 - DNA, 2168 bp, Artificial Sequence
  derived and/or modified sequence
gtgttttttgaaaactaatcagaagaggaatgcttatctcccaagaaaattgaaaccatctgtaaaagaatcttggctgtgctgtgttttgattagattgaagcttggtgtaaagagaaaacacaaaagaccgcagaatatttacaacatttgaattcctgtttctccatcaaagcacattgtcatcaaagctactttgggtatagaaaaaaggtcaattccaattcccaggaatccttaaccacaactttacttggaaatttccggtaatacttaaaacaccattttgcagcaattctttatgataaactgtaaaatacagctacccgaaaatgactgacaaatcaatcgtcattctgagcctgatggtttttcacagctctttcataaatggaaaaacatgtagacggcaattggtggaagaatggcatccacaaccctcatcatatgtggtaaattggacactaacagaaaacatctgcttggacttctacagagattgctggtttttgggtgtaaacactaaaatagatacttcaggcaatcaagctgttccccagatttgccctttgcaaattcaattaggagatatccttgtaatttcttctgaaccatctcttcaatttccagaaataaatttgatgaatgtttctgaaacatctttcgttggctgtgtgcaaaataccacaacggaagatcagttactttttggctgcagactaaaaggaatgcacactgttaattctaagtggctgagtgttgggacacattattttatcacagttatggcaagtggtccatcaccttgtccactgggacttcgactaaatgtgacagtgaaacagcagttctgccaggaatctctgagttcagaattttgctctggtcatggtaaatgtcttagtgaagcttggagcaagacatatagctgccattgccagcctccattttctggaaaatactgccaggaacttgatgcatgttcttttaaaccatgtaaaaataatggcagttgcattaataaaagagaaaattgggatgagcaagcatatgaatgtgtctgtcacccaccatttacaggaaagaattgctcagaaataattggccagtgtcaaccacatgtctgtttccatggaaactgcagcaatattacttcaaatagtttcatttgtgaatgtgatgagcaattttcaggtccattctgtgaggtgtcagcaaaaccttgtgtttctctgcttttttggaaaagaggaatttgcccaaatagcagttctgcttatacttatgaatgcccaaaaggatcttccagccaaaatggtgaaactgatgtcagtgagttttcattagtaccatgtcagaatggtactgactgcatcaaaatatcaaatgatgttatgtgcatctgttcaccaatatttacagatttgctttgtaagagcattcaaacatcatgtgagtcatttcctttgaggaataatgctacatgtaagaaatgtgagaaagattatccttgcagctgtatatcaggatttactgaaaaaaactgtgagaaagcaattgaccactgtaaactgctcagcatcaactgtctgaatgaagaatggtgtttcaatataattggaagattcaaatatgtatgcattccagggtgcacaaaaaatccatgttggtttttgaagaatgtttacctaattcatcaacacctctgctactgtggagtcaccttccatggtatttgccaagataaaggtcctgctcaatttgaatatgtgtggcaattgggatttgcaggatctgaaggcgaaaagtgccaaggggttattgatgcctatttctttctggctgcaaactgcactgaagatgcaacctatgtgaacgatcctgaagataataattcttcatgttggttcccacatgaaggcacaaaagagatttgtgcaaatggatgcagttgtttgagtgaagaagacagtcaggaatatcggtatctatgttttctcagatgggctggcaacatgtatctggaaaatacaactgatgatcaagaaaatgagtgtcaacatgaagctgtttgtaaagatgaaattaatagacccaggtatttatgtatcatttgagcagataatatcacatatcaaaaagttataattaaattgatagtcatcgaa

SEQ ID NO: 259547 - DNA, 1785 bp, Artificial Sequence
  derived and/or modified sequence
atgactgacaaatctatcgttattctttcgttgatggttttccattcatcctttataaatggtaagacatgcaggcggcagctggtcgaggaatggcaccctcagccttcatcttatgtggtgaactggactttgaccgagaacatttgcctcgacttttacagggactgctggttcctgggggttaacacaaagatagatacttctggcaatcaggctgtgcctcaaatctgccctcttcagatccagttgggcgacatcctcgttatcagctccgagcccagtttgcaatttccagagatcaacctcatgaatgtgagcgagacgtcctttgtaggctgcgtgcagaatactactactgaggaccagctgttatttgggtgccgcctcaagggaatgcatactgttaatagcaaatggctcagtgttggaacacactactttattactgtcatggcctcaggaccttccccatgccctctgggcctgagacttaacgtgacggtgaagcagcagttctgtcaagagagcctgtcatctgagttttgtagcggacacggaaagtgcttatcagaggcatggtccaagacttacagttgtcactgccagcctcctttttcagggaaatactgtcaggagctggatgcttgctccttcaagccttgtaaaaacaatgggtcctgcatcaacaaaagagagaactgggatgaacaagcctacgagtgcgtgtgtcaccctccctttacaggcaaaaattgctcagaaatcatcgggcagtgtcaacctcatgtttgctttcacggaaactgcagcaatatcacatcgaacagttttatttgtgaatgtgatgaacagttctcaggtccattttgtgaagtgagtgccaaaccctgtgtttccctgctcttttggaaacgcggtatctgccccaatagtagttccgcttatacttacgagtgtccgaagggtagttcctctcagaacggagagaccgacgtttcagagttttccctagtaccctgccaaaatggcactgattgcattaagatttccaatgacgtcatgtgcatatgctctcccatatttactgacctgttgtgcaaaagcattcagacttcttgtgagagttttcccctgaggaataatgctacctgtaagaaatgcgagaaggattatccatgtagttgtatttccggcttcacagagaaaaattgcgagaaggcaattgaccactgcaagctgctgagtatcaattgtctcaatgaggagtggtgctttaatataattggtcggtttaagtatgtctgcattccaggttgcaccaaaaatccctgttggttcctaaagaacgtttacctgatacaccagcatttatgctattgcggcgtgacatttcatggcatctgccaggacaaggggccagcccagttcgaatatgtgtggcaattgggattcgccggcagcgagggtgaaaagtgtcagggagtcattgatgcatatttttttttggccgcaaactgtacagaagatgccacctacgttaacgatcccgaagacaataacagctcctgctggtttcctcatgagggaacaaaagaaatatgcgcaaatggctgctcctgtctttcagaggaagactcgcaggaatataggtatctgtgcttcctgaggtgggctgggaatatgtacctggagaatacaactgatgaccaggaaaatgagtgtcagcatgaagccgtgtgcaaagacgaaataaaccggccacggtatctgtgcattatttag

SEQ ID NO: 259548 - DNA, 1785 bp, Artificial Sequence
  derived and/or modified sequence
atgaccgataagagtatagtgatcctgagcttaatggtgtttcacagctccttcatcaatgggaagacctgtagacgccagctggtcgaggagtggcacccccagcccagctcatacgttgtgaactggaccctaacggagaacatctgcctggacttttatcgcgactgctggtttttgggtgtgaatacaaaaatcgacacgtcaggcaaccaagccgtcccccaaatttgcccacttcaaatccagttgggagacattctggtgattagctccgagccctccctccaattccccgagatcaatttaatgaatgtgtccgaaacatcttttgtaggctgtgtgcaaaatacgacaaccgaggaccagctcttgtttggatgtaggcttaaaggcatgcataccgtaaactctaaatggctgtccgtggggacacactacttcatcactgtgatggcttcgggacctagtccatgcccattaggcctcaggctgaatgtgaccgtcaaacagcagttctgccaagagagcttatcatccgaattttgcagtggccacggtaagtgcctttccgaagcatggagcaagacctactcctgccactgccagccaccattctctggaaaatactgccaagagctggatgcttgtagcttcaagccatgcaaaaataatggctcttgcatcaataagagggagaattgggacgaacaggcttatgagtgcgtttgccatcctccttttacagggaagaattgctctgaaatcattggccaatgtcagccacacgtgtgtttccacgggaactgctcaaacatcacctctaactcttttatttgtgagtgcgatgagcagttctcagggccattttgcgaggtctccgcaaaaccatgcgttagcctgctgttctggaagcgcggcatatgccccaatagcagttctgcttatacatacgaatgccccaaagggagcagttctcagaatggtgagactgacgtcagcgagtttagcctcgtcccttgccaaaatggtactgactgcatcaaaatctccaacgatgtgatgtgtatctgcagtccaatatttaccgacctgctctgcaagtcaatacaaacaagctgcgaatcttttcctcttaggaacaatgcaacctgcaagaaatgcgaaaaggactacccctgctcctgcatttccgggtttacagagaagaactgcgagaaggccattgaccactgcaagttgctgagcatcaactgcttgaatgaagaatggtgttttaatatcatcggaaggtttaagtacgtgtgcataccgggctgtacaaagaacccgtgctggtttctcaaaaatgtctacctgatacatcagcatctttgttattgtggcgtcaccttccacggcatttgccaggataaggggccagcacagtttgaatacgtttggcagctgggattcgcaggttcagaaggggagaaatgtcagggtgtcatagatgcctacttctttttagccgctaactgcacggaggacgctacgtatgttaatgacccggaagataataacagcagctgctggttccctcatgaaggcactaaagagatctgtgccaacggctgctcttgcttgtcagaggaggattcccaagagtatcggtacttatgctttctccgctgggctggcaatatgtacctcgaaaacaccactgacgatcaggaaaacgagtgtcaacacgaagccgtgtgcaaggatgagattaacagacccaggtatctttgcatcatttag

SEQ ID NO: 259549 - DNA, 1785 bp, Artificial Sequence
  derived and/or modified sequence
atgacagacaagagcatcgtcatcctgagcctgatggtgttccacagcagcttcatcaacgggaagacctgccggcggcagctggtggaggagtggcacccccagcccagcagctatgtggtgaactggaccctgacagagaacatctgcctggacttctacagagactgctggttcctgggcgtgaacaccaagattgacaccagcggcaaccaggccgtgccccagatctgccccctgcagatccagctgggggacatcctggtgatcagcagcgagcccagcctgcagtttcctgagatcaacctgatgaatgtgtctgagaccagctttgtgggctgtgtgcagaacaccaccacagaggaccagctgctgtttggctgccgcctgaagggcatgcacacagtgaacagcaagtggctgtctgtgggcacccactacttcatcaccgtgatggccagcggccccagcccctgccccctgggcctgcggctgaatgtgacagtgaagcagcagttctgccaggagagcctgagcagcgagttctgcagcggccacggcaagtgcctgtctgaggcctggagcaagacctacagctgccactgccagccccccttcagcggcaagtactgccaggagctggatgcctgcagcttcaagccctgcaagaacaacggcagctgcatcaacaagcgggagaactgggatgagcaggcctatgaatgtgtgtgccacccccccttcaccgggaagaactgcagcgagatcatcggccagtgccagccccacgtgtgcttccacggcaactgcagcaacatcaccagcaacagcttcatctgtgaatgtgatgagcagttcagcggccccttctgtgaggtgtctgccaagccctgtgtgtccctgctcttctggaagaggggcatctgccccaacagcagcagcgcctacacctatgaatgtcccaagggcagcagcagccagaatggagaaacagatgtgtctgagttcagcctggtgccctgccagaatggaacagactgcatcaagatcagcaatgatgtgatgtgcatctgcagccccatcttcacagacctgctgtgcaagagcatccagaccagctgtgagagcttccccctgaggaacaatgccacctgcaagaagtgtgagaaggactacccctgcagctgcatcagcggcttcacagagaagaactgtgagaaggccatcgaccactgcaagctgctgagcatcaactgcctgaatgaggagtggtgcttcaacatcatcggccgcttcaagtatgtgtgcatccctggctgcaccaagaacccctgctggttcctgaagaatgtgtacctgatccaccagcacctgtgctactgtggggtgaccttccacggcatctgccaggacaagggccctgcccagtttgaatatgtgtggcagctgggctttgctggcagcgagggggagaagtgccagggcgtgattgatgcctacttcttcctggccgccaactgcacagaagatgccacctacgtgaatgaccctgaggacaacaacagcagctgctggttcccccatgagggcaccaaggagatctgtgccaacggctgcagctgcctgtctgaggaggacagccaggagtaccgctacctgtgcttcctgcgctgggccggcaacatgtacctggagaacaccacagatgaccaggagaatgaatgccagcatgaagctgtgtgcaaggatgagatcaaccggccccgctacctgtgcatcatctag

SEQ ID NO: 259550 - DNA, 1785 bp, Artificial Sequence
  derived and/or modified sequence
atgaccgacaagagcatcgtgatcctgagcctgatggtgttccactctagctttattaacggaaaaacatgtcgccgccagttggtcgaagaatggcatcctcagccctccagttacgtcgtcaattggaccctcaccgagaacatctgccttgacttctaccgagactgttggtttctgggggtcaacacaaagattgacacgtcggggaaccaggccgttcctcaaatttgccctctgcaaatccagctgggggatattctagtcatcagctcggagccatctctgcagtttccagagatcaatctgatgaacgtatcagagacatcatttgtaggatgcgtacagaacaccactaccgaggatcagctcctgtttggttgccgcctgaagggcatgcacacggttaactccaagtggctgtccgttggcacacactatttcatcaccgtgatggcctctggaccaagcccgtgtcccctgggactcaggctgaatgttaccgtcaagcagcaattctgtcaagagtccctgtcatcggaattctgctccggtcacggcaagtgtttgtctgaggcctggtcgaagacgtatagttgtcactgtcagcctcccttctcgggcaagtactgccaggaactcgatgcatgcagctttaaaccctgcaaaaacaatggatcttgcatcaataagcgggagaattgggacgaacaggcttacgaatgcgtttgtcatccgccgtttaccggcaagaattgcagcgagataatcggacagtgtcagcctcatgtttgcttccacggaaattgttccaatataacttcgaattctttcatttgtgaatgcgacgagcagttcagtggaccattttgcgaggttagcgctaagccatgcgtatctctactgttctggaagagaggcatctgccctaacagttcatctgcatacacctatgaatgtcccaaaggctcctctagccaaaatggcgagacggacgtgtctgaattcagtctggtgccgtgccagaacggcaccgactgcattaaaatcagcaacgacgtaatgtgcatctgttcccccatcttcacagatctgctgtgcaaatcgattcagactagttgcgaatccttccccctgagaaataatgctacctgcaaaaagtgtgagaaggactatccgtgctcctgcatcagtggattcacagagaaaaattgcgaaaaggccatcgatcactgcaagctgctgtcaatcaattgtctcaatgaggagtggtgtttcaacattataggccgattcaagtacgtctgcatccctggctgtactaagaatccttgttggttcctgaagaatgtgtatctcatccatcagcacctttgctactgcggagtgacttttcatgggatctgccaggacaaaggccccgcacaattcgaatacgtctggcagcttggtttcgctggttcagagggagaaaagtgccagggggtgatcgatgcttatttttttttggcagccaactgtaccgaagatgccacttatgtcaacgaccctgaagacaataactcttcttgctggtttccacatgagggcacgaaagaaatctgcgccaatggatgcagttgcctctccgaggaggactctcaagagtacaggtacttatgctttctgaggtgggccgggaacatgtatctcgagaataccaccgatgaccaggagaacgagtgccagcacgaagccgtctgtaaggacgagatcaaccgtcctaggtacctctgcatcatctag

SEQ ID NO: 259551 - DNA, 1785 bp, Artificial Sequence
  derived and/or modified sequence
atgaccgacaagagcatcgtgatcctgagcctgatggtgttccactcaagcttcattaacggcaagacctgcagacgccaactagtggaggagtggcaccctcagcctagcagttacgtggtgaactggacattaaccgagaatatttgcttggacttctaccgagattgttggttcctgggggttaacactaagatagacacatctggaaaccaagccgttccccaaatttgcccattgcagattcagttgggcgacattctggtcatttcctctgagcccagtttgcagttcccagagatcaacctgatgaatgtgagcgagacaagtttcgttggatgtgtacagaatacaaccacggaggatcagctcctgttcggatgtcggctgaagggtatgcacacagtgaattcaaagtggctcagcgtcgggactcattacttcatcacagtgatggccagcgggccaagcccatgccccctcggattgcgactaaacgtgaccgtgaagcagcagttttgtcaggagtccctgagcagtgaattttgctccggccacgggaagtgtcttagtgaggcttggtccaaaacctatagctgccactgtcagccacctttttctggcaagtactgccaggaattggacgcttgttcattcaagccgtgcaagaacaatggtagctgtatcaacaagcgagagaactgggacgagcaggcatacgagtgtgtctgccacccgccttttactggcaagaattgctccgaaatcattggacagtgtcagcctcatgtctgttttcacgggaactgtagcaacataacgtccaattcatttatatgcgaatgtgatgagcagttttccggccccttctgtgaggtttcagctaaaccttgtgtttccctcctcttctggaagagaggaatctgcccaaattctagttctgcctacacatatgagtgtcctaaggggtcctcaagtcaaaatggtgaaacagacgtctctgaattctctttagtcccgtgccagaatggaactgactgtatcaaaatcagcaacgacgtgatgtgcatttgctcaccaattttcacagacctgctgtgtaagtctattcagacgtcttgtgagtccttccccttgcgaaataacgccacttgcaagaagtgcgagaaggactacccttgcagctgcataagtggtttcactgaaaaaaactgcgagaaagccatagatcactgtaaacttctctcaatcaattgcctgaatgaggaatggtgcttcaacatcatcggcaggttcaagtatgtgtgcattccgggctgcaccaagaacccttgctggttcctgaagaacgtgtatctcatccatcagcatctctgctactgtggtgtgacattccatggaatttgccaggacaaaggccccgcacaatttgagtacgtgtggcagctaggatttgccgggagtgagggcgaaaagtgccagggagtaattgatgcctatttctttctcgccgccaattgcacagaggatgctacatacgtaaatgatccagaagacaataatagctcttgttggttccctcatgaggggaccaaggaaatttgtgctaacggctgctcatgtttgagcgaggaagattcccaggagtacaggtatctgtgcttcctccgctgggccggcaatatgtacctagagaacactaccgacgatcaggaaaatgaatgccagcacgaggcggtatgcaaggacgagatcaataggccccgttacctctgcataatttag

SEQ ID NO: 259552 - DNA, 1785 bp, Artificial Sequence
  derived and/or modified sequence
atgaccgataaaagtatcgtcattctcagtctgatggtgttccattctagcttcatcaacggtaaaacatgtcgaagacagctggttgaagaatggcacccccagccctcctcttacgtggtaaattggaccctgaccgaaaacatctgcctggacttttaccgggattgttggtttctaggagttaatactaaaatcgacaccagcggtaaccaagcggtcccacagatatgtcctctgcagattcaactgggggacatcctggtgatctcttctgaacctagcctccagtttcccgaaattaatctcatgaacgttagcgaaaccagttttgtgggttgtgtgcagaatactactactgaggatcagctcctgtttggctgtaggctgaaaggtatgcacactgtaaattccaagtggctctctgtgggaactcactactttattacagtgatggccagcggcccaagtccttgtcccttagggctccgcctgaacgtcactgtgaaacagcagttttgtcaggagagcttatcttccgaattctgttcgggacacggcaaatgcttgagcgaagcctggagcaagacttactcctgccattgtcagcctcctttttctggcaagtactgtcaggagctagacgcctgttcctttaagccatgcaaaaataacgggagttgtataaacaagagggaaaattgggacgagcaagcttacgagtgcgtgtgccaccccccattcaccggcaaaaattgttcagagatcattggtcagtgtcagccacatgtctgttttcacggaaactgttccaatatcacaagcaatagtttcatttgtgaatgcgatgagcagtttagtggtcccttttgcgaagtttccgccaaaccctgcgttagtcttctgttctggaaaaggggcatctgtccaaactcttccagtgcgtatacgtacgagtgtcccaaaggttctagttctcaaaacggagagactgatgtatccgagttttctctggtaccctgccagaatgggaccgattgtattaaaatctctaacgacgtaatgtgcatctgttcaccgatatttacagatcttctttgcaagtccatccagacatcatgtgaatcatttccactgagaaacaacgcgacttgcaagaagtgcgagaaggactacccatgcagctgcatttctggctttactgagaaaaactgtgagaaagctatagaccactgtaagttactgtccattaattgcctgaacgaagagtggtgcttcaatattatcggcagattcaagtacgtctgtattcccggatgtaccaaaaacccgtgctggttcctgaagaacgtttatctgatccaccagcacctgtgttattgtggcgtcaccttccacggcatctgtcaggataaaggccctgcccagttcgagtacgtatggcagctgggtttcgctggatccgagggggaaaagtgccaaggcgtgatagacgcctacttctttctggctgccaattgtactgaggacgccacctacgtcaatgatccagaagacaacaactcctcttgctggtttccacacgagggcacaaaggagatttgtgccaacggctgttcctgtctcagcgaggaggactcacaggaatacagatatttatgcttcctgaggtgggcagggaacatgtatctggaaaacacgacagacgaccaggaaaacgagtgtcaacacgaagccgtatgtaaggatgagataaatcgcccaaggtacctgtgtatcatttag

SEQ ID NO: 259553 - DNA, 1785 bp, Artificial Sequence
  derived and/or modified sequence
atgactgataagtcgattgttatcctgtcactgatggtgtttcattcaagtttcataaacggcaagacttgccggagacagctggtggaggagtggcaccctcagccttctagttacgtggtcaattggactcttacagaaaatatatgccttgatttttatcgtgattgttggttcctgggggttaatacaaaaattgacacgtccgggaaccaggctgtgccccagatttgccctctgcagattcagctcggggacatactggtcattagctccgagccatcactacagttcccagaaattaacctgatgaatgtgtccgagacaagtttcgtggggtgtgtgcagaacactaccacagaggaccagctgctttttggttgcaggcttaaaggcatgcatactgtgaatagcaagtggctgagcgtcggtacccattacttcatcacggtaatggcatctggcccatctccctgtccgttgggtctaagacttaatgtgaccgtgaaacagcagttctgccaggagtcactatctagtgagttctgcagcgggcatggtaagtgccttagcgaggcctggtctaaaacctattcatgtcattgtcaaccacctttcagtggcaagtactgccaagaactggacgcatgctcattcaaaccctgcaagaataatgggtcctgtatcaacaaacgcgaaaactgggacgagcaagcatacgagtgtgtgtgccacccacctttcacggggaagaattgtagcgagataatcggacaatgccaacctcacgtatgcttccacggaaattgttcaaatataaccagtaactctttcatttgtgagtgcgatgagcagtttagcggtcctttctgcgaggtgagtgcaaaaccatgcgttagcttactgttttggaagcggggaatctgccccaactccagctccgcgtacacctacgagtgtccgaaaggctcttcttcacagaacggggagaccgacgtgagcgagttctctttagtgccatgccaaaatggcacagactgtatcaaaataagtaacgatgttatgtgcatctgttctcctatatttacggatctcctatgtaagtctattcaaacctcatgtgagtcgttccccttaaggaataatgcaacatgcaagaagtgtgagaaagactatccctgctcttgcatctcagggtttacggaaaagaactgtgaaaaggcgattgatcactgtaaacttctttccatcaattgccttaatgaggagtggtgtttcaatatcatcgggagattcaaatatgtgtgtatccctggatgcaccaaaaatccatgctggtttctcaagaacgtttatttgattcaccagcacctttgttattgtggagtaactttccatggaatatgccaagataagggcccagcccaattcgagtatgtctggcaattagggttcgccggttcggagggcgaaaagtgtcaaggtgttattgatgcatattttttcttggctgccaattgcactgaagatgcgacgtacgtcaatgatcctgaggataacaactcgagctgctggtttcctcatgagggcaccaaagagatatgtgccaatggctgttcctgcttaagcgaggaggactcccaggagtacaggtacctgtgcttcctgaggtgggccggaaacatgtaccttgagaacaccaccgacgatcaggaaaacgagtgtcaacatgaggccgtctgcaaggacgagatcaaccggccaaggtacctctgcataatttag

SEQ ID NO: 259554 - DNA, 1785 bp, Artificial Sequence
  derived and/or modified sequence
atgaccgacaagagcatcgtgatcctgagcctgatggtgttccacagcagcttcatcaacggcaagacctgcagaagacagctggtggaggagtggcacccccagcccagcagctacgtggtgaactggaccctgaccgagaacatctgcctggacttctacagagactgctggttcctgggcgtgaacaccaagatcgacaccagcggcaaccaggccgtgccccagatctgccccctgcagatccagctgggcgacatcctggtgatcagcagcgagcccagcctgcagttccccgagatcaacctgatgaacgtgagcgagaccagcttcgtgggctgcgtgcagaacaccaccaccgaggaccagctgctgttcggctgcagactgaagggcatgcacaccgtgaacagcaagtggctgagcgtgggcacccactacttcatcaccgtgatggccagcggccccagcccctgccccctgggcctgagactgaacgtgaccgtgaagcagcagttctgccaggagagcctgagcagcgagttctgcagcggccacggcaagtgcctgagcgaggcctggagcaagacctacagctgccactgccagccccccttcagcggcaagtactgccaggagctggacgcctgcagcttcaagccctgcaagaacaacggcagctgcatcaacaagagagagaactgggacgagcaggcctacgagtgcgtgtgccacccccccttcaccggcaagaactgcagcgagatcatcggccagtgccagccccacgtgtgcttccacggcaactgcagcaacatcaccagcaacagcttcatctgcgagtgcgacgagcagttcagcggccccttctgcgaggtgagcgccaagccctgcgtgagcctgctgttctggaagagaggcatctgccccaacagcagcagcgcctacacctacgagtgccccaagggcagcagcagccagaacggcgagaccgacgtgagcgagttcagcctggtgccctgccagaacggcaccgactgcatcaagatcagcaacgacgtgatgtgcatctgcagccccatcttcaccgacctgctgtgcaagagcatccagaccagctgcgagagcttccccctgagaaacaacgccacctgcaagaagtgcgagaaggactacccctgcagctgcatcagcggcttcaccgagaagaactgcgagaaggccatcgaccactgcaagctgctgagcatcaactgcctgaacgaggagtggtgcttcaacatcatcggcagattcaagtacgtgtgcatccccggctgcaccaagaacccctgctggttcctgaagaacgtgtacctgatccaccagcacctgtgctactgcggcgtgaccttccacggcatctgccaggacaagggccccgcccagttcgagtacgtgtggcagctgggcttcgccggcagcgagggcgagaagtgccagggcgtgatcgacgcctacttcttcctggccgccaactgcaccgaggacgccacctacgtgaacgaccccgaggacaacaacagcagctgctggttcccccacgagggcaccaaggagatctgcgccaacggctgcagctgcctgagcgaggaggacagccaggagtacagatacctgtgcttcctgagatgggccggcaacatgtacctggagaacaccaccgacgaccaggagaacgagtgccagcacgaggccgtgtgcaaggacgagatcaacagacccagatacctgtgcatcatctag

SEQ ID NO: 259555 - protein, 376 aa, Artificial Sequence
  derived and/or modified sequence
MGGGGSALRVCADHRGGINWLSLSPDGQRLLTGSEDGTARLWSTADGQCCALLQGHESYVTFCQLEDEAAFTCSADCTIRRWDVLTGQCLQVYRGHTSIVNRILVANNQLFSSSYDRTARVWSVDKGQMSREFRGHRNCVLTLAYSAPWDLPSTPCAEEAAAGGLLVTGSTDGTAKVWQVASGCCHQTLRGHTGAVLCLVLDTPGHTAFTGSTDATIRAWDILSGEQLRVFREHRGSVICLELVNRLVYSGSADRTVKCWLADTGECVRTFTAHRRNVSALKYHAGTLFTGSGDACARAFDAQSGELRRVFRGHTFIINCIQVHGQVLYTASHDGALRLWDVRGLRGAPRPPPPMRSLSRLFSNKVGCAAAPLQPA

SEQ ID NO: 259556 - DNA, 1131 bp, Artificial Sequence
  derived and/or modified sequence
atgggcggcggcggcagcgccctgagagtgtgcgccgaccacagaggcggcatcaactggctgagcctgagccccgacggccagagactgctgaccggcagcgaggacggcaccgccagactgtggagcaccgccgacggccagtgctgcgccctgctgcagggccacgagagctacgtgaccttctgccagctggaggacgaggccgccttcacctgcagcgccgactgcaccatcagaagatgggacgtgctgaccggccagtgcctgcaggtgtacagaggccacaccagcatcgtgaacagaatcctggtggccaacaaccagctgttcagcagcagctacgacagaaccgccagagtgtggagcgtggacaagggccagatgagcagagagttcagaggccacagaaactgcgtgctgaccctggcctacagcgccccctgggacctgcccagcaccccctgcgccgaggaggccgccgccggcggcctgctggtgaccggcagcaccgacggcaccgccaaggtgtggcaggtggccagcggctgctgccaccagaccctgagaggccacaccggcgccgtgctgtgcctggtgctggacacccccggccacaccgccttcaccggcagcaccgacgccaccatcagagcctgggacatcctgagcggcgagcagctgagagtgttcagagagcacagaggcagcgtgatctgcctggagctggtgaacagactggtgtacagcggcagcgccgacagaaccgtgaagtgctggctggccgacaccggcgagtgcgtgagaaccttcaccgcccacagaagaaacgtgagcgccctgaagtaccacgccggcaccctgttcaccggcagcggcgacgcctgcgccagagccttcgacgcccagagcggcgagctgagaagagtgttcagaggccacaccttcatcatcaactgcatccaggtgcacggccaggtgctgtacaccgccagccacgacggcgccctgagactgtgggacgtgagaggcctgagaggcgcccccagaccccccccccccatgagaagcctgagcagactgttcagcaacaaggtgggctgcgccgccgcccccctgcagcccgcctag

SEQ ID NO: 259557 - DNA, 1131 bp, Artificial Sequence
  derived and/or modified sequence
atggggggcggaggttccgcgctccgggtctgcgctgaccacaggggtggtatcaactggcttagtttgtcacccgacgggcaaagactgctcaccggcagcgaggatggcaccgcccggctttggtcaacggctgatggtcagtgttgtgctctcctacaggggcacgaatcgtacgtgacattttgtcagctggaggatgaagcagctttcacatgctctgcagactgcacaatccgtcgttgggatgttttgactggccagtgccttcaggtatacagagggcacaccagtatcgtgaaccggattctcgttgcaaataaccaattgttttcttctagctacgaccgcactgcccgtgtctggtccgttgacaaaggccagatgtctcgcgaatttcgaggacacagaaactgcgttctgacacttgcctacagcgccccttgggacctaccctccactccctgtgctgaagaggcagcagctggcggcttgttggtaactggctctaccgacggtacagctaaggtgtggcaagtcgccagcggctgctgtcaccagacgctcagggggcacactggtgccgtgctctgcctggtgctggacaccccgggtcacacggcctttaccggtagtacagacgcaacaataagggcctgggatatcctttctggcgagcaactgcgggtgtttcgggagcataggggaagcgtgatttgtctcgagctagtcaataggctggtctattccgggagcgctgacaggacggtgaagtgttggctggccgataccggcgagtgtgtccgcacatttacggcacaccggaggaatgtcagtgcgctaaaatatcacgcagggaccctctttaccggatccggagatgcctgtgctagggcttttgacgctcaatctggagaactgagaagggtgtttcgcggacatacttttatcataaactgcatccaggtgcatggacaggtgctttataccgcatcccacgacggggcactgagactctgggacgtgcgcggactgcgaggcgctccaaggcctccaccaccaatgcgctccctgagtcgcctgtttagcaacaaagtgggttgcgcagccgcacctcttcagccagcttag

SEQ ID NO: 259558 - DNA, 1131 bp, Artificial Sequence
  derived and/or modified sequence
atgggcggcggcggcagcgccctgcgggtgtgtgccgaccaccggggcggcatcaactggctgagcctgagcccagatggccagaggctgctgaccggctctgaagatggaacagcccggctgtggagcacagcagatggccagtgctgtgccctgctgcagggccacgagagctatgtgaccttctgccagctggaggatgaagctgccttcacctgcagcgctgactgcaccatccgccgctgggatgtgctgaccggccagtgcctgcaggtgtaccggggccacaccagcatcgtgaaccgcatcctggtggccaacaaccagctgttcagcagcagctatgacagaacagcccgggtgtggagcgtggacaagggccagatgagccgggagttccggggccacaggaactgtgtgctgaccctggcctacagcgccccctgggacctgcccagcaccccctgtgccgaggaggccgccgccggcggcctgctggtgacaggcagcacagatggaacagccaaggtgtggcaggtggccagcggctgctgccaccagaccctgcggggccacactggagctgtgctgtgcctggtgctggacaccccaggccacacagccttcaccggcagcacagatgccaccatccgggcctgggacatcctgagcggggagcagctgcgggtcttccgggagcaccggggcagcgtcatctgcctggagctggtgaaccggctggtgtacagcggcagcgctgacagaacagtgaagtgctggctggccgacaccggggagtgtgtgaggaccttcaccgcccacagaagaaatgtgtctgccctgaagtaccacgccggcaccctcttcaccggcagcggagatgcctgtgcccgggcctttgatgcccagagcggggagctgcggcgggtcttccggggccacaccttcatcatcaactgcatccaggtgcacggccaggtgctgtacacagccagccatgatggagccctgcggctgtgggatgtgcggggcctgcggggggcccccaggcctcctccacccatgaggagcctgagccgcctcttcagcaacaaggtgggctgtgccgccgcccccctgcagcctgcctag

SEQ ID NO: 259559 - DNA, 1131 bp, Artificial Sequence
  derived and/or modified sequence
atgggcggcggcggcagcgccctgcgggtgtgcgccgaccaccggggtggtatcaactggctgagtctgtctcccgatggacagcgtctgttgactggctcagaggatggcacagctagactgtggtccacagctgatgggcaatgctgtgccctgctgcagggccatgaatcctacgttaccttttgccagttggaggacgaagccgcctttacatgtagtgcagattgcacgatcagacggtgggatgtcctgactggtcagtgccttcaggtgtacaggggccacacaagcatcgtgaatagaatcctggtagctaataatcagctgttttcctctagctacgatcggaccgcacgagtatggtcggtggataagggtcagatgagtagggagttccggggacatcgaaactgcgtccttactctggcatactcagcaccctgggacttaccgagtaccccttgtgccgaggaagctgccgccggtggcctgttggtcaccggcagtaccgatggcacagccaaggtttggcaggtagcttccggctgctgccaccagaccctgcgcggccataccggagcagtattgtgcctggtgcttgatacccccgggcacaccgcttttaccggttccactgatgcgacaattcgcgcctgggacatcctgagcggagaacagctcagggtcttccgggagcacagaggctcggtaatatgtctagagttagttaatcgtctagtgtattctggatccgccgacaggacagttaagtgttggttggctgatacaggcgagtgcgtccgtacatttacggcccaccggcggaatgtcagcgctttgaaatatcatgctggaaccctcttcacaggctcgggagacgcctgcgcacgtgcatttgatgcccagtccggagagctccgtagagtcttccggggccacacattcatcatcaactgcatccaggttcatggacaggttctgtacaccgcgtcacacgacggagctcttcggctgtgggatgtcagaggcctgagaggggccccacgacctcctccaccaatgaggagcctcagcaggctgttcagcaacaaggtggggtgtgcagccgctcccctgcaaccagcatag

SEQ ID NO: 259560 - DNA, 1131 bp, Artificial Sequence
  derived and/or modified sequence
atgggcggaggagggtccgccctgcgagtgtgtgctgatcatagaggagggatcaattggttatccctgagtcccgatggccagagactccttacgggctcggaggatggaactgccaggttgtggtcaactgccgatggccagtgttgcgccctcctgcaggggcacgaatcctatgtcactttctgccagctcgaggatgaggctgccttcacatgtagcgcagattgcacaatccgcagatgggatgtactcactggccagtgtttgcaggtgtaccggggacatacctcgatcgtcaaccggatcctggtcgcaaataaccagttatttagtagttcctacgacagaactgctcgcgtctggagcgtggataaaggacagatgagccgagaatttagaggccatcgaaactgtgtgctgaccctcgcttactcggctccctgggaccttccctctacaccatgcgctgaagaagcagcagctggagggttgctcgttactggctccactgacggcaccgccaaggtgtggcaggtagccagcgggtgttgtcatcagaccttacggggacacacgggagccgtcctgtgcctcgtgctggatactcctggacataccgcttttacagggtccacagacgccacaattcgagcctgggacatcctgtcaggcgaacaactgagagtgttcagagaacaccgaggcagtgttatctgcctcgaactggtcaatcggctcgtctattcaggcagcgccgaccgcacggttaaatgttggctcgcggacacaggcgaatgcgtccggacattcacggctcatagaaggaatgtatccgcactaaagtatcacgctggaacactgttcacgggctcaggtgacgcgtgcgcgagagcattcgacgcacaatctggggagctacggcgtgtattccggggtcatacgttcatcatcaattgcattcaggtgcatggtcaggtgctatataccgccagccacgatggcgctctgcgcctgtgggacgtccggggactgcggggagcacctaggccccctcctccaatgcggagcctcagccgattgtttagcaacaaggttggctgcgccgctgcccctctgcagcctgcttag

SEQ ID NO: 259561 - DNA, 2023 bp, Artificial Sequence
  derived and/or modified sequence
cggccggggagggcgcggggcgctcggcttcccgtgttcctctccccgccccagccccgtgggcgcgagaggaggcggggggctccttgtgcaccagagacgcagctgccttgttcgcccggtggggtgtggatcctccgagcggtgctgggaagggggttctctctgcccgcgcgcccaggactctacccagggcggaggtcccgagtgggccgccccccgcagcgccctgggttcgcgggcccagaggctggaggcagcggggagctagggtccttcaccctcccctcgccgcgtgcctccgcaggagtcgggctccccgttccccgcgatggccgcgggccgcagtcgtacggagccgccgcgcggaccccggggcgcccctccctagcggggcgcagctccttcttgttccccgccctgccagcgggatggggggcggcgggtcggccctgagggtctgcgccgaccaccgcgggggcatcaactggctgagcctgagccccgacgggcagcgcctgctgacgggcagcgaggacggcacggcccggctctggagcaccgcggacggccagtgctgcgcgctcctgcaaggacatgaaagctatgtgaccttctgccagctggaggatgaggctgccttcacatgcagcgccgactgcaccatcaggaggtgggacgtgctgaccgggcagtgtctgcaggtgtaccgaggacacacgtccatcgtgaacaggatcctggttgccaacaaccagctcttcagcagctcctatgaccggacagctcgggtctggagtgtggacaaggggcagatgtcccgggagttccggggccaccgcaactgcgtgctgaccctagcctactctgccccgtgggacctccccagcactccctgcgcggaggaggccgcggccggggggcttctggtgaccggcagcacagatggcacagccaaggtgtggcaggtggccagcggctgctgccaccagacgctgcggggccacacgggtgcagtgctgtgcctagtgctagacacgcccggccacacggccttcacaggcagcaccgacgccaccatccgtgcctgggacatcctgagtggggagcagctgcgggtgttccgggagcaccggggctccgtcatctgtctggagctggtgaaccgactcgtgtactctggcagcgcggacaggaccgtcaagtgctggctggcagacacaggggagtgtgtgcgcacgttcacggcccacagacgcaacgtgagcgccctcaagtaccacgcgggcaccttgttcacgggcagcggggacgcttgcgcccgggccttcgacgcgcagtctggagagctgcggagggtgttccggggccacacattcatcatcaactgcatccaggtgcacggccaggtgctctacaccgcctcgcacgacggcgccctgcgcctctgggacgtgcgcgggctccgaggtgccccgcggccccctccgcccatgcgcagcctctcgcggctcttcagcaacaaggtgggctgcgccgccgcgcccctgcagccggcctgatcccgcggggcccctgcagacgccagcccagacacccagcggctcccagagcgccccgccctgctacccgcggtggtggcgcccgatggccggcgaggggcgaggagcgaggaagcccgggcgggaggagagcccgtcgcaggcgtctggtttttctttggtggccaggaggcgctgggagcgggagtgctcgccctggggaccgcccccttttcccttttagggtggctcctgtcctccctccccatccctgacctggcgaaaggcctagtcctggggaccctcccacctcaggggctgcaggcggactgccccagctcccccagccccacgaaactgggcctttcctgctgagaggaagtgactttttacagaagccactgaacctggttattttggcaaatcgtccgtctcgagggccttggggggaactgaaatatacagcctgaacgttaaaagtg

SEQ ID NO: 259562 - protein, 505 aa, Artificial Sequence
  derived and/or modified sequence
MSSEMEPLLLAWSYFRRRKFQLCADLCTQMLEKSPYDQAAWILKARALTEMVYIDEIDVDQEGIAEMMLDENAIAQVPRPGTSLKLPGTNQTGGPSQAVRPITQAGRPITGFLRPSTQSGRPGTMEQAIRTPRTAYTARPITSSSGRFVRLGTASMLTSPDGPFINLSRLNLTKYSQKPKLAKALFEYIFHHENDVKTALDLAALSTEHSQYKDWWWKVQIGKCYYRLGMYREAEKQFKSALKQQEMVDTFLYLAKVYVSLDQPVTALNLFKQGLDKFPGEVTLLCGIARIYEEMNNMSSAAEYYKEVLKQDNTHVEAIACIGSNHFYSDQPEIALRFYRRLLQMGIYNGQLFNNLGLCCFYAQQYDMTLTSFERALSLAENEEEAADVWYNLGHVAVGIGDTNLAHQCFRLALVNNNNHAEAYNNLAVLEMRKGHVEQARALLQTASSLAPHMYEPHFNFATISDKIGDLQRSYVAAQKSEAAFPDHVDTQHLIKQLRQHFAML

SEQ ID NO: 259563 - protein, 276 aa, Artificial Sequence
  derived and/or modified sequence
MYREAEKQFKSALKQQEMVDTFLYLAKVYVSLDQPVTALNLFKQGLDKFPGEVTLLCGIARIYEEMNNMSSAAEYYKEVLKQDNTHVEAIACIGSNHFYSDQPEIALRFYRRLLQMGIYNGQLFNNLGLCCFYAQQYDMTLTSFERALSLAENEEEAADVWYNLGHVAVGIGDTNLAHQCFRLALVNNNNHAEAYNNLAVLEMRKGHVEQARALLQTASSLAPHMYEPHFNFATISDKIGDLQRSYVAAQKSEAAFPDHVDTQHLIKQLRQHFAML

SEQ ID NO: 259564 - DNA, 1518 bp, Artificial Sequence
  derived and/or modified sequence
atgagcagcgagatggagcccctgctgctggcctggagctacttcagaagaagaaagttccagctgtgcgccgacctgtgcacccagatgctggagaagagcccctacgaccaggccgcctggatcctgaaggccagagccctgaccgagatggtgtacatcgacgagatcgacgtggaccaggagggcatcgccgagatgatgctggacgagaacgccatcgcccaggtgcccagacccggcaccagcctgaagctgcccggcaccaaccagaccggcggccccagccaggccgtgagacccatcacccaggccggcagacccatcaccggcttcctgagacccagcacccagagcggcagacccggcaccatggagcaggccatcagaacccccagaaccgcctacaccgccagacccatcaccagcagcagcggcagattcgtgagactgggcaccgccagcatgctgaccagccccgacggccccttcatcaacctgagcagactgaacctgaccaagtacagccagaagcccaagctggccaaggccctgttcgagtacatcttccaccacgagaacgacgtgaagaccgccctggacctggccgccctgagcaccgagcacagccagtacaaggactggtggtggaaggtgcagatcggcaagtgctactacagactgggcatgtacagagaggccgagaagcagttcaagagcgccctgaagcagcaggagatggtggacaccttcctgtacctggccaaggtgtacgtgagcctggaccagcccgtgaccgccctgaacctgttcaagcagggcctggacaagttccccggcgaggtgaccctgctgtgcggcatcgccagaatctacgaggagatgaacaacatgagcagcgccgccgagtactacaaggaggtgctgaagcaggacaacacccacgtggaggccatcgcctgcatcggcagcaaccacttctacagcgaccagcccgagatcgccctgagattctacagaagactgctgcagatgggcatctacaacggccagctgttcaacaacctgggcctgtgctgcttctacgcccagcagtacgacatgaccctgaccagcttcgagagagccctgagcctggccgagaacgaggaggaggccgccgacgtgtggtacaacctgggccacgtggccgtgggcatcggcgacaccaacctggcccaccagtgcttcagactggccctggtgaacaacaacaaccacgccgaggcctacaacaacctggccgtgctggagatgagaaagggccacgtggagcaggccagagccctgctgcagaccgccagcagcctggccccccacatgtacgagccccacttcaacttcgccaccatcagcgacaagatcggcgacctgcagagaagctacgtggccgcccagaagagcgaggccgccttccccgaccacgtggacacccagcacctgatcaagcagctgagacagcacttcgccatgctgtag

SEQ ID NO: 259565 - DNA, 1518 bp, Artificial Sequence
  derived and/or modified sequence
atgtcaagcgaaatggaacccttgctacttgcctggagttatttcagacgccgtaagttccagttatgtgctgacctgtgcacacaaatgcttgagaaatccccatatgatcaagctgcttggattctgaaggctcgggctctcacagagatggtctacatcgatgagattgacgtcgaccaggagggaatcgccgaaatgatgctcgatgagaatgcaatcgcacaggtgcctcgacctggtaccagtctgaaacttccaggaacgaatcagactgggggacccagccaggccgtgcggcccatcacgcaggccggaaggcccatcaccgggttcctccgccctagcacccaatctggcaggccggggacaatggaacaagccattcggacccctcggactgcatatacagccagacccattacctcttcttccggacggtttgtccgtctggggacagccagcatgctgacatccccagacggtcccttcattaacctctccaggctgaatctgaccaagtatagtcagaaacccaagctggcaaaggccctgtttgaatatatcttccatcatgaaaatgatgtcaagaccgccctcgacctggcggcacttagcaccgagcacagccagtacaaggactggtggtggaaagtgcaaattgggaaatgttattatcggttgggcatgtatcgggaagctgagaaacagtttaagagtgccctcaaacaacaagaaatggtagacaccttcctgtaccttgcgaaagtgtatgtgagtctggaccagccagtgactgcacttaacttgttcaagcagggcctggacaagtttccaggcgaggttacactgttgtgtggaatcgccagaatctatgaagaaatgaataacatgtcttcggctgccgaatattataaagaggtgttgaagcaggacaatactcacgtcgaagccatcgcttgtataggctctaaccacttctactccgatcagccggagatcgctctgcggttttatcggcgcctactgcagatggggatctataatgggcagctcttcaataatctggggctctgttgcttttatgcccaacagtacgacatgactcttaccagctttgaacgcgcccttagcttggccgaaaacgaagaggaggctgcagatgtatggtacaaccttggacacgttgctgttggcatcggggacaccaacctggcacatcagtgctttcgcttggcgctagtcaataacaataatcacgcagaggcttacaacaatcttgcagtgctggaaatgaggaaaggtcacgtcgaacaggcacgggccctgttgcagacggcctctagcctggcaccgcacatgtacgagccccattttaactttgctacaatatccgacaagattggcgacctgcagaggagctatgtggccgctcaaaagtctgaggcagctttccctgaccacgtggacacacaacacctaattaaacagctgcgacagcattttgcgatgctgtag

SEQ ID NO: 259566 - DNA, 1518 bp, Artificial Sequence
  derived and/or modified sequence
atgagcagcgagatggagcccctgctgctggcctggagctacttcagaagaaggaagttccagctgtgtgccgacctgtgcacccagatgctggagaagagcccctatgaccaggccgcctggatcctgaaggcccgggccctgacagagatggtgtacattgatgaaattgatgtggaccaggagggcattgctgagatgatgctggatgaaaatgccatcgcccaggtgccccggcccggcaccagcctgaagctgcccggcaccaaccagacaggaggccccagccaggccgtgcggcccatcacccaggccggccggcccatcaccggcttcctgcggcccagcacccagagcggccggcccggcaccatggagcaggccatccgcacccccaggacagcctacacagcccggcccatcaccagcagcagcggccgctttgtgcggctgggcacagcctccatgctgaccagcccagatggccccttcatcaacctgagccggctgaacctgaccaagtacagccagaagcccaagctggccaaggccctgtttgagtacatcttccaccatgaaaatgatgtgaagacagccctggacctggccgccctgagcacagagcacagccagtacaaggactggtggtggaaggtgcagatcggcaagtgctactaccgcctgggcatgtaccgggaggccgagaagcagttcaagagcgccctgaagcagcaggagatggtggacaccttcctgtacctggccaaggtgtatgtgtccctggaccagcctgtgacagccctgaacctcttcaagcagggcctggacaagtttcctggagaggtgaccctgctgtgtggcatcgcccgcatctatgaggagatgaacaacatgagcagcgctgctgagtactacaaggaggtgctgaagcaggacaacacccacgtggaggccatcgcctgcatcggcagcaaccacttctacagcgaccagcctgagatcgccctgcgcttctaccgccgcctgctgcagatgggcatctacaacggccagctgttcaacaacctgggcctgtgctgcttctacgcccagcagtatgacatgaccctgaccagctttgagcgggccctgagcctggctgaaaatgaggaggaggccgcagatgtgtggtacaacctgggccacgtggccgtgggcatcggggacaccaacctggcccaccagtgcttccggctggccctggtgaacaacaacaaccacgccgaggcctacaacaacctggccgtgctggagatgaggaagggccacgtggagcaggcccgggccctgctgcagacagccagcagcctggccccccacatgtatgagccccacttcaactttgccaccatcagtgacaagatcggggacctgcagaggagctatgtggccgcccagaagtctgaggccgccttcccagaccacgtggacacccagcacctgatcaagcagctgcggcagcactttgccatgctgtag

SEQ ID NO: 259567 - DNA, 1518 bp, Artificial Sequence
  derived and/or modified sequence
atgagcagcgagatggagcccctgctgctggcctggagctacttcagacgccgaaaatttcagctgtgcgccgacttgtgtacacagatgctcgaaaagagcccatacgatcaggccgcgtggatcctcaaagccagggcgcttaccgagatggtgtacattgatgaaattgatgtcgaccaggaggggattgccgaaatgatgcttgacgagaacgccatcgctcaggtaccacgaccggggacctcactcaagcttcccggcaccaatcagactggtgggccctcacaagccgtgcgccccatcacacaggccggcagaccaatcaccggttttttgaggccttctacccagagcggacgcccaggcacaatggaacaggcgatacggacccccaggaccgcttacacagcacgtcctatcacttccagctcaggccggtttgtgcgtttgggcaccgctagcatgctcaccagccctgatgggccgttcatcaatttgagccgtctgaatctgacgaagtacagccagaagcccaagctcgcaaaggccctgttcgaatacatttttcaccacgagaacgacgtgaaaaccgccctcgacctggcggccctgagcactgagcacagccaatataaggactggtggtggaaggttcaaatcggcaagtgttactacaggctcggcatgtaccgagaggccgagaagcagttcaagtcagcgcttaaacagcaagagatggtggatacctttctttatctggccaaggtgtatgtaagtctcgatcagcctgttacagctctgaacctgttcaagcagggtctcgacaaattcccaggagaagtgacattactctgcggaatcgcccgaatctacgaagaaatgaacaacatgagttcagccgccgaatactacaaggaagtattgaaacaagacaatacacacgtggaagccatcgcatgcattggctccaaccacttctacagcgaccagcctgagatcgcactgaggttctataggcgtctcctgcagatgggaatttataacggacaactgttcaataacttgggattgtgctgcttttacgcacaacagtacgacatgacgctgactagctttgagcgagctctgagcctcgccgaaaacgaggaagaggccgctgacgtgtggtacaatctcgggcacgtggcagtcgggattggagacacgaaccttgcacatcagtgctttcggctggccctcgtgaataataacaaccatgctgaagcgtataataatttagcggtgctcgagatgaggaaaggacacgtagaacaggcgagggctctccttcagacggcctcttctctcgctccccacatgtacgaacctcattttaactttgccacaatcagcgataagatcggagatctacagaggagttatgtcgcagcgcagaagtctgaggcagcttttcctgaccatgtcgatactcaacacctgatcaagcagttgagacaacattttgcaatgctgtag

SEQ ID NO: 259568 - DNA, 1518 bp, Artificial Sequence
  derived and/or modified sequence
atgtcctccgaaatggagcctttactgctggcgtggtcttatttccgaagacgcaagttccagctgtgtgcggacctatgtacacaaatgctagaaaaaagtccctacgaccaggccgcttggattctgaaagctcgtgccttaaccgagatggtctatattgatgaaatcgacgtggaccaagaaggaattgctgagatgatgctcgatgagaatgctatcgcccaggtgcctcgacctggaacatccctaaagctgccaggcaccaaccagaccggtgggcctagccaagcagttcgaccaattacacaggcgggacgaccgattaccggatttttgcgtcctagtacgcagtctggtcggcctggtaccatggaacaggcaatccgaacccctaggactgcatatactgccagaccaattacctcttcctctggaagattcgtccgcctggggaccgcatctatgttaacatccccagacggcccattcattaacctttccagactaaacctgaccaaatatagtcagaagcctaagttagctaaagccttgtttgaatatatattccaccatgagaacgatgttaaaacagccctcgatctcgcggctctgtctaccgagcatagtcagtacaaagattggtggtggaaggtgcagattgggaagtgttattatagacttggtatgtacagagaggcagaaaagcagtttaagagtgcccttaagcagcaagagatggtggatacatttttgtacctggccaaagtctacgtctcattggatcaacctgttaccgctttgaatctgtttaagcaaggcttggacaagttcccaggtgaagtgactctgttatgcggaatcgctcgcatctacgaagagatgaacaacatgagcagtgccgcagaatattacaaagaggtgctgaagcaggacaatacgcatgtcgaggcaatcgcttgtatcggtagtaatcacttttacagcgatcagcctgaaatcgctctccgcttttatagacggttgttgcagatgggtatctacaatggccaactttttaacaatctggggctttgttgtttctatgcacagcagtatgacatgaccttgaccagtttcgagagagcactctcactcgctgaaaatgaggaagaagccgcagatgtttggtacaacctggggcatgtggccgtgggtatcggtgataccaacttagcccaccagtgttttagattggccttggttaacaacaacaatcacgccgaggcctacaacaacctggccgtgctcgagatgcgtaagggccacgtcgagcaagctagggcccttctgcagacagcttcaagtctcgcccctcacatgtacgaaccacatttcaattttgcaaccatctcagacaaaataggtgaccttcagcggtcatacgtggccgctcaaaaatcggaggctgcatttccggaccatgttgatacccagcacttgattaaacagcttcgccagcatttcgccatgttatag

SEQ ID NO: 259569 - DNA, 2183 bp, Artificial Sequence
  derived and/or modified sequence
ggcagagtcggacgccgccagctcttcactccacgcccacctctctcctggagcgctgggccttcgctggccgcaccggcagccatgagctcggagatggagccgctgctcctggcctggagctattttaggcgcaggaagttccagctctgcgccgatctatgcacgcagatgctggagaagtccccttatgaccaggcagcttggatcttaaaagcaagagcgctaacagaaatggtatacatagatgaaattgatgtagatcaggaaggaattgcagaaatgatgctggatgaaaatgctatagctcaagttccacgccctggaacgtctttgaaactccctggaactaatcagacaggagggcctagccaggccgttaggccaatcacacaagctggaagacccattacaggtttcctcaggcccagcacgcagagtggaaggccaggcactatggaacaggctatcagaacacccagaaccgcctacacagcccgccctatcaccagctcctccggaagatttgtcaggctgggaacggcttccatgcttacaagtcctgatggaccatttataaatttatctaggctgaatttaacaaagtattcccagaaacctaagttggcaaaggctttgtttgagtatatctttcatcatgaaaatgatgttaagactgctttggatctggctgccctctccacagaacattctcagtacaaggactggtggtggaaagtacagattggaaaatgttactacaggttgggaatgtatcgtgaagcagaaaaacagtttaaatcagccctgaagcagcaggaaatggtagatacatttctgtacttggcaaaagtttatgtctcattggatcaacctgtgactgctttaaatcttttcaaacaaggcttagataagtttccaggagaagtaaccctgctctgtggaattgcaagaatctatgaggaaatgaacaatatgtcatcagcagcagaatattacaaagaagttttgaaacaagacaatactcatgtggaagccatcgcatgcattggaagcaaccacttctattctgatcagccagaaatagctctccggttttacaggcggctgctgcagatgggcatttataacggccagctttttaacaatctggggctgtgttgcttctatgcccagcagtatgatatgactctgacctcatttgaacgtgccctttctttggctgaaaatgaagaagaggcagctgatgtctggtacaacttgggacatgtagctgtgggaataggagatacaaatttggcccatcagtgcttcaggctggctctggtcaacaacaacaaccacgccgaggcctacaacaacctggctgtgctggagatgcggaagggccacgttgaacaggcaagggcactattacaaactgcatcatcattagcaccccatatgtatgaaccgcattttaattttgcaacaatctctgataagattggagatctgcagagaagctatgttgctgcgcagaagtctgaagcagcatttccagaccatgtggacacacaacatttaattaaacaattaaggcagcattttgctatgctctgattgttccttagaccacatatgttcttatgaagcagcattatgcaaggggaaaaaagcactatgtctgtgtatgtatgtatatagtgtaatacgtatattttaacaaacctgtccttgatattagttaaggtgacacataagggtgacacagaatgtgtaatgcaaatttcatagtaatagtaactttataaaataatattataaaatacaggatttaaacctttctaaatagatcctgaaactgtctctcacattatatagtagatgtttgtttataatgtttacaaaacattttggtgaatttcctcaatgttttataaatgtacattttttaagtccttaagctgactcttagccatcatgtagcttaaggagtctgaaatctgccattaaaactgcacctttaagccaggtgtggtagcatgtgcctatagtcccagctacttgggaggtggaggtgggaggattataaatagagactttccttaagactttaaaaatgtatttaaaactattttttattaaatactttgtgatttcctattaagctttaaaataaatcattgtgtaaaacaccatca

SEQ ID NO: 259570 - protein, 475 aa, Artificial Sequence
  derived and/or modified sequence
MSSEMEPLLLAWSYFRRRKFQLCADLCTQMLEKSPYDQAAWILKARALTEMVYIDEIDVDQEGIAEMMLDENAIAQVPRPGTSLKLPGTNQTGGPSQAVRPITQAGRPITGFLRPSTQSGRPGTMEQAIRTPRTAYTARPITSSSGRFVRLGTALFEYIFHHENDVKTALDLAALSTEHSQYKDWWWKVQIGKCYYRLGMYREAEKQFKSALKQQEMVDTFLYLAKVYVSLDQPVTALNLFKQGLDKFPGEVTLLCGIARIYEEMNNMSSAAEYYKEVLKQDNTHVEAIACIGSNHFYSDQPEIALRFYRRLLQMGIYNGQLFNNLGLCCFYAQQYDMTLTSFERALSLAENEEEAADVWYNLGHVAVGIGDTNLAHQCFRLALVNNNNHAEAYNNLAVLEMRKGHVEQARALLQTASSLAPHMYEPHFNFATISDKIGDLQRSYVAAQKSEAAFPDHVDTQHLIKQLRQHFAML

SEQ ID NO: 259571 - DNA, 1428 bp, Artificial Sequence
  derived and/or modified sequence
atgagcagcgagatggagcccctgctgctggcctggagctacttcagaagaagaaagttccagctgtgcgccgacctgtgcacccagatgctggagaagagcccctacgaccaggccgcctggatcctgaaggccagagccctgaccgagatggtgtacatcgacgagatcgacgtggaccaggagggcatcgccgagatgatgctggacgagaacgccatcgcccaggtgcccagacccggcaccagcctgaagctgcccggcaccaaccagaccggcggccccagccaggccgtgagacccatcacccaggccggcagacccatcaccggcttcctgagacccagcacccagagcggcagacccggcaccatggagcaggccatcagaacccccagaaccgcctacaccgccagacccatcaccagcagcagcggcagattcgtgagactgggcaccgccctgttcgagtacatcttccaccacgagaacgacgtgaagaccgccctggacctggccgccctgagcaccgagcacagccagtacaaggactggtggtggaaggtgcagatcggcaagtgctactacagactgggcatgtacagagaggccgagaagcagttcaagagcgccctgaagcagcaggagatggtggacaccttcctgtacctggccaaggtgtacgtgagcctggaccagcccgtgaccgccctgaacctgttcaagcagggcctggacaagttccccggcgaggtgaccctgctgtgcggcatcgccagaatctacgaggagatgaacaacatgagcagcgccgccgagtactacaaggaggtgctgaagcaggacaacacccacgtggaggccatcgcctgcatcggcagcaaccacttctacagcgaccagcccgagatcgccctgagattctacagaagactgctgcagatgggcatctacaacggccagctgttcaacaacctgggcctgtgctgcttctacgcccagcagtacgacatgaccctgaccagcttcgagagagccctgagcctggccgagaacgaggaggaggccgccgacgtgtggtacaacctgggccacgtggccgtgggcatcggcgacaccaacctggcccaccagtgcttcagactggccctggtgaacaacaacaaccacgccgaggcctacaacaacctggccgtgctggagatgagaaagggccacgtggagcaggccagagccctgctgcagaccgccagcagcctggccccccacatgtacgagccccacttcaacttcgccaccatcagcgacaagatcggcgacctgcagagaagctacgtggccgcccagaagagcgaggccgccttccccgaccacgtggacacccagcacctgatcaagcagctgagacagcacttcgccatgctgtag

SEQ ID NO: 259572 - DNA, 1428 bp, Artificial Sequence
  derived and/or modified sequence
atgagcagtgagatggaaccgcttttattagcctggtcttattttagaaggcgcaagttccagctctgcgccgatctctgcacccagatgctcgaaaagtctccgtacgatcaggcagcctggattctaaaggcccgtgcgctgacagagatggtgtacatcgacgagatcgacgttgaccaggagggtattgctgaaatgatgctcgacgagaatgcgatcgcacaggtcccaagacctggaacttctctcaagctgcctggtacaaatcagacaggaggtccaagtcaagctgtacggcccatcacacaggctggcaggcctatcaccggatttcttaggccctcaactcagtccgggaggcctggaacaatggaacaggccataaggacacccagaaccgcctacaccgctagacccattaccagctcatcagggagattcgtgaggctcggcaccgcgctgttcgagtatattttccaccatgagaatgacgtgaagacggctctcgacctggcagctctatcaaccgagcactcacagtacaaggactggtggtggaaagttcaaatagggaagtgttattatagattgggcatgtatcgggaggcggagaaacagtttaagagcgccctgaagcagcaggagatggtggacacttttctgtatctcgcaaaggtgtatgttagcctggaccagccagtcacggctcttaatctctttaagcagggacttgataaattccccggcgaggtgaccctcctgtgcggtatcgccaggatctatgaagagatgaataacatgtcctcggccgccgagtattataaagaggtgctgaagcaggacaatacgcatgtggaagccattgcatgtatcggctccaaccacttctactcagaccaaccggaaatcgctctaaggttctatcggaggcttctccagatgggcatctacaatggacagctatttaacaacctgggactctgttgcttctatgcacagcagtatgacatgactctgacttctttcgaacgggcattgagtttagccgagaacgaagaggaggctgcagatgtgtggtataacttaggacatgtcgccgtcggcatcggagataccaatctggcccaccagtgtttccggctggccctggtcaacaataacaaccacgctgaggcttacaataacctcgccgtcctggagatgcgcaagggacacgtcgaacaggccagagcgttgctgcagaccgcgagctctctcgcccctcacatgtacgaaccccactttaacttcgctacaatttccgataagattggtgacctacagagatcctatgtggccgcacagaagtcagaggcagcatttcctgaccacgtagatacacaacatctgatcaagcaattgcgccagcacttcgctatgctttag

SEQ ID NO: 259573 - DNA, 1428 bp, Artificial Sequence
  derived and/or modified sequence
atgagcagcgagatggagcccctgctgctggcctggagctacttcagaagaaggaagttccagctgtgtgccgacctgtgcacccagatgctggagaagagcccctatgaccaggccgcctggatcctgaaggcccgggccctgacagagatggtgtacattgatgaaattgatgtggaccaggagggcattgctgagatgatgctggatgaaaatgccatcgcccaggtgccccggcccggcaccagcctgaagctgcccggcaccaaccagacaggaggccccagccaggccgtgcggcccatcacccaggccggccggcccatcaccggcttcctgcggcccagcacccagagcggccggcccggcaccatggagcaggccatccgcacccccaggacagcctacacagcccggcccatcaccagcagcagcggccgctttgtgcggctgggcacagccctgtttgagtacatcttccaccatgaaaatgatgtgaagacagccctggacctggccgccctgagcacagagcacagccagtacaaggactggtggtggaaggtgcagatcggcaagtgctactaccgcctgggcatgtaccgggaggccgagaagcagttcaagagcgccctgaagcagcaggagatggtggacaccttcctgtacctggccaaggtgtatgtgtccctggaccagcctgtgacagccctgaacctcttcaagcagggcctggacaagtttcctggagaggtgaccctgctgtgtggcatcgcccgcatctatgaggagatgaacaacatgagcagcgctgctgagtactacaaggaggtgctgaagcaggacaacacccacgtggaggccatcgcctgcatcggcagcaaccacttctacagcgaccagcctgagatcgccctgcgcttctaccgccgcctgctgcagatgggcatctacaacggccagctgttcaacaacctgggcctgtgctgcttctacgcccagcagtatgacatgaccctgaccagctttgagcgggccctgagcctggctgaaaatgaggaggaggccgcagatgtgtggtacaacctgggccacgtggccgtgggcatcggggacaccaacctggcccaccagtgcttccggctggccctggtgaacaacaacaaccacgccgaggcctacaacaacctggccgtgctggagatgaggaagggccacgtggagcaggcccgggccctgctgcagacagccagcagcctggccccccacatgtatgagccccacttcaactttgccaccatcagtgacaagatcggggacctgcagaggagctatgtggccgcccagaagtctgaggccgccttcccagaccacgtggacacccagcacctgatcaagcagctgcggcagcactttgccatgctgtag

SEQ ID NO: 259574 - DNA, 1428 bp, Artificial Sequence
  derived and/or modified sequence
atgagcagcgagatggagcccctgctgctggcctggagctacttcaggcgaagaaaatttcagttgtgcgccgacttatgtacccagatgctcgaaaagtctccatacgatcaggcagcatggatcctcaaggccagggctctgactgaaatggtgtacattgatgaaatcgacgtggaccaggaagggatcgcagaaatgatgttggatgagaacgccattgcacaggtgccgcgccccggaacctccttgaaactgcccggcactaaccagaccggagggccctcgcaggccgtgagacctatcacccaggcagggcgaccgataacaggttttttaagaccatccacccagtcaggccgccctggcaccatggagcaagcaatacgaacccctcggaccgcctacactgccaggcccattacatccagctcagggaggttcgtccgacttggcacagcattgtttgagtacattttccatcatgagaatgatgtgaagactgccctggacttagcagccctatcaaccgaacattcacagtacaaggattggtggtggaaggtgcagatcggcaagtgctactacagacttggaatgtacagagaggcagagaagcagttcaagtctgccttaaagcagcaggaaatggttgatacttttctgtacctcgccaaagtctatgtgtctctggatcagcctgttaccgcactgaacctgtttaaacagggtctcgacaaattcccgggcgaggtcactctcctgtgcgggatcgcccggatttatgaggaaatgaacaatatgagttctgcagcagagtactacaaagaggtcctgaagcaggataacacacatgtggaggccattgcttgcatcggaagcaaccatttctacagtgaccagccagaaatagctttaagattttacaggaggctacttcagatgggcatctacaacgggcagcttttcaataatctcgggctgtgctgcttttacgcccagcaatacgacatgaccctaactagttttgagagggctctttcactggcagagaacgaagaagaagccgcagacgtctggtataatctcgggcatgtcgcagtgggaatcggcgacaccaatcttgcacatcaatgcttccggctcgcattggtcaataacaataatcacgccgaagcctacaacaacttggcggtactcgaaatgcggaaagggcatgtggagcaggctagagccctgctccagacagcctcaagccttgcgcctcatatgtacgaaccgcacttcaacttcgctacgattagcgataaaatcggtgacctccagcgcagctacgttgccgcacagaaatccgaggccgcatttcccgaccacgtcgatactcagcaccttataaagcagcttcggcagcacttcgcgatgctgtag

SEQ ID NO: 259575 - DNA, 1428 bp, Artificial Sequence
  derived and/or modified sequence
atgtcttccgaaatggaaccgctgcttctggcctggagctatttcaggcgcagaaaattccagctctgcgctgacctttgtacgcagatgctggagaaatcgccgtatgaccaagccgcttggattctgaaggcccgagcactgactgaaatggtatacattgacgagatcgacgttgatcaagaggggattgccgaaatgatgctggacgaaaatgctattgctcaggttccccgacccggtacaagtctgaagcttcctggaaccaaccaaacgggtggcccttctcaggcggtgagaccaattactcaggcaggccgacctataaccgggttcctccgccctagtactcaaagtggtcggcctggcacaatggaacaggccatccgcacaccaaggacggcctacactgctcgccctatcacctcatcttcaggtaggttcgtgcgcctcgggacagccctgttcgaatacattttccaccacgagaatgatgtgaaaacggccctggatctagctgctctgtcaacagagcacagccagtataaagattggtggtggaaagtccagatcggcaagtgctattatagattgggaatgtacagggaggccgaaaagcagtttaaatctgctctgaagcaacaggagatggttgatacgttcctctaccttgcaaaagtgtacgtttcgctcgatcagcctgtaacagccctgaatctttttaaacagggtctggataagttcccaggtgaggtcacattgttatgtggcattgcacgaatctatgaagagatgaacaacatgagcagcgcagctgagtactacaaagaagtcctaaaacaagacaacacacacgttgaagcaatagcatgtataggaagtaatcacttttacagcgaccagcccgagatagctctgcgattctacaggcgattgctacaaatgggtatctacaacgggcagctctttaacaacctggggctgtgctgcttttacgctcagcagtatgatatgaccctgacttcgttcgaacgtgctctgtccttagccgagaatgaagaggaggcggcagacgtctggtataaccttggccatgtcgccgtcggaattggggacaccaacctggctcatcagtgttttcggttggcactggtaaacaataacaatcacgccgaagcttacaacaaccttgctgtcctggaaatgaggaagggtcacgtcgagcaggcccgtgcccttctccagaccgccagctctcttgcccctcacatgtacgagccgcactttaatttcgcaaccatctcagacaagatcggcgacctgcagagatcctacgtggcggcacagaaatcagaggccgcattccctgaccatgttgatacccagcacctgatcaaacagttgaggcaacacttcgcgatgctctag

SEQ ID NO: 259576 - DNA, 2180 bp, Artificial Sequence
  derived and/or modified sequence
aggacctcgagaaacagcggacaatttcaggatttaggactttaggtcttgatgggtggatggcgcgctgcgggcacctctcggacaaggccccagccgtcgcgggttgccgggcagagtcggacgccgccagctcttcactccacgcccacctctctcctggagcgctgggccttcgctggccgcaccggcagccatgagctcggagatggagccgctgctcctggcctggagctattttaggcgcaggaagttccagctctgcgccgatctatgcacgcagatgctggagaagtccccttatgaccagaaaattagctgggcgtggtggcacgtgcctgtaatcccagctacttgggaggctgaggcaggagaattgcttgaacccaggaagcggaggttgcagcaagccgagatcacgccattgtactccagcttgggcaacaagagcaaaactccatctcaaaaagcagcttggatcttaaaagcaagagcgctaacagaaatggtatacatagatgaaattgatgtagatcaggaaggaattgcagaaatgatgctggatgaaaatgctatagctcaagttccacgccctggaacgtctttgaaactccctggaactaatcagacaggagggcctagccaggccgccaatcacacaagctggaagacccattacaggtttcctcaggcccagcacgcagagtggaaggccaggcactatggaacaggctatcagaacacccagaaccgcctacacagcccgccctatcaccagctcctccggaagatttgtcaggctgggaacggcttccatgcttacaagtcctgatggaccatttataaatttatctaggctgaatttaacaaagtattcccagaaacctaagttggcaaaggctttgtttgagtatatctttcatcatgaaaatgatgttaagactgctttggatctggctgccctctccacagaacattctcagtacaaggactggtggtggaaagtacagattggaaaataggaaatgaacaatatgtcatcagcagcagaatattacaaagaagttttgaaacaagacaatactcatgtggaagccatcgcatgcattggaagcaaccacttctattctgatcagccagaaatagctctccggttttacaggcggctgctgcagatgggcatttataacggccagctttttaacaatctggggctgtgttgcttctatgcccagcagtatgatatgactctgacctcatttgaacgtgccctttctttggctgaaaatgaagaagaggcagctgatgtctggtacaacttgggacatgtagctgtgggaataggagatacaaatttggcccatcagtgcttcaggctggctctggtcaacaacaacaaccacgccgaggcctacaacaacctggctgtgctggagatgcggaagggccacgttgaacaggcaagggcactattacaaactgcatcatcattagcaccccatatgtatgaaccgcattttaattttgcaacaatctctgataagattggagatctgcagagaagctatgttgctgcgcagaagtctgaagcagcatttccagaccatgtggacacacaacatttaattaaacaattaaggcagcattttgctatgctctgattgttccttagaccacatatgttcttatgaagcagcattatgcaaggggaaaaaagcactatgtctgtgtatgtatgtatatagtgtaatacgtatattttaacaaacctgtccttgatattagttaaggtgacacataagggtgacacagaatgtgtaatgcaaatttcatagtaatagtaactttataaaataatattataaaatacaggatttaaacctttctaaatagatcctgaaactgtctctcacattatatagtagatgtttgtttataatgtttacaaaacattttggtgaatttcctcaatgttttataaatgtacattttttaagtccttaagctgactcttagccatcatgtagcttaaggagtctgaaatctgccattaaaactgcacctttaagccaggtgtggtagcatgtgcctatagtcccagctacttgggaggtggaggtgggaggattataaatagagactttccttaagactttaaaaatgtatttaaaactattttt

SEQ ID NO: 259577 - DNA, 2058 bp, Artificial Sequence
  derived and/or modified sequence
acgcccacctctctcctggagcgctgggccttcgctggccgcaccggcagccatgagctcggagatggagccgctgctcctggcctggagctattttaggcgcaggaagttccagctctgcgccgatctatgcacgcagatgctggagaagtccccttatgaccaggcagcttggatcttaaaagcaagagcgctaacagaaatggtatacatagatgaaattgatgtagatcaggaaggaattgcagaaatgatgctggatgaaaatgctatagctcaagttccacgccctggaacgtctttgaaactccctggaactaatcagacaggagggcctagccaggccgttaggccaatcacacaagctggaagacccattacaggtttcctcaggcccagcacgcagagtggaaggccaggcactatggaacaggctatcagaacacccagaaccgcctacacagcccgccctatcaccagctcctccggaagatttgtcaggctgggaacggctttgtttgagtatatctttcatcatgaaaatgatgttaagactgctttggatctggctgccctctccacagaacattctcagtacaaggactggtggtggaaagtacagattggaaaatgttactacaggttgggaatgtatcgtgaagcagaaaaacagtttaaatcagccctgaagcagcaggaaatggtagatacatttctgtacttggcaaaagtttatgtctcattggatcaacctgtgactgctttaaatcttttcaaacaaggcttagataagtttccaggagaagtaaccctgctctgtggaattgcaagaatctatgaggaaatgaacaatatgtcatcagcagcagaatattacaaagaagttttgaaacaagacaatactcatgtggaagccatcgcatgcattggaagcaaccacttctattctgatcagccagaaatagctctccggttttacaggcggctgctgcagatgggcatttataacggccagctttttaacaatctggggctgtgttgcttctatgcccagcagtatgatatgactctgacctcatttgaacgtgccctttctttggctgaaaatgaagaagaggcagctgatgtctggtacaacttgggacatgtagctgtgggaataggagatacaaatttggcccatcagtgcttcaggctggctctggtcaacaacaacaaccacgccgaggcctacaacaacctggctgtgctggagatgcggaagggccacgttgaacaggcaagggcactattacaaactgcatcatcattagcaccccatatgtatgaaccgcattttaattttgcaacaatctctgataagattggagatctgcagagaagctatgttgctgcgcagaagtctgaagcagcatttccagaccatgtggacacacaacatttaattaaacaattaaggcagcattttgctatgctctgattgttccttagaccacatatgttcttatgaagcagcattatgcaaggggaaaaaagcactatgtctgtgtatgtatgtatatagtgtaatacgtatattttaacaaacctgtccttgatattagttaaggtgacacataagggtgacacagaatgtgtaatgcaaatttcatagtaatagtaactttataaaataatattataaaatacaggatttaaacctttctaaatagatcctgaaactgtctctcacattatatagtagatgtttgtttataatgtttacaaaacattttggtgaatttcctcaatgttttataaatgtacattttttaagtccttaagctgactcttagccatcatgtagcttaaggagtctgaaatctgccattaaaactgcacctttaagccaggtgtggtagcatgtgcctatagtcccagctacttgggaggtggaggtgggaggattataaatagagactttccttaagactttaaaaatgtatttaaaactattttttattaaatactttgtgatttcctattaagctttaaaataaatcattgtgtaaaacacca

SEQ ID NO: 259578 - protein, 441 aa, Artificial Sequence
  derived and/or modified sequence
MEGSWFHRKRFSFYLLLGFLLQGRGVTFTINCSGFGQHGADPTALNSVFNRKPFRPVTNISVPTQVNISFAMSAILDVVWDNPFISWNPEECEGITKMSMAAKNLWLPDIFIIELMDVDKTPKGLTAYVSNEGRIRYKKPMKVDSICNLDIFYFPFDQQNCTLTFSSFLYTVDSMLLDMEKEVWEITDASRNILQTHGEWELLGLSKATAKLSRGGNLYDQIVFYVAIRRRPSLYVINLLVPSGFLVAIDALSFYLPVKSGNRVPFKITLLLGYNVFLLMMSDLLPTSGTPLIGVYFALCLSLMVGSLLETIFITHLLHVATTQPPPLPRWLHSLLLHCNSPGRCCPTAPQKENKGPGLTPTHLPGVKEPEVSAGQMPGPAEAELTGGSEWTRAQREHEAQKQHSVELWLQFSHAMDAMLFRLYLLFMASSIITVICLWNT

SEQ ID NO: 259579 - DNA, 1326 bp, Artificial Sequence
  derived and/or modified sequence
atggagggatcttggttccatagaaaacgattctcattttatttgctgttgggcttcctcctgcagggaagaggcgtgacttttaccattaactgtagcggcttcggccagcacggagcagaccccacagccctgaactcggttttcaatagaaagccgtttcgccccgtgaccaacattagcgtgcccacacaggtgaatatctcctttgctatgagtgctattctggatgtggtgtgggataaccccttcatttcatggaatccagaggagtgcgagggaatcacaaaaatgtcaatggcggctaagaacctctggctgccggacatatttattatcgaactgatggatgtcgataagacaccgaaaggcctgaccgcatatgtctcaaatgagggtcggattagatataaaaaacctatgaaggtggactctatatgcaatctagatatattttattttcccttcgaccagcagaattgcacgctcacgttctccagctttttatacacggtcgacagtatgctcctggacatggagaaggaagtctgggagatcactgacgcgtctcggaatatcttgcagactcatggagaatgggagctgctcggtctgtccaaggccacagcgaagctgtcaagaggaggtaacttgtatgaccagattgtcttttatgtcgccatacgtcgccggccttccctgtatgtgatcaacctgcttgtgccaagtggattcctggttgctatcgacgctctgtctttctatttgccggtaaaaagcgggaacagagtgccctttaagatcactctcctgcttggttacaatgttttccttttaatgatgagcgatcttctgcccacctccggcacacctctgataggcgtatactttgctctgtgtctctccctgatggtgggtagtctcttggagaccatcttcattacccatctccttcacgtagcgaccactcagccaccaccattgccgagatggctgcattccttgcttctgcactgtaattcccccgggaggtgttgtcctaccgcccctcagaaagaaaacaagggtcccggacttaccccaactcacttgccaggggtgaaggagcctgaagtgagtgcaggtcagatgcccggacccgccgaggccgaactcactggtggctccgagtggacacgggcccaaagagaacacgaggcccaaaaacagcacagcgtggaactgtggcttcagttttctcacgcgatggacgccatgctgtttagactgtatctcctgtttatggcctcaagtatcattaccgtgatttgcctgtggaatacatag

SEQ ID NO: 259580 - DNA, 1326 bp, Artificial Sequence
  derived and/or modified sequence
atggagggctcctggttccacaggaagcgcttctccttctacctgctgctgggcttcctgctgcagggccggggcgtgaccttcaccatcaactgcagcggcttcggccagcacggggctgaccccacagccctgaacagcgtcttcaacaggaagcccttccggcctgtgaccaacatctctgtgcccacccaggtgaacatcagctttgccatgtctgccatcctggatgtggtgtgggacaaccccttcatctcctggaacccagaagaatgtgagggcatcaccaagatgtccatggccgccaagaacctgtggctgcctgacatcttcatcatcgagctgatggatgtggacaagacccccaagggcctgacagcctacgtgtccaatgaaggccgcatccgctacaagaagcccatgaaggtggacagcatctgcaacctggacatcttctacttcccctttgaccagcagaactgcaccctgaccttcagcagcttcctgtacacagtggacagcatgctgctggacatggagaaggaggtgtgggagatcacagatgccagcaggaacatcctgcagacccatggagagtgggagctgctgggcctgagcaaggccacagccaagctgagcagaggaggcaacctgtatgaccagatcgtgttctacgtggccatcagaagaagacccagcctgtatgtgatcaacctgctggtgcccagcggcttcctggtggccattgatgccctgtccttctacctgcctgtgaagagcggcaacagagtgcccttcaagatcaccctgctgctgggctacaacgtgttcctgctgatgatgtctgacctgctgcccaccagcggcacccccctgattggagtgtactttgccctgtgcctgagcctgatggtgggcagcctgctggagaccatcttcatcacccacctgctgcacgtggccaccacccagcccccacccctgccccgctggctgcacagcctgctgctgcactgcaacagccctggccgctgctgccccacagccccccagaaggaaaataaaggacctggcctgacccccacccacctgcccggggtgaaggagcctgaggtgtctgctggccagatgcctggccctgctgaggccgagctgaccggcggcagcgagtggacccgggcccagcgggagcacgaggcccagaagcagcacagcgtggagctgtggctgcagttcagccacgccatggatgccatgctgttccggctgtacctgctcttcatggccagcagcatcatcaccgtcatctgcctgtggaacacctag

SEQ ID NO: 259581 - DNA, 1326 bp, Artificial Sequence
  derived and/or modified sequence
atggagggcagctggttccaccggaagcggttcagcttctacctgctgctggggtttctgctgcagggcaggggggttacatttaccattaactgctccggatttggtcaacacggggctgatcccactgctctgaatagtgtattcaacaggaaaccatttaggccagtgactaacatatctgttcccacccaggttaatattagtttcgcaatgtctgccatcttagacgtggtgtgggacaaccctttcattagttggaacccggaggagtgtgaaggtattaccaaaatgtctatggctgcaaagaacctttggctgccagatattttcattatagagctgatggatgtcgacaagactcccaaggggctaacggcttatgtgagcaacgaaggtcgcataagatataagaagcctatgaaggtggattccatttgcaacctcgacatcttctattttccttttgaccaacagaattgtacactgaccttctccagtttcctttacaccgtcgactctatgctgcttgacatggagaaggaggtgtgggaaatcacggatgcttcaagaaacatactgcagactcacggtgaatgggagttactggggttgtcaaaagcaaccgccaaactttctcgtggagggaacctgtatgatcagatagtgttctacgtagccatcaggaggaggccctctctgtatgtgatcaacctgctcgtgccctctggatttcttgttgcaattgacgccctgagtttttatcttcccgtcaagtccggcaacagagtcccgtttaagatcacccttctgcttgggtacaatgtattcttgctgatgatgtctgatctgctgcccacatctgggactccgctgattggagtttacttcgccctttgcttaagccttatggtcggaagtctcctggagacgatctttatcacacatttgttgcacgttgcaaccacacagcctccccctctgcctagatggctgcacagtttgttgctacactgcaatagcccgggaaggtgttgcccaaccgccccccaaaaggaaaataagggacccggactcacaccgacccatctcccaggggtgaaagaacctgaagtctcggccggacaaatgccaggccccgccgaggctgagttgactggaggctccgagtggacccgcgcacagagagagcatgaggcccagaaacagcattccgtggagttatggctccaatttagtcatgcaatggatgctatgctgtttcgtctctatcttctatttatggcgtcatcaattataacagtgatttgtctgtggaacacttag

SEQ ID NO: 259582 - DNA, 1326 bp, Artificial Sequence
  derived and/or modified sequence
atggaggggtcttggtttcataggaagcggttttccttctacttactgctcggctttctgctgcaagggagaggcgtgacattcacgataaactgctcagggtttggccagcacggcgcagatccaacagctttgaactcagtttttaacagaaaaccgttccggccagtgacaaacatatctgtccctactcaagtgaacataagttttgctatgagtgctatactggatgtggtctgggacaatccattcatcagctggaacccagaagagtgcgaagggattacaaaaatgtccatggccgcaaagaacctctggcttcctgatatcttcattatcgaactcatggatgtggataagacccctaaagggttgaccgcctatgtgtccaatgaaggcagaattcggtacaagaagcccatgaaagttgacagcatatgtaacctcgacattttttattttccttttgaccagcagaattgcactttgaccttcagctctttcctctatacagtcgactctatgttgcttgacatggaaaaagaagtctgggaaattacggacgcctctcgcaatattttacaaacacacggcgagtgggaactgcttggcctgagtaaagccactgcaaagctcagtcggggaggaaacctatacgatcagattgttttttatgtcgctatacgccgacgtccctccctgtacgtgataaacttgctggtgccaagcggcttccttgtagcaatcgacgccttatcattctacctgcccgtgaaatccggaaacagagtcccctttaagattaccctcctgctgggctataatgtgtttctcctcatgatgtcagacctcctgcccacatcaggtactccactgattggtgtgtacttcgcactgtgcctgtccctcatggttggctccttactcgaaactatctttataactcatcttctccacgtagccaccacacagccacctcctctccccagatggctccactccctgctcctccactgcaactcacctggcaggtgttgccctacggcccctcaaaaagagaataaggggcctggcctgacccctacccatctgcccggagtcaaagagccggaggtgagtgctggccagatgcccggtccggcagaagcagaacttacaggaggctcagagtggacacgcgctcagagagagcacgaagcacagaagcagcattcagtcgagctctggctccagttttcacatgccatggacgccatgcttttccggctatacctcctctttatggcgtcctcaattataaccgtgatttgtctttggaatacatag

SEQ ID NO: 259583 - DNA, 1326 bp, Artificial Sequence
  derived and/or modified sequence
atggaaggaagctggttccacaggaaaagattttccttctacctccttctcggttttctgcttcaaggaaggggcgttactttcaccatcaattgctcagggtttggccagcacggggcggatcccactgctctgaattcagtgtttaatagaaagcccttccgtccggtcaccaacatcagcgtccccacccaagtcaacatctccttcgcgatgtctgccatcctagatgtggtttgggataacccatttatcagctggaacccagaggaatgtgagggcatcacgaagatgagtatggcagccaagaacctgtggctcccagacattttcatcattgaactcatggatgtggataagaccccaaaaggcctcacagcatatgtaagtaatgaaggtcgcatcaggtataagaaacccatgaaggtggacagtatctgtaacctggacatcttctacttccccttcgaccagcagaactgcacactcaccttcagctcattcctctacacagtggacagcatgttgctggacatggagaaagaagtgtgggaaataacagacgcatcccggaacatccttcagacccatggagaatgggagctcctgggcctcagcaaggccaccgcaaagttgtccaggggaggcaacctgtatgatcagatcgtgttctatgtggccatcaggcgcaggcccagtctctatgtcataaaccttctcgtgcccagtggctttctggttgccatcgatgccctcagcttctacctgccagtgaaaagtgggaatcgtgtcccattcaagataacgctcctgctgggctacaacgtcttcctgctcatgatgagtgacttgctccccaccagtggcacccccctcatcggtgtctacttcgccctgtgcctgtccctgatggtgggcagcctgctggagaccatcttcatcacccacctgctgcacgtggccaccacccagcccccacccctgcctcggtggctccactccctgctgctccactgcaacagcccggggagatgctgtcccactgcgccccagaaggaaaataagggcccgggtctcacccccacccacctgcccggtgtgaaggagccagaggtatcagcagggcagatgccgggccctgcggaggcagagctgacagggggctcagaatggacaagggcccagcgggaacacgaggcccagaagcagcactcagtggagctgtggttgcagttcagccacgcgatggacgccatgctcttccgcctctacctgctcttcatggcctcctctatcatcaccgtcatatgcctctggaacacctag

SEQ ID NO: 259584 - DNA, 1326 bp, Artificial Sequence
  derived and/or modified sequence
atggagggcagctggttccacagaaagagattcagcttctacctgctgctgggcttcctgctgcagggcagaggcgtgaccttcaccatcaactgcagcggcttcggccagcacggcgccgaccccaccgccctgaacagcgtgttcaacagaaagcccttcagacccgtgaccaacatcagcgtgcccacccaggtgaacatcagcttcgccatgagcgccatcctggacgtggtgtgggacaaccccttcatcagctggaaccccgaggagtgcgagggcatcaccaagatgagcatggccgccaagaacctgtggctgcccgacatcttcatcatcgagctgatggacgtggacaagacccccaagggcctgaccgcctacgtgagcaacgagggcagaatcagatacaagaagcccatgaaggtggacagcatctgcaacctggacatcttctacttccccttcgaccagcagaactgcaccctgaccttcagcagcttcctgtacaccgtggacagcatgctgctggacatggagaaggaggtgtgggagatcaccgacgccagcagaaacatcctgcagacccacggcgagtgggagctgctgggcctgagcaaggccaccgccaagctgagcagaggcggcaacctgtacgaccagatcgtgttctacgtggccatcagaagaagacccagcctgtacgtgatcaacctgctggtgcccagcggcttcctggtggccatcgacgccctgagcttctacctgcccgtgaagagcggcaacagagtgcccttcaagatcaccctgctgctgggctacaacgtgttcctgctgatgatgagcgacctgctgcccaccagcggcacccccctgatcggcgtgtacttcgccctgtgcctgagcctgatggtgggcagcctgctggagaccatcttcatcacccacctgctgcacgtggccaccacccagcccccccccctgcccagatggctgcacagcctgctgctgcactgcaacagccccggcagatgctgccccaccgccccccagaaggagaacaagggccccggcctgacccccacccacctgcccggcgtgaaggagcccgaggtgagcgccggccagatgcccggccccgccgaggccgagctgaccggcggcagcgagtggaccagagcccagagagagcacgaggcccagaagcagcacagcgtggagctgtggctgcagttcagccacgccatggacgccatgctgttcagactgtacctgctgttcatggccagcagcatcatcaccgtgatctgcctgtggaacacctag

SEQ ID NO: 259585 - protein, 456 aa, Artificial Sequence
  derived and/or modified sequence
MLAFILSRATPRPALGPLSYREHRVALLHLTHSMSTTGRGVTFTINCSGFGQHGADPTALNSVFNRKPFRPVTNISVPTQVNISFAMSAILDVVWDNPFISWNPEECEGITKMSMAAKNLWLPDIFIIELMDVDKTPKGLTAYVSNEGRIRYKKPMKVDSICNLDIFYFPFDQQNCTLTFSSFLYTVDSMLLDMEKEVWEITDASRNILQTHGEWELLGLSKATAKLSRGGNLYDQIVFYVAIRRRPSLYVINLLVPSGFLVAIDALSFYLPVKSGNRVPFKITLLLGYNVFLLMMSDLLPTSGTPLIGVYFALCLSLMVGSLLETIFITHLLHVATTQPPPLPRWLHSLLLHCNSPGRCCPTAPQKENKGPGLTPTHLPGVKEPEVSAGQMPGPAEAELTGGSEWTRAQREHEAQKQHSVELWLQFSHAMDAMLFRLYLLFMASSIITVICLWNT

SEQ ID NO: 259586 - DNA, 1371 bp, Artificial Sequence
  derived and/or modified sequence
atgctggcgtttattctgagcagggccacaccaaggcccgcacttggacctctgagctatcgagaacacagggtcgcactgttgcacttgacccactccatgtctaccaccggtaggggggtcacatttacgattaactgcagcggattcggccagcacggggctgaccccacggccttaaacagcgtgtttaaccgcaagcctttcaggccagtcactaacatcagcgtgccgacacaggtcaacatctcatttgcgatgagcgccatattagatgtggtttgggacaacccctttatcagctggaatcctgaagagtgcgaagggatcacgaaaatgtctatggctgcgaaaaatctttggctgcctgacatcttcattatcgagttgatggacgtcgataaaactcctaagggcctaacggcttatgtgtcgaacgaaggaagaattaggtataagaagccaatgaaagtggatagtatctgtaacttggatattttctatttcccattcgaccagcagaattgtacccttaccttttcatcattcctgtatactgttgattcgatgttactcgacatggagaaagaggtctgggaaatcacagacgcatctagaaatatccttcaaacccatggagagtgggaactcttgggtttgtctaaagccaccgctaaactgtcacggggagggaacttgtacgaccaaatcgtgttttatgtggccattaggcggaggccttccctgtatgttattaacctgcttgtaccctctgggtttctcgtggccattgacgccctgagcttttatcttccagtgaaaagtggcaaccgtgtgccctttaagattactttgctattgggttacaacgtgttcctcctgatgatgtctgatctgcttccaactagcggaacaccactcattggagtctatttcgctctctgtctgtcactcatggtgggatcattgctcgagaccattttcattacacacctcctgcatgtagcgacaacccagcctcctcctctgccgcggtggttgcattctcttctccttcactgtaacagccctggccgctgttgtcccactgctccacagaaagagaataaggggcctggccttaccccaacccatttgccaggtgttaaggaacccgaggtgagcgccggtcagatgcctggtcctgcagaggctgaactcaccggaggctccgagtggacaagagcccagagagaacacgaggctcagaaacagcacagcgttgagctgtggctgcagttttctcacgccatggatgcgatgctgttcaggttatatctcctttttatggcctcctctataatcaccgtcatatgcctgtggaacacatag

SEQ ID NO: 259587 - DNA, 1371 bp, Artificial Sequence
  derived and/or modified sequence
atgctggccttcatcctgagccgggccacccccaggcctgccctgggccccctgagctaccgggagcaccgggtggccctgctgcacctgacccacagcatgagcaccaccggccggggcgtgaccttcaccatcaactgcagcggcttcggccagcacggggctgaccccacagccctgaacagcgtcttcaacaggaagcccttccggcctgtgaccaacatctctgtgcccacccaggtgaacatcagctttgccatgtctgccatcctggatgtggtgtgggacaaccccttcatctcctggaaccctgaggagtgtgagggcatcaccaagatgtccatggccgccaagaacctgtggctgcctgacatcttcatcatcgagctgatggatgtggacaagacccccaagggcctgacagcctacgtgtccaatgaaggccgcatccgctacaagaagcccatgaaggtggacagcatctgcaacctggacatcttctacttcccctttgaccagcagaactgcaccctgaccttcagcagcttcctgtacacagtggacagcatgctgctggacatggagaaggaggtgtgggagatcacagatgccagcaggaacatcctgcagacccacggggagtgggagctgctgggcctgagcaaggccacagccaagctgagccggggcggcaacctgtatgaccagatcgtgttctacgtggccatcagaagaagacccagcctgtatgtgatcaacctgctggtgcccagcggcttcctggtggccattgatgccctgtccttctacctgcctgtgaagagcggcaacagagtgcccttcaagatcaccctgctgctgggctacaacgtgttcctgctgatgatgtctgacctgctgcccaccagcggcacccccctcatcggcgtgtactttgccctgtgcctgagcctgatggtgggcagcctgctggagaccatcttcatcacccacctgctgcacgtggccaccacccagcccccacccctgccccgctggctgcacagcctgctgctgcactgcaacagccctggccgctgctgccccacagccccccagaaggagaacaagggccctggcctgacccccacccacctgcccggggtgaaggagcctgaggtgtctgctggccagatgcctggccctgctgaggccgagctgactggaggcagcgagtggacccgggcccagcgggagcacgaggcccagaagcagcacagcgtggagctgtggctgcagttcagccacgccatggatgccatgctgttccggctgtacctgctcttcatggccagcagcatcatcaccgtcatctgcctgtggaacacctag

SEQ ID NO: 259588 - DNA, 1371 bp, Artificial Sequence
  derived and/or modified sequence
atgctggccttcatcctgagccgggccaccccccggcccgccctgggtcccctgagctatcgggagcacagggtggccctgttgcatttgactcacagcatgtcaaccaccggacgtggtgtgacctttacaataaactgttcggggttcgggcagcacggagcggatcctacagccttgaattctgtattcaataggaagccctttcggccggtgactaacatcagtgtgcccacgcaagtaaatattagctttgctatgtccgctattctggacgtcgtttgggataacccctttatctcctggaatccagaggagtgcgaaggtatcactaaaatgagtatggcagctaagaatctctggctgcccgatatctttatcatagagctcatggatgtcgacaagactccgaagggtctcaccgcatacgttagcaacgaagggcgtatccggtataaaaagccaatgaaggtcgacagcatatgcaatttagacatcttctacttcccctttgaccaacagaattgcacacttaccttttcttctttcctttatactgtggatagtatgctgttagacatggaaaaggaggtatgggaaataacagatgccagccgcaacatccttcaaactcacggagaatgggagttactgggactgtcgaaggccaccgccaaattatcgcgggggggcaatctttacgaccagatcgtgttctatgtggctatccgcagacgaccttcactgtacgtgattaatctacttgtgccatccggatttctcgtggctatcgacgccctatctttctacctgcccgttaaaagtggaaatcgcgtaccatttaagattaccttactgctgggttacaatgtgttccttctgatgatgagtgacctgctgccaacaagcgggaccccactgataggcgtatattttgccctgtgcttatccctaatggttggttccctcttagagacaatattcattacacacctactccatgtcgcaacaacccaacctccaccactgccaagatggctgcacagtctcctgttacattgtaatagccccgggagatgctgtccgaccgctcctcagaaggaaaataaaggtcctggtttgaccccaacccaccttcccggtgtgaaggagcccgaggtgtctgcaggacagatgcctgggcctgctgaggccgagctgacggggggttccgagtggactcgtgcacaacgcgaacatgaggcacaaaagcagcatagtgtggagctctggctgcagttttctcatgctatggacgccatgctgttcagattgtacctcctcttcatggcctcctctataattactgtgatatgtctctggaacacttag

SEQ ID NO: 259589 - DNA, 1371 bp, Artificial Sequence
  derived and/or modified sequence
atgctagctttcatcctctctcgagccactcccagaccggctttggggcctctcagctaccgggagcatcgggtggcactccttcacctaacgcactctatgagtacaacaggaagaggcgtgaccttcacaataaattgttcaggcttcgggcagcacggcgcagacccgaccgccctgaactccgtctttaataggaagccttttcggcctgtgacaaacatctcggtcccaacgcaggtaaacattagtttcgctatgtccgctatattggacgttgtttgggacaacccattcataagctggaacccagaagagtgtgagggtatcacaaagatgtctatggcagcaaagaatttatggcttccagacattttcattatcgaattgatggatgtcgataagacgcccaaaggccttaccgcatacgtttcaaatgagggccgaataaggtataaaaaacctatgaaagttgattctatctgcaatttggacattttttactttcctttcgatcagcagaactgtaccctgactttctcgtcattcctttacacagtggatagcatgctgctggacatggagaaggaggtctgggaaattactgatgccagcaggaacatactgcagacacatggggaatgggaattgctggggctgtcgaaagccaccgccaagttgagtcgaggcggaaatctctacgaccagatagtgttctatgtggcgatccgacggcgtccctccctgtatgtgattaaccttctggtcccaagcggttttctggtcgccatagacgcacttagcttttacttacctgtcaagtccggtaaccgagttcctttcaagataaccctgctcctcggttacaacgtcttccttctcatgatgtcagatttgttgcccaccagcggtactcccttgattggcgtgtattttgccctttgccttagtttgatggtggggagccttctggaaacaatttttataactcacctccttcacgtggccaccacccagcccccaccactccctagatggctccacagccttcttttgcattgcaactctcccggacggtgctgcccgaccgctccccagaaggagaataaggggccagggctgactccaacgcatttaccaggagtgaaagagcctgaagtgtccgctgggcaaatgcctgggcctgctgaggcagaacttactggtggttctgagtggaccagagcccagcgggagcacgaggcccagaagcagcactcggtggagctttggctgcagttctcacatgctatggacgcaatgctgttccggctttatctgttgtttatggcctcttctatcatcaccgttatttgcctgtggaatacatag

SEQ ID NO: 259590 - DNA, 1371 bp, Artificial Sequence
  derived and/or modified sequence
atgttagctttcattttatcacgggcgaccccacgccctgccttggggcccctctcatatagggagcacagggttgctctccttcatctcacacattcgatgtccactacaggaaggggcgttactttcaccatcaattgctcagggtttggccagcacggggcggatcccactgctctgaattcagtgtttaatagaaagcccttccgtccggtcaccaacatcagcgtccccacccaagtcaacatctccttcgcgatgtctgccatcctagatgtggtttgggataacccatttatcagctggaacccagaggaatgtgagggcatcacgaagatgagtatggcagccaagaacctgtggctcccagacattttcatcattgaactcatggatgtggataagaccccaaaaggcctcacagcatatgtaagtaatgaaggtcgcatcaggtataagaaacccatgaaggtggacagtatctgtaacctggacatcttctacttccccttcgaccagcagaactgcacactcaccttcagctcattcctctacacagtggacagcatgttgctggacatggagaaagaagtgtgggaaataacagacgcatcccggaacatccttcagacccatggagaatgggagctcctgggcctcagcaaggccaccgcaaagttgtccaggggaggcaacctgtatgatcagatcgtgttctatgtggccatcaggcgcaggcccagtctctatgtcataaaccttctcgtgcccagtggctttctggttgccatcgatgccctcagcttctacctgccagtgaaaagtgggaatcgtgtcccattcaagataacgctcctgctgggctacaacgtcttcctgctcatgatgagtgacttgctccccaccagtggcacccccctcatcggtgtctacttcgccctgtgcctgtccctgatggtgggcagcctgctggagaccatcttcatcacccacctgctgcacgtggccaccacccagcccccacccctgcctcggtggctccactccctgctgctccactgcaacagcccggggagatgctgtcccactgcgccccagaaggaaaataagggcccgggtctcacccccacccacctgcccggtgtgaaggagccagaggtatcagcagggcagatgccgggccctgcggaggcagagctgacagggggctcagaatggacaagggcccagcgggaacacgaggcccagaagcagcactcagtggagctgtggttgcagttcagccacgcgatggacgccatgctcttccgcctctacctgctcttcatggcctcctctatcatcaccgtcatatgcctctggaacacctag

SEQ ID NO: 259591 - DNA, 1371 bp, Artificial Sequence
  derived and/or modified sequence
atgctggccttcatcctgagcagagccacccccagacccgccctgggccccctgagctacagagagcacagagtggccctgctgcacctgacccacagcatgagcaccaccggcagaggcgtgaccttcaccatcaactgcagcggcttcggccagcacggcgccgaccccaccgccctgaacagcgtgttcaacagaaagcccttcagacccgtgaccaacatcagcgtgcccacccaggtgaacatcagcttcgccatgagcgccatcctggacgtggtgtgggacaaccccttcatcagctggaaccccgaggagtgcgagggcatcaccaagatgagcatggccgccaagaacctgtggctgcccgacatcttcatcatcgagctgatggacgtggacaagacccccaagggcctgaccgcctacgtgagcaacgagggcagaatcagatacaagaagcccatgaaggtggacagcatctgcaacctggacatcttctacttccccttcgaccagcagaactgcaccctgaccttcagcagcttcctgtacaccgtggacagcatgctgctggacatggagaaggaggtgtgggagatcaccgacgccagcagaaacatcctgcagacccacggcgagtgggagctgctgggcctgagcaaggccaccgccaagctgagcagaggcggcaacctgtacgaccagatcgtgttctacgtggccatcagaagaagacccagcctgtacgtgatcaacctgctggtgcccagcggcttcctggtggccatcgacgccctgagcttctacctgcccgtgaagagcggcaacagagtgcccttcaagatcaccctgctgctgggctacaacgtgttcctgctgatgatgagcgacctgctgcccaccagcggcacccccctgatcggcgtgtacttcgccctgtgcctgagcctgatggtgggcagcctgctggagaccatcttcatcacccacctgctgcacgtggccaccacccagcccccccccctgcccagatggctgcacagcctgctgctgcactgcaacagccccggcagatgctgccccaccgccccccagaaggagaacaagggccccggcctgacccccacccacctgcccggcgtgaaggagcccgaggtgagcgccggccagatgcccggccccgccgaggccgagctgaccggcggcagcgagtggaccagagcccagagagagcacgaggcccagaagcagcacagcgtggagctgtggctgcagttcagccacgccatggacgccatgctgttcagactgtacctgctgttcatggccagcagcatcatcaccgtgatctgcctgtggaacacctag

SEQ ID NO: 259592 - DNA, 1281 bp, Artificial Sequence
  derived and/or modified sequence
atggtgcacttctgcggcctgctgaccctgcacagagagcccgtgcccctgaagagcatcagcgtgagcgtgaacatctacgagttcgtggccggcgtgagcgccaccctgaactacgagaacgaggagaaggtgcccctggaggccttcttcgtgttccccatggacgaggacagcgccgtgtacagcttcgaggccctggtggacggcaagaagatcgtggccgagctgcaggacaagatgaaggccagaaccaactacgagaaggccatcagccagggccaccaggccttcctgctggagggcgacagcagcagcagagacgtgttcagctgcaacgtgggcaacctgcagcccggcagcaaggccgccgtgaccctgaagtacgtgcaggagctgcccctggaggccgacggcgccctgagattcgtgctgcccgccgtgctgaaccccagataccagttcagcggcagcagcaaggacagctgcctgaacgtgaagacccccatcgtgcccgtggaggacctgccctacaccctgagcatggtggccaccatcgacagccagcacggcatcgagaaggtgcagagcaactgccccctgagccccaccgagtacctgggcgaggacaagaccagcgcccaggtgagcctggccgccggccacaagttcgacagagacgtggagctgctgatctactacaacgaggtgcacacccccagcgtggtgctggagatgggcatgcccaacatgaagcccggccacctgatgggcgaccccagcgccatggtgagcttctaccccaacatccccgaggaccagcccagcaacacctgcggcgagttcatcttcctgatggacagaagcggcagcatgcagagccccatgagcagccaggacaccagccagctgagaatccaggccgccaaggagaccctgatcctgctgctgaagagcctgcccatcggctgctacttcaacatctacggcttcggcagcagctacgaggcctgcttccccgagagcgtgaagtacacccagcagaccatggaggaggccctgggcagagtgaagctgatgcaggccgacctgggcggcaccgagatcctggcccccctgcagaacatctacagaggccccagcatccccggccaccccctgcaggtgttcgagagaccctacaccctgaccgtgctgctgctgcacctgagccccgagggcaacctgtgcgtgatcagacccagacacagcagatggaccatcaccgtgagcgtgggctag

SEQ ID NO: 259593 - DNA, 1248 bp, Artificial Sequence
  derived and/or modified sequence
atggtgcacttctgcggcctgctgaccctgcacagagagcccgtgcccctgaagagcatcagcgtgagcgtgaacatctacgagttcgtggccggcgtgagcgccaccctgaactacgagaacgaggagaaggtgcccctggaggccttcttcgtgttccccatggacgaggacagcgccgtgtacagcttcgaggccctggtggacggcaagaagatcgtggccgagctgcaggacaagatgaaggccagaaccaactacgagaaggccatcagccagggccaccaggccttcctgctggagggcgacagcagcagcagagacgtgttcagctgcaacgtgggcaacctgcagcccggcagcaaggccgccgtgaccctgaagtacgtgcaggagctgcccctggaggccgacggcgccctgagattcgtgctgcccgccgtgctgaaccccagataccagttcagcggcagcagcaaggacagctgcctgaacgtgaagacccccatcgtgcccgtggaggacctgccctacaccctgagcatggtggccaccatcgacagccagcacggcatcgagaaggtgcagagcaactgccccctgagccccaccgagtacctgggcgaggacaagaccagcgcccaggtgagcctggccgccggccacaagttcgacagagacgtggagctgctgatctactacaacgaggtgcacacccccagcgtggtgctggagatgggcatgcccaacatgaagcccggccacctgatgggcgaccccagcgccatggtgagcttctaccccaacatccccgaggaccagcccagcaacacctgcggcgagttcatcttcctgatggacagaagcggcagcatgcagagccccatgagcagccaggacaccagccagctgagaatccaggccgccaaggagaccctgatcctgctgctgaagagcctgcccatcggctgctacttcaacatctacggcttcggcagcagctacgaggcctgcttccccgagagcgtgaagtacacccagcagaccatggaggaggccctgggcagagtgaagctgatgcaggccgacctgggcggcaccgagatcctggcccccctgcagaacatctacagaggccccagcatccccggccaccccctgcagctgttcgtgttcaccgacggcgaggtgaccgacaccttcagcgtgatcaaggaggtgagaatcaacagacagaagcacagatag

SEQ ID NO: 259594 - DNA, 1281 bp, Artificial Sequence
  derived and/or modified sequence
atggtgcacttttgtgggctgttgacactgcaccgggagcccgtgccactcaaatccataagtgtttcagttaatatctatgaatttgtggcaggcgtgtcggccacccttaactacgaaaatgaggagaaggtgcccctggaagcttttttcgtattccccatggatgaagacagcgccgtgtacagtttcgaagcccttgtagatgggaaaaaaattgtggcggagcttcaagataaaatgaaagctcggacgaactacgaaaaggccatttcccagggacaccaggctttcctgcttgaaggtgattcatcatctcgggatgtgttcagttgtaacgtgggcaatcttcagcctggatcaaaggccgcggtgaccctgaagtatgtgcaggagctgcctcttgaggctgacggagccctgcgattcgtgctgcctgccgtgttaaatccccggtaccagttctcaggatcgtccaaagactcatgcttgaacgtcaaaacccccatagtacccgttgaggatttgccctacaccctcagcatggtcgccacgatcgactcacagcacggcattgagaaagtccagtctaactgtcctctttcgcctacagaatatctcggcgaggataaaactagcgctcaggtctccttggctgccggtcacaaatttgaccgagatgttgaactcctgatctactataacgaagtccacacccccagcgtcgtgctagaaatgggaatgccaaatatgaagccaggccacctaatgggggacccttccgcgatggtgagcttctatcccaacatccccgaggaccagcccagtaacacctgcggagagtttatttttctgatggatcgcagtgggtcaatgcagagtccaatgtcctcccaggatacaagccagctgagaattcaagccgccaaggaaactttgatattgttgctcaagtcattaccaataggctgttacttcaacatctatggctttggctccagttatgaagcatgcttccctgaaagcgtcaagtacacacagcagactatggaggaagctttggggagagtcaaacttatgcaggctgacctgggagggactgagattctcgcgccactgcagaatatttatcgtgggccttccatccctgggcaccctctgcaagtattcgagcggccctacactcttaccgtgcttctcctgcacctgtccccggagggaaacctctgcgtcattcgaccacggcactccagatggacaattaccgtctccgtggggtag

SEQ ID NO: 259595 - DNA, 1248 bp, Artificial Sequence
  derived and/or modified sequence
atggttcacttctgtggccttctgacattgcaccgcgagccggtcccgctaaagagcatctccgtttcagtgaacatctacgagttcgtagcgggggtgagtgccacactgaactatgagaatgaagaaaaagtccctcttgaggctttttttgtcttcccaatggacgaggactcagccgtgtactcttttgaggctctcgtggatggtaaaaaaatcgtggccgagctgcaggacaaaatgaaggcacggactaactatgagaaagccattagccaaggacaccaagcatttctgctggagggcgactctagtagtagggacgtttttagctgcaatgtgggtaacctacagccggggagtaaagccgccgttaccctaaagtacgtccaagagttgccactagaggctgatggcgccctcagatttgtgcttcccgccgtactgaaccctaggtatcagttcagtggtagctccaaggactcatgtctcaacgtcaagacaccaatcgtgccggtcgaggacctgccgtatacactgagtatggtcgccaccattgacagtcagcatggcatcgagaaggtgcagagcaactgtccgctttcacctaccgagtatctcggggaggataagactagcgcgcaagtgtcacttgctgccggtcacaagtttgaccgcgacgtggagctcctgatttactacaatgaagtccatacaccatctgttgtgttagagatggggatgcctaacatgaagcccggtcacctcatgggtgaccctagcgcaatggtctccttttacccaaacatccctgaggatcagccctcaaacacctgcggagagttcatcttccttatggacaggagtggtagcatgcagtcacctatgagcagtcaggatacatcccaactgcgcatacaggccgccaaggagacccttattctgctgctcaaatcccttccgatcggctgctactttaacatatacggcttcggtagcagttacgaggcgtgctttcccgagagtgtgaaatacactcagcagacaatggaggaagcactgggcagagtgaagttaatgcaggccgatctgggaggtacggaaatccttgcccctctgcagaacatctaccgggggccaagtataccaggacaccctctgcagttatttgtcttcactgatggggaagtaaccgatacgtttagcgtgataaaggaggtgcgtatcaatagacaaaagcaccggtag

SEQ ID NO: 259596 - DNA, 1248 bp, Artificial Sequence
  derived and/or modified sequence
atggtgcatttctgtgggctcttaacccttcaccgcgaaccagtgccgctaaagagcatctccgtgtcagtgaatatttatgaatttgtcgccggcgtttcggccactctgaactacgagaacgaagaaaaggttccattggaggccttctttgtgttcccaatggatgaggactcagccgtgtactctttcgaagcacttgtggatggtaagaagatcgtggctgagttgcaggacaaaatgaaggctagaaccaattacgagaaggccatttcacaggggcaccaagcttttctactggagggcgatagctcatctcgggatgtgttttcctgtaacgttgggaatttgcaaccggggagtaaggctgccgtcacgttgaagtatgtccaagaacttccattggaggctgacggggctctgcgatttgttctgcctgctgtactgaatcccagataccagttctcggggagcagcaaggactcttgcctgaacgttaagacccccatcgttccagttgaggatcttccatacaccttaagtatggtggcaacaatcgactctcagcatggcatcgaaaaagtacagagtaattgtcctctgagcccaacggagtacctcggcgaggacaaaacatccgcccaggtctccttagctgcaggccacaaattcgatagagatgtcgagctgctgatttattacaatgaggtgcataccccatctgtggtgcttgagatgggaatgcctaatatgaagccaggccatttaatgggggacccaagtgcaatggtgtctttttatcctaacatacccgaggaccaaccatcaaatacgtgcggtgagttcattttcctcatggaccggagtgggtccatgcaatcccctatgagtagtcaggacacctcgcagctgcggattcaggcagccaaggagacactgattcttcttctgaagtccctgccaatcggctgttactttaatatttacggatttggtagctcctatgaagcatgctttccggagtccgtcaaatatacccaacagaccatggaagaggccctggggagggtcaaactgatgcaggcggatctgggcgggactgagatcttagccccactgcagaacatatatcgcgggccaagcattcccggtcaccccttgcagttgtttgtgtttactgatggtgaggtcaccgacacattcagcgtcattaaagaagtgcgcataaaccggcagaagcaccgatag

SEQ ID NO: 259597 - DNA, 1281 bp, Artificial Sequence
  derived and/or modified sequence
atggtgcacttctgtggcctgctgaccctgcaccgggagcctgtgcccctgaagagcatctctgtgtctgtgaacatctatgaatttgtggccggcgtgtctgccaccctgaactatgaaaatgaggagaaggtgcccctggaggccttctttgtgttccccatggatgaagattctgctgtgtacagctttgaggccctggtggatggcaagaagatcgtggccgagctgcaggacaagatgaaggcccggaccaactatgagaaggccatcagccagggccaccaggccttcctgctggagggggacagcagcagcagagatgtgttcagctgcaatgtgggcaacctgcagcccggcagcaaggctgctgtgaccctgaagtatgtgcaggagctgcccctggaggctgatggagccctgcgctttgtgctgcctgctgtgctgaacccccgctaccagttcagcggcagcagcaaggacagctgcctgaatgtgaagacccccatcgtgcctgtggaggacctgccctacaccctgtccatggtggccaccatcgacagccagcacggcatcgagaaggtgcagagcaactgccccctgagccccacagagtacctgggggaggacaagaccagcgcccaggtgtccctggccgccggccacaagtttgacagagatgtggagctgctgatctactacaatgaggtgcacaccccatctgtggtgctggagatgggcatgcccaacatgaagccaggccacctgatgggagaccccagcgccatggtgtccttctaccccaacatccctgaggaccagcccagcaacacctgtggggagttcatcttcctgatggacagaagtggctccatgcagagccccatgagcagccaggacaccagccagctgcgcatccaggccgccaaggagaccctcatcctgctgctgaagagcctgcccatcggctgctacttcaacatctacggcttcggcagcagctatgaggcctgcttccctgagagcgtgaagtacacccagcagaccatggaggaggccctgggccgggtgaagctgatgcaggccgacctgggcggcacagagatcctggcccccctgcagaacatctaccggggccccagcatccctggccaccccctgcaggtgtttgagcggccctacaccctgactgtgctgctgctgcacctgagccctgagggcaacctgtgtgtgatccggcccaggcacagccgctggaccatcaccgtgtctgtgggctag

SEQ ID NO: 259598 - DNA, 1248 bp, Artificial Sequence
  derived and/or modified sequence
atggtgcacttctgtggcctgctgaccctgcaccgggagcctgtgcccctgaagagcatctctgtgtctgtgaacatctatgaatttgtggccggcgtgtctgccaccctgaactatgaaaatgaggagaaggtgcccctggaggccttctttgtgttccccatggatgaagattctgctgtgtacagctttgaggccctggtggatggcaagaagatcgtggccgagctgcaggacaagatgaaggcccggaccaactatgagaaggccatcagccagggccaccaggccttcctgctggagggggacagcagcagcagagatgtgttcagctgcaatgtgggcaacctgcagcccggcagcaaggctgctgtgaccctgaagtatgtgcaggagctgcccctggaggctgatggagccctgcgctttgtgctgcctgctgtgctgaacccccgctaccagttcagcggcagcagcaaggacagctgcctgaatgtgaagacccccatcgtgcctgtggaggacctgccctacaccctgtccatggtggccaccatcgacagccagcacggcatcgagaaggtgcagagcaactgccccctgagccccacagagtacctgggggaggacaagaccagcgcccaggtgtccctggccgccggccacaagtttgacagagatgtggagctgctgatctactacaatgaggtgcacaccccatctgtggtgctggagatgggcatgcccaacatgaagccaggccacctgatgggagaccccagcgccatggtgtccttctaccccaacatccctgaggaccagcccagcaacacctgtggggagttcatcttcctgatggacagaagtggctccatgcagagccccatgagcagccaggacaccagccagctgcgcatccaggccgccaaggagaccctcatcctgctgctgaagagcctgcccatcggctgctacttcaacatctacggcttcggcagcagctatgaggcctgcttccctgagagcgtgaagtacacccagcagaccatggaggaggccctgggccgggtgaagctgatgcaggccgacctgggcggcacagagatcctggcccccctgcagaacatctaccggggccccagcatccctggccaccccctgcagctgtttgtgttcacagatggagaggtgacagacaccttcagcgtcatcaaggaggtgcgcatcaaccggcagaagcacaggtag

SEQ ID NO: 259599 - DNA, 1281 bp, Artificial Sequence
  derived and/or modified sequence
atggtgcacttctgcggcctgctgaccctgcaccgggagcccgtgcctctaaaatcaattagtgtatccgtcaatatttacgagtttgtggctggcgtgtccgctactttgaattacgaaaatgaagaaaaagtgccactggaggcttttttcgtgtttcctatggacgaagactcggctgtgtacagctttgaagccctcgtggatggtaagaaaattgtggcagagctgcaagataagatgaaagcacgcactaattacgagaaggcaattagtcagggccatcaagcattcctgctcgaaggcgacagttcctcgcgagacgtatttagctgcaatgttggcaaccttcagccaggatcgaaggctgctgtgaccctgaaatatgtgcaagaacttccacttgaggccgatggggccctccggttcgttttgcccgcggtactcaacccccggtaccaattttccggttcttccaaagatagctgcctgaatgtgaagacccccatcgtccctgtggaagatctgccttacacactgtctatggtagcaacaatcgattcccaacacggaatcgagaaggtgcaatctaactgccccctgagccctacagagtacctgggcgaggacaagacttcagcccaggtctctctggcagcagggcataaatttgatcgagatgtcgagctgttaatctactataacgaggtgcacacaccttcagtcgtgctagaaatgggaatgccaaacatgaagcccgggcatcttatgggggatccttctgctatggtgtccttttatcccaacatccccgaagaccaacccagtaatacgtgtggtgaattcatcttccttatggacaggagcgggagtatgcagagcccaatgagcagccaggatacaagccaactccgtatccaagctgccaaggaaacattgatacttttgttaaagtcccttcctattgggtgctatttcaacatttatggcttcggatcatcttacgaggcctgcttccctgagtctgtgaagtatacccagcagaccatggaggaggccttgggccgcgttaagctgatgcaggctgacctaggcgggacagagatcctggcaccactgcagaacatttatcggggcccgtcaattccagggcacccactgcaggtattcgagaggccatatacactgaccgttctgctgctgcacctctccccggaaggcaacctttgtgtgatcagacctagacattcgcgatggactattacggttagcgtggggtag

SEQ ID NO: 259600 - DNA, 1248 bp, Artificial Sequence
  derived and/or modified sequence
atggtgcacttctgcggcctgctgaccctgcaccgggagcccgtgcccctcaagtcaatttcagtgtctgtgaacatttacgagttcgtagcaggagtgagcgccacattaaactatgagaacgaagaaaaggtgccactagaagcattctttgtctttccaatggacgaagacagtgccgtgtatagttttgaggccctcgtagacggcaagaagatcgtggctgaacttcaggataaaatgaaggcccgtaccaactatgaaaaggccatctctcagggacatcaagcattccttcttgaaggagatagttccagcagagacgtcttttcctgtaatgtggggaacctgcagcccgggagtaaggcagccgtgacactgaagtacgtgcaggaactgccactggaggccgacggagctcttagattcgttctgcccgcagtgctgaacccacgttatcagttttctggatcttccaaggattcctgcctcaatgtcaagacccccatcgtgcctgtggaggacttaccctatacactgtcaatggtcgccacaatcgattcgcaacatgggattgaaaaggtgcagtcaaattgcccgctttcacctaccgagtatttgggggaagataagacctctgcccaggtctctctggcagccgggcacaagtttgatagggatgtggagttgctgatttattataatgaagtccacacaccgtccgtggtgctggagatggggatgccaaatatgaagcccgggcacctgatgggagatcccagtgccatggtttctttttacccgaacattcccgaggatcagccatctaatacctgcggcgaattcattttcctgatggatcgaagtggcagcatgcaatcccctatgtctagtcaggatacttctcagctaaggattcaggccgctaaggagacactgattctgctgctgaaaagcctccctatcggctgttacttcaacatttacgggttcggatcgagctacgaggcctgcttccctgaatctgtaaagtatacgcagcaaaccatggaagaagccctcggccgagtcaagcttatgcaagctgatctcggcggaactgaaatcctggcccctcttcaaaacatctatcggggtccctccatccccggacacccgctgcaactgttcgtatttaccgacggtgaggtgaccgatacctttagcgtgattaaagaggtaagaatcaatagacagaaacataggtag

SEQ ID NO: 259601 - DNA, 1248 bp, Artificial Sequence
  derived and/or modified sequence
atggtgcacttctgcggcctgctgaccctgcaccgggagcccgtgcctctgaaatccattagtgtttcagtaaatatctacgaattcgttgccggcgtgtcggctacactgaactatgagaacgaggagaaagtccctctcgaggctttcttcgtatttcctatggacgaagatagcgcggtgtattcatttgaggctctggtagacggtaagaaaatcgttgccgagcttcaggacaaaatgaaggcccgaaccaattacgagaaggcaatctcccagggccaccaggctttccttctggagggggacagcagtagccgcgatgtgttcagctgtaacgtggggaatctgcagcccgggtctaaagcagccgttacgcttaagtatgtgcaggagctccccctggaagcagacggtgcactgcgtttcgtccttcctgcggtgctgaatccaagatatcagttcagcggcagttctaaagacagctgcttaaacgtgaaaactcctattgtccccgtggaagacttgccatacacgctctccatggtcgcgaccatcgacagtcagcatgggatcgaaaaggtacagagcaattgtccactgtcaccaactgagtatctcggggaggataagacctcagcccaggttagcctcgcggccggacacaagttcgacagggatgtggaattattaatttactataacgaagtacatactcccagtgtggtgctggagatgggaatgcccaatatgaagcctgggcacctgatgggcgatcccagcgcaatggtttctttctatccgaatataccggaggatcagccctcaaacacatgtggcgagtttatttttctaatggacaggtcaggaagcatgcagtccccaatgagctcccaggacacatcccagctgagaattcaagcggctaaggagactctaattctgctgctaaagtccctgccaattggctgttactttaatatatacgggttcggatcatcctacgaggcttgctttccagagtctgttaaatatacgcagcaaaccatggaggaggcgttagggcgggtcaagttaatgcaggctgacctgggaggaactgagattctggcaccattgcagaatatctatcggggacctagcatccctggtcaccccctgcaactgtttgtgttcacagacggcgaggtcacagacaccttcagtgtgatcaaggaggtgcgaataaatcgacagaagcatcggtag

SEQ ID NO: 259602 - DNA, 1281 bp, Artificial Sequence
  derived and/or modified sequence
atggtgcacttctgtggacttctgacactgcacagagaacccgtccctctgaaatcgatatcggtgtccgtgaatatctatgaatttgtggctggcgtgtccgccaccctcaattacgagaacgaggagaaggttccactggaggcgttttttgtgttcccaatggatgaagatagcgcagtgtattcttttgaagccctcgtggatggaaagaaaatcgtagcagagcttcaggacaagatgaaagctagaactaattatgaaaaggccatttcacagggccaccaagcgttcctcctcgaaggcgactcaagtagcagggatgtgttctcttgtaacgtcggtaacctgcagcctggttctaaggctgcagtcacactcaaatacgtgcaggaactgccacttgaagctgatggggctctcagatttgtgcttccagccgtcctgaatccaagatatcagttcagcggtagctccaaggattcctgtctgaatgtcaagacgccaattgtcccagtggaagacctgccatacaccctttccatggtcgcgaccatcgatagccagcatggcatcgagaaagtccaatccaactgtcctctttctcccactgaatatctgggggaagataaaacaagcgcccaggtgagcttggctgctgggcataaatttgatagggatgtggagttgctcatttactacaacgaagtgcacactccctcagtcgtgctggagatgggcatgccaaatatgaaaccgggacatctgatgggagacccaagcgcaatggtaagtttttatccaaatataccagaagaccaaccttccaatacctgcggtgagttcatctttctgatggatcgatccggcagcatgcaatccccaatgtcgagccaggatacgagccaattacggatacaggctgccaaagagaccctcatactcctgctcaaaagcctgccaatcgggtgttattttaacatctacgggttcgggtccagctacgaggcatgtttcccggaatccgtgaaatacactcagcagactatggaagaagcactgggacgggtcaaactgatgcaggcggatctcggtgggacagagatcctggctcccctgcaaaacatctaccgcggtccgagtatccccggtcacccgctccaggtgttcgagcgcccatacacactcacggtcctgctgctgcacctctcccctgaaggaaatctgtgtgtgattcggccaaggcattcaaggtggactataactgtgtctgtgggctag

SEQ ID NO: 259603 - DNA, 1248 bp, Artificial Sequence
  derived and/or modified sequence
atggtccacttctgtggtctcctgactctgcacagagagcctgtgccactaaagtctatttcagtatctgttaacatctatgaatttgttgcaggcgtttccgctacacttaattacgagaatgaggagaaagttcccttggaagccttctttgtcttccctatggacgaagattcagcggtttattccttcgaggcgctcgttgacggtaagaaaatcgtcgccgaactgcaggacaagatgaaagccagaacaaactacgagaaagctattagccagggacatcaggcctttctgttagagggagactccagttcacgagacgttttttcttgtaatgtggggaacctgcagccaggtagtaaggccgcagtgactctgaagtatgtccaggaactgccattagaagccgacggcgcactccgattcgtgttgcctgccgtgttaaatcctaggtatcagttcagcggctcgagcaaggacagttgtcttaacgtgaaaacgccaatcgtgccagtagaggacctcccatacactctgagcatggtagccaccattgactctcagcatggtatcgagaaggttcaatcaaactgccctctgtcccctactgaatatcttggggaagataaaactagcgcccaggtcagcctggccgctggccataagttcgacagggacgtggagctcctcatttactacaacgaggttcatacgccctctgtcgtgcttgaaatgggtatgccaaatatgaagcctggccatctaatgggtgaccccagtgctatggtgagtttctaccctaacatccccgaggatcagccatcaaatacatgtggggaatttatcttcctgatggaccggagcgggtctatgcagagtccaatgagtagccaggataccagccagctaaggatacaggccgcaaaagaaaccctgattcttttgttgaaaagcctgccaattggctgttatttcaacatttatggtttcgggtctagctatgaagcctgctttccagagtccgttaaatacacccagcagacaatggaggaggcactcggtcgcgttaaactgatgcaggctgacttgggcggaaccgaaatcttggcccctctccagaacatatataggggcccatccattccagggcaccccctccaactcttcgtattcacagatggggaggtgactgacactttcagcgttattaaggaggtccgcatcaacagacagaagcatagatag

SEQ ID NO: 259604 - DNA, 1248 bp, Artificial Sequence
  derived and/or modified sequence
atggtccatttttgcggactgctgaccctccaccgggaaccggtccccctcaagtcaatcagcgtgtctgttaacatctacgagtttgtggccggagtaagcgcaactctgaattacgagaatgaagaaaaggtcccactggaggccttcttcgttttccctatggacgaagactccgctgtctacagctttgaggccctggtggatggtaaaaagatcgtggcggaactgcaggacaagatgaaagctcgtacaaactatgagaaggctatcagtcagggccaccaggccttcttgctggagggggactcatcatctcgcgatgtcttcagctgcaacgtgggcaaccttcagccaggctccaaggcagccgtgacgctaaagtatgtgcaggagttaccccttgaggcagacggcgctctcagatttgtactgccagcagtgctgaacccccgttatcaattctccggctcttccaaagatagctgtctaaatgtgaaaactcccatcgtacctgtggaggacttgccttacacactatccatggtggccaccatagattcccagcacggcatcgagaaggtgcagtcaaactgtccattgtctcccactgaatacctcggcgaagataagactagtgcgcaagtttcactggctgccggtcataagtttgacagggatgtggagctcctcatttattacaacgaggtgcataccccctccgtcgttttggaaatgggtatgcccaatatgaaacccggacacctcatgggggacccatctgctatggttagcttctaccctaatatacctgaggaccagccttctaacacgtgtggggaattcatctttcttatggacaggtccggctccatgcaaagccccatgtcctctcaggatactagccagttacggatccaggctgcaaaagagaccctcatcctcctcctgaagagcttgcctatcggatgttattttaatatatatggattcgggagcagctatgaggcgtgtttcccagagtcggttaaatacactcagcagacaatggaggaggcactcggccgtgttaagctgatgcaggcagacctggggggtactgagattctggcccctctccaaaatatctatcggggtcctagcataccaggacatcctcttcagcttttcgtcttcactgacggggaagttacagacactttttctgtgattaaagaagtgcggatcaataggcagaagcaccgttag

SEQ ID NO: 259605 - DNA, 2819 bp, Artificial Sequence
  derived and/or modified sequence
cggttctttccggaaattatgactgcagctgttttcactccgctgtgactcagagcgctccgggctgcaggagaggaagcccagcctgttctaccagagaacttgcccaggtcagaggtctgcgtagaagcccttttctgagcatcctctcctctcctcacacctgccactgtcctctgcgttgctgtcgaattaaatcttgcatcaccatggtgcacttctgtggcctactcaccctccaccgggagccagtgccgctgaagagtatctctgtgagcgtgaacatttacgagtttgtggctggtgtgtctgcaactttgaactacgagaatgaggagaaagttcctttggaggccttctttgtgttccccatggatgaagactctgctgtttacagctttgaggccttggtggatgggaagaaaattgtagcagaattacaagacaagatgaaggcccgcaccaactatgagaaagccatctcccagggccaccaggccttcttattggagggggacagcagctccagggatgtcttctcttgcaatgtgggtaacctccaacctgggtcgaaggcggcagtcaccctgaagtatgtgcaggagctgcctctggaagcagatggggctctgcgctttgtgctcccagctgtcctgaatcctagataccagttctctgggtcgtctaaggacagttgccttaatgtgaagactcctatagtccctgtggaggacctgccctacacactcagcatggtcgccaccatagattcccagcatggcattgagaaggtccaatccaactgccccttgagtcctaccgagtacctaggagaggacaagacttctgctcaggtttccctggctgctggacacaagtttgatcgggacgtggaactcctgatttactacaatgaggtgcatacccccagcgtggttttggagatggggatgcctaacatgaagccaggtcatttgatgggagatccatctgcaatggtgagtttctatccaaatatcccagaagatcaaccatcaaatacctgtggagagtttatctttctcatggaccgctcgggaagtatgcagagccccatgagtagccaggatacatctcagctgcgaatacaggcagccaaggaaacactgattttgctgctgaagagtttacctataggctgttatttcaacatctatggatttggctcttcctatgaggcatgctttccggagagtgtgaagtacactcagcaaacaatggaggaggctctggggagagtgaagcttatgcaggccgacctagggggcactgaaatcttggcaccactccagaacatttacaggggaccctccatcccaggccaccccctacaggttttcgaaaggccttacactctgaccgtcctccttctgcatctcagcccagaggggaacttatgtgttataaggccaagacattccagatggacgattacagtctctgtgggttgataagtcacaaggaccagcacagtccaggctttggagagaatcaccttgtgcagctgatttaccaccaaaatgcaaatggttcctgggatctgaatgaagatctagccaagatcctaggtatgagtttggaagaaataatggctgcacagcctgccgagcttgtggattcctcaggctgggccaccatcctggccgtgatctggctgcacagcaatggtaaggacttgaagtgtgaatgggagcttctggaaaggaaggccgtggcctggatgcgtgcccatgcaggctccaccatgccttcggttgtgaaagctgctattactttcctgaagtcatctgtggatcctgctatctttgccttttgaagataccatccagaaaaagaagtgcctttaatttgctactgtcatttcctctagtatcacttttgctgtgatgatgtgttcttgtgtattataactctttattttttgccataaaagtaaaggatgcttactccacttcgcttctctgctccaggttcactttggatatgatctttcttttcccaacatatgccctcagaaaagtgacagtggtcccagaacctattccctttcttgagggagttcaaaacattcataggcagtaatgttcctcccagggtttccagggaaacaacatgaaaaacaggtgacatgaactacagactaaagattgcagcatttatgttagagaatgcttgaattagagaattttctgcattatctttgtctgttcactttctatcttatatacttatcagggccatactggtaagcttgcgtaggaggagttagagggaagttgaaagccaacatctggatcaatgtaatgtcaagatcacaaagacagagactgcaggggtccactgtgagaggtgacactgttggggaccttcctgattcattcttcttgggctttgctagcctgtacaacctacatgtcttttcttccactgcctgaaagacttgggttgaactataactgttggagagagatgttcctctttaatcatgaaacaccttaagaagtctataatgcaatccttagtcctaccctgaacctatgtgtcctctaagtcaggccctgatctagtgcagtaaagggaagggtgggcttaatgggagctttgcctgggacctgaacctggagcacttaccgcattaggaagaaaggagctccccgtaatcgttcctgacccttgtgtctcatataccctatcctggtggaaatgaccctatttgatatgctgtcccttaaaataacttgtatcaatattaaaatgactatttctaccctttgatgagt

SEQ ID NO: 259606 - DNA, 1978 bp, Artificial Sequence
  derived and/or modified sequence
cggttctttccggaaattatgactgcagctgttttcactccgctgtgactcagagcgctccgggctgcaggagaggaagcccagcctgttctaccagagaacttgcccaggtcagaggtctgcgtagaagcccttttctgagcatcctctcctctcctcacacctgccactgtcctctgcgttgctgtcgaattaaatcttgcatcaccatggtgcacttctgtggcctactcaccctccaccgggagccagtgccgctgaagagtatctctgtgagcgtgaacatttacgagtttgtggctggtgtgtctgcaactttgaactacgagaatgaggagaaagttcctttggaggccttctttgtgttccccatggatgaagactctgctgtttacagctttgaggccttggtggatgggaagaaaattgtagcagaattacaagacaagatgaaggcccgcaccaactatgagaaagccatctcccagggccaccaggccttcttattggagggggacagcagctccagggatgtcttctcttgcaatgtgggtaacctccaacctgggtcgaaggcggcagtcaccctgaagtatgtgcaggagctgcctctggaagcagatggggctctgcgctttgtgctcccagctgtcctgaatcctagataccagttctctgggtcgtctaaggacagttgccttaatgtgaagactcctatagtccctgtggaggacctgccctacacactcagcatggtcgccaccatagattcccagcatggcattgagaaggtccaatccaactgccccttgagtcctaccgagtacctaggagaggacaagacttctgctcaggtttccctggctgctggacacaagtttgatcgggacgtggaactcctgatttactacaatgaggtgcatacccccagcgtggttttggagatggggatgcctaacatgaagccaggtcatttgatgggagatccatctgcaatggtgagtttctatccaaatatcccagaagatcaaccatcaaatacctgtggagagtttatctttctcatggaccgctcgggaagtatgcagagccccatgagtagccaggatacatctcagctgcgaatacaggcagccaaggaaacactgattttgctgctgaagagtttacctataggctgttatttcaacatctatggatttggctcttcctatgaggcatgctttccggagagtgtgaagtacactcagcaaacaatggaggaggctctggggagagtgaagcttatgcaggccgacctagggggcactgaaatcttggcaccactccagaacatttacaggggaccctccatcccaggccaccccctacagctttttgtctttacagatggagaagttacagacacgtttagtgtaattaaagaagttaggatcaacagacagaaacacaggtaggaagaaaatgtgatttccgggtgattggtgctgagtagtgacacacagactctagtgctacatgatgccggtgttgaccttccttcaagaggaccaaatgatttcagaatttagttttagcagctgaaaatttatttctccctgtaaacgttaaaaacagttttccaaataacatcaacaacacagcaaaaccattgtttcttattctttctaaactacaacgaacacaagaattgaatagtaagatgttaattttttttactataaacatttttagagaagtaaaacatgctgaaaactacacaaattataagcatacaactggactcattatcacagtgaatgcactgtgtgatcgccacataggtaaaaactggaatggtcgtaggcctctccatctgtacccttttccatcatgtcctattccctgtcactacacactaaaactttcctgacttacaataccatgggttatttatgcttgtttttgaatgaaaataaataagttatacagtatgctt

SEQ ID NO: 259607 - DNA, 1863 bp, Artificial Sequence
  derived and/or modified sequence
cggttctttccggaaattatgactgcagctgttttcactccgctgtgactcagagcgctccgggctgcaggagaggaagaaatcttgcatcaccatggtgcacttctgtggcctactcaccctccaccgggagccagtgccgctgaagagtatctctgtgagcgtgaacatttacgagtttgtggctggtgtgtctgcaactttgaactacgagaatgaggagaaagttcctttggaggccttctttgtgttccccatggatgaagactctgctgtttacagctttgaggccttggtggatgggaagaaaattgtagcagaattacaagacaagatgaaggcccgcaccaactatgagaaagccatctcccagggccaccaggccttcttattggagggggacagcagctccagggatgtcttctcttgcaatgtgggtaacctccaacctgggtcgaaggcggcagtcaccctgaagtatgtgcaggagctgcctctggaagcagatggggctctgcgctttgtgctcccagctgtcctgaatcctagataccagttctctgggtcgtctaaggacagttgccttaatgtgaagactcctatagtccctgtggaggacctgccctacacactcagcatggtcgccaccatagattcccagcatggcattgagaaggtccaatccaactgccccttgagtcctaccgagtacctaggagaggacaagacttctgctcaggtttccctggctgctggacacaagtttgatcgggacgtggaactcctgatttactacaatgaggtgcatacccccagcgtggttttggagatggggatgcctaacatgaagccaggtcatttgatgggagatccatctgcaatggtgagtttctatccaaatatcccagaagatcaaccatcaaatacctgtggagagtttatctttctcatggaccgctcgggaagtatgcagagccccatgagtagccaggatacatctcagctgcgaatacaggcagccaaggaaacactgattttgctgctgaagagtttacctataggctgttatttcaacatctatggatttggctcttcctatgaggcatgctttccggagagtgtgaagtacactcagcaaacaatggaggaggctctggggagagtgaagcttatgcaggccgacctagggggcactgaaatcttggcaccactccagaacatttacaggggaccctccatcccaggccaccccctacagctttttgtctttacagatggagaagttacagacacgtttagtgtaattaaagaagttaggatcaacagacagaaacacaggtaggaagaaaatgtgatttccgggtgattggtgctgagtagtgacacacagactctagtgctacatgatgccggtgttgaccttccttcaagaggaccaaatgatttcagaatttagttttagcagctgaaaatttatttctccctgtaaacgttaaaaacagttttccaaataacatcaacaacacagcaaaaccattgtttcttattctttctaaactacaacgaacacaagaattgaatagtaagatgttaattttttttactataaacatttttagagaagtaaaacatgctgaaaactacacaaattataagcatacaactggactcattatcacagtgaatgcactgtgtgatcgccacataggtaaaaactggaatggtcgtaggcctctccatctgtacccttttccatcatgtcctattccctgtcactacacactaaaactttcctgacttacaataccatgggttatttatgcttgtttttgaatgaaaataaataagttatacagtatgctt

SEQ ID NO: 259608 - DNA, 489 bp, Artificial Sequence
  derived and/or modified sequence
atgaacagcaatgccagcgagcacacaggcatgctgcggacctgctggagccacagccactgggaccccttcagcagcggctctgtgacagccatgtgggccacccacagccccaccagcaaggcctgggccggcatccagggccggggccgctgggccctgggcttcccctggaggggccagggcgtgctgcacgtgattgccagccagaaggctgctgtgacagaagctgtggacctgaggactggagctgccagccaggccatgtctgaggcctttgtgcgcagcggcatgttctacctgcggcctgcctttgtgctgctgtgctacaagtggggcaagctgcggcacagcgaggtgagcaacctgctgggcgtggcctggcctgtgtctgaggaggcctgcatgggcacctggggcagcctggccgtggccgtgaccctgcctgcccagggcctgggcacctggggcagagatgaaggagagtag

SEQ ID NO: 259609 - DNA, 522 bp, Artificial Sequence
  derived and/or modified sequence
atggatgaaaataatggcctgctgctgctggagctgaacccccccaacccctgggacctgcagcccaggagccctgaggagctggccttcggggaggtgcagatcacctacctgacccacgcctgcatggacctgaagctgggggacaagaggatggtgtttgacccctggctgattggccctgcctttgcccggggctggtggctgctgcacgagcccccaagtgactggctggagcggctgtgccaggccgacctgatctacatcagccacctgcacagcgaccacctgagctaccccaccctgaagaagctggccggccggcggccagacatccccatctacgtgggcaacacagagaggcctgtgttctggaacctgaaccagagcggcgtgcagctgaccaacatcaacgtggtgcccttcggcatctggcagcaggtggacaagaacctgcgcttcatgatcctgatggatggagtgcaccctgagatggacacctgcatcatcgtggagtactag

SEQ ID NO: 259610 - protein, 353 aa, Artificial Sequence
  derived and/or modified sequence
MAAAEAANCIMEVSCGQAESSEKPNAEDMTSKDYYFDSYAHFGIHEEMLKDEVRTLTYRNSMFHNRHLFKDKVVLDVGSGTGILCMFAAKAGARKVIGIECSSISDYAVKIVKANKLDHVVTIIKGKVEEVELPVEKVDIIISEWMGYCLFYESMLNTVLYARDKWLAPDGLIFPDRATLYVTAIEDRQYKDYKIHWWENVYGFDMSCIKDVAIKEPLVDVVDPKQLVTNACLIKEVDIYTVKVEDLTFTSPFCLQVKRNDYVHALVAYFNIEFTRCHKRTGFSTSPESPYTHWKQTVFYMEDYLTVKTGEEIFGTIGMRPNAKNNRDLDFTIDLDFKGQLCELSCSTDYRMR

SEQ ID NO: 259611 - DNA, 1062 bp, Artificial Sequence
  derived and/or modified sequence
atggcagctgcggaagcagccaactgcattatggaggtgagttgtggacaggcagagagctctgagaagcccaatgcagaagacatgacgagtaaagactattattttgactcttacgcacactttggcatccacgaggagatgctcaaggacgaggtccggaccctgacatatagaaactcaatgttccataacagacacctcttcaaggataaggtagtactggatgtgggctctggtacaggtattctctgtatgttcgctgcaaaggccggtgcgagaaaagtgatcggaatcgaatgttctagtattagcgattatgcagtgaaaatcgtaaaggccaataagctggatcacgtggtgactattatcaagggcaaagtggaagaggtggaactgccagtggaaaaagtggatatcatcatatccgaatggatgggctactgtctgttctacgaaagcatgcttaatacggttctgtatgcccgtgataagtggctggccccagacggactgatcttccctgaccgggctacattgtacgttaccgccattgaggatcgtcagtacaaggattacaagatccattggtgggaaaacgtctacggctttgacatgtcatgcatcaaggacgtagctataaaggaaccgctggtcgatgtggttgaccccaaacagctggtaaccaacgcctgcctgattaaagaggtggacatatacactgtcaaggtggaggatttaacctttaccagccccttctgccttcaggtgaagaggaacgattatgtgcatgccctcgtggcttacttcaacatcgaattcaccaggtgccataagcggacaggattttctactagtccagaatctccgtacactcattggaaacagaccgtattttacatggaagactacctgactgtcaaaaccggagaagagatcttcggcaccatcggtatgcgtcccaatgcaaagaataacagggatctggatttcaccattgacctggatttcaagggtcagctctgcgagctcagttgctccaccgattatcgaatgaggtag

SEQ ID NO: 259612 - DNA, 1062 bp, Artificial Sequence
  derived and/or modified sequence
atggctgctgctgaggccgccaactgcatcatggaggtgtcctgtggccaggccgagagcagcgagaagcccaatgctgaggacatgaccagcaaggactactactttgacagctatgcccacttcggcatccacgaggagatgctgaaggatgaggtgaggaccctgacctacagaaattccatgttccacaacagacacctgttcaaggacaaggtggtgctggatgtgggcagcggcaccggcatcctgtgcatgtttgctgccaaggccggggccaggaaggtgattggaattgagtgcagcagcatcagtgactatgctgtgaagatcgtgaaggccaacaagctggaccacgtggtgaccatcatcaagggcaaggtggaggaggtggagctgcctgtggagaaggtggacatcatcatcagcgagtggatgggctactgcctcttctatgagagcatgctgaacacagtgctgtatgcccgggacaagtggctggccccagatggcctcatcttcccagaccgggccaccctgtatgtgacagccatcgaggaccggcagtacaaggactacaagatccactggtgggagaatgtgtatggctttgacatgagctgcatcaaggatgtggccatcaaggagcccctggtggatgtggtggaccccaagcagctggtgaccaatgcctgcctgatcaaggaggtggacatctacacagtgaaggtggaggacctgaccttcaccagccccttctgcctgcaggtgaagagaaatgactatgtgcacgccctggtggcctacttcaacatcgagttcacccgctgccacaagaggacaggcttcagcaccagccctgagagcccctacacccactggaagcagacagtgttctacatggaggactacctgactgtgaagacaggagaggagatcttcggcaccatcggcatgaggcccaatgccaagaacaacagagacctggacttcaccatcgacctggacttcaagggccagctgtgtgagctgagctgcagcacagactacaggatgaggtag

SEQ ID NO: 259613 - DNA, 1062 bp, Artificial Sequence
  derived and/or modified sequence
atggccgccgccgaggccgccaactgcatcatggaggtgagctgcggacaagctgaatccagtgagaagccaaacgcagaggacatgacatcaaaggactattactttgattcctacgctcacttcggtatacatgaggagatgttgaaagatgaggtaaggaccctgacatacaggaactccatgttccataatagacatctcttcaaggacaaggtcgtgctggacgtcggctccggcactggaattctctgtatgtttgcagcgaaggctggagcgcgtaaggtgatcggaatagagtgtagttcaattagtgattacgctgtgaagattgtgaaagcgaacaagctggaccatgttgtaaccattatcaaaggtaaagtagaagaggtggagctccctgttgagaaggtggatatcatcatctccgaatggatgggctattgcctgttctacgagagcatgttgaacaccgtgttatacgctcgggacaagtggctggcacccgatggcctaatcttccccgatcgggcgacgctttatgttacggccatcgaagatcgccagtacaaggactacaagattcactggtgggaaaacgtctatggatttgacatgagctgcataaaggacgtggccattaaggaacccctggtggacgtggtcgatcctaagcagcttgtcacaaatgcttgtctcatcaaagaggtggacatttatacagtgaaggtggaagatctgacctttacctcccctttctgtctgcaggtaaaacggaatgattacgtgcacgcgttggtagcctactttaatattgagttcacccggtgccataagcggacaggattttcaacttccccggagtccccttacacacactggaaacaaacagttttctatatggaggactatcttacagtcaaaactggggaggagatttttggcacaatcggtatgcgccccaacgcaaagaataatagagacctggactttactattgatctagattttaagggacagttgtgcgagctctcatgtagcacagactaccggatgcgttag

SEQ ID NO: 259614 - DNA, 1062 bp, Artificial Sequence
  derived and/or modified sequence
atggcggctgccgaagctgcgaactgcattatggaggtgtcctgtggccaggctgagagctcagaaaaaccaaacgcagaggacatgacttcgaaggactattactttgacagctatgcccacttcgggatccacgaagagatgctgaaagacgaggtgagaacactgacctaccgtaacagtatgtttcataacaggcacctctttaaagacaaggtggtcctcgacgtcgggagtgggacaggtatattatgtatgttcgccgcaaaggcgggtgccaggaaggtcatcggcatcgaatgcagctcgatcagtgattacgccgtcaaaatcgtcaaggccaataagctagatcacgtcgtgaccataattaagggtaaggtcgaagaggtggagcttccagttgaaaaggtcgacataattatctcggagtggatgggctactgtttgttctacgagtcgatgctgaacactgtgctctatgctcgagacaaatggttggcccctgatggcctgatcttccctgaccgcgctacgctgtatgtgaccgctatagaggacagacagtataaagactacaagatccactggtgggagaatgtttacgggtttgatatgtcatgcattaaggacgtggccattaaggagccactggtggatgtcgtcgatcccaaacagttagtcacaaatgcttgcttgattaaagaggtcgacatatataccgtgaaagtggaagacctcaccttcactagtccattctgcctccaggtgaaaagaaacgattacgttcacgccctggttgcttacttcaacatcgagttcactcggtgccacaagcggaccggattcagcacctcccctgaaagtccttacacccattggaagcagacggtgttctacatggaggattacctgaccgtaaaaacaggtgaggagatatttggaaccatagggatgaggcccaacgccaaaaacaatcgggacctggacttcaccattgacctggactttaagggacaattgtgcgagctgtcctgctctacagattaccgtatgaggtag

SEQ ID NO: 259615 - DNA, 1393 bp, Artificial Sequence
  derived and/or modified sequence
attgccaatgaaatcttccagcggggtcgcggtaggcgggccgtggaccctctggtataaggcggtcccgggggagtgaggagaaagggggggtcttggcggccggaggaggagtaggtgcgggtgaagatggcggcagccgaggccgcgaactgcatcatggaggtgtcctgtggccaggcggaaagcagtgagaagcccaacgctgaggacatgacatccaaagattactactttgactcctacgcacactttggcatccacgaggagatgctgaaggacgaggtgcgcaccctcacttaccgcaactccatgtttcataaccggcacctcttcaaggacaaggtggtgctggacgtcggctcgggcaccggcatcctctgcatgtttgctgccaaggccggggcccgcaaggtcatcgggatcgagtgttccagtatctctgattatgcggtgaagatcgtcaaagccaacaagttagaccacgtggtgaccatcatcaaggggaaggtggaggaggtggagctcccagtggagaaggtggacatcatcatcagcgagtggatgggctactgcctcttctacgagtccatgctcaacaccgtgctctatgcccgggacaagtggctggcgcccgatggcctcatcttcccagaccgggccacgctgtatgtgacggccatcgaggaccggcagtacaaagactacaagatccactggtgggagaacgtgtatggcttcgacatgtcttgcatcaaagatgtggccattaaggagcccctagtggatgtcgtggaccccaaacagctggtcaccaacgcctgcctcataaaggaggtggacatctataccgtcaaggtggaagacctgaccttcacctccccgttctgcctgcaagtgaagcggaatgactacgtgcacgccctggtggcctacttcaacatcgagttcacacgctgccacaagaggaccggcttctccaccagccccgagtccccgtacacgcactggaagcagacggtgttctacatggaggactacctgaccgtgaagacgggcgaggagatcttcggcaccatcggcatgcggcccaacgccaagaacaaccgggacctggacttcaccatcgacctggacttcaagggccagctgtgcgagctgtcctgctccaccgactaccggatgcgctgaggcccggctctcccgccctgcacgagcccaggggctgagcgttcctaggcggtttcggggctcccccttcctctccctccctcccgcagaagggggttttaggggcctgggctggggggatggggagggcacatcgtgactgtgtttttcataacttatgtttttatatggttgcatttacgccaataaatcctcagctggg

SEQ ID NO: 259616 - DNA, 1062 bp, Artificial Sequence
  derived and/or modified sequence
atggccgccgccgaggccgccaactgcatcatggaggtgagctgcggccaggccgagagcagcgagaagcccaacgccgaggacatgaccagcaaggactactacttcgacagctacgcccacttcggcatccacgaggagatgctgaaggacgaggtgagaaccctgacctacagaaacagcatgttccacaacagacacctgttcaaggacaaggtggtgctggacgtgggcagcggcaccggcatcctgtgcatgttcgccgccaaggccggcgccagaaaggtgatcggcatcgagtgcagcagcatcagcgactacgccgtgaagatcgtgaaggccaacaagctggaccacgtggtgaccatcatcaagggcaaggtggaggaggtggagctgcccgtggagaaggtggacatcatcatcagcgagtggatgggctactgcctgttctacgagagcatgctgaacaccgtgctgtacgccagagacaagtggctggcccccgacggcctgatcttccccgacagagccaccctgtacgtgaccgccatcgaggacagacagtacaaggactacaagatccactggtgggagaacgtgtacggcttcgacatgagctgcatcaaggacgtggccatcaaggagcccctggtggacgtggtggaccccaagcagctggtgaccaacgcctgcctgatcaaggaggtggacatctacaccgtgaaggtggaggacctgaccttcaccagccccttctgcctgcaggtgaagagaaacgactacgtgcacgccctggtggcctacttcaacatcgagttcaccagatgccacaagagaaccggcttcagcaccagccccgagagcccctacacccactggaagcagaccgtgttctacatggaggactacctgaccgtgaagaccggcgaggagatcttcggcaccatcggcatgagacccaacgccaagaacaacagagacctggacttcaccatcgacctggacttcaagggccagctgtgcgagctgagctgcagcaccgactacagaatgagatag

SEQ ID NO: 259617 - protein, 847 aa, Artificial Sequence
  derived and/or modified sequence
MAQWEMLQNLDSPFQDQLHQLYSHSLLPVDIRQYLAVWIEDQNWQEAALGSDDSKATMLFFHFLDQLNYECGRCSQDPESLLLQHNLRKFCRDIQDPTQLAEMIFNLLLEEKRILIQAQRAQLEQGEPVLETPVESQQHEIESRILDLRAMMEKLVKSISQLKDQQDVFCFRYKIQAKGKTPSLDPHQTKEQKILQETLNELDKRRKEVLDASKALLGRLTTLIELLLPKLEEWKAQQQKACIRAPIDHGLEQLETWFTAGAKLLFHLRQLLKELKGLSCLVSYQDDPLTKGVDLRNAQVTELLQRLLHRAFVVETQPCMPQTPHRPLILKTGSKFTVRTRLLVRLQEGNESLTVEVSIDRNPPQLQGFRKFNILTSNQKTLTPEKGQSQGLIWDFGYLTLVEQRSGGSGKGSNKGPLGVTEELHIISFTVKYTYQGLKQELKTDTLPVVIISNMNQLSIAWASVLWFNLLSPNLQNQQFFSNPPKAPWSLLGPALSWQFSSYVGRGLNSDQLSMLRNKLFGQNCRTEDPLLSWADFTKRESPPGKLPFWTWLDKILELVHDHLKDLWNDGRIMGFVSRSQERRLLKKTMSGTFLLRFSESSEGGITCSWVEHQDDDKVLIYSVQPYTKEVLQSLPLTEIIRHYQLLTEENIPENPLRFLYPRIPRDEAFGCYYQEKVNLQERRKYLKHRLIVVSNRQVDELQQPLELKPEPELESLELELGLVPEPELSLDLEPLLKAGLDLGPELESVLESTLEPVIEPTLCMVSQTVPEPDQGPVSQPVPEPDLPCDLRHLNTEPMEIFRNCVKIEEIMPNGDPLLAGQNTVDEVYVSRPSHFYTDGPLMPSDF

SEQ ID NO: 259618 - DNA, 2544 bp, Artificial Sequence
  derived and/or modified sequence
atggcccagtgggagatgctgcagaacctggacagccccttccaggaccagctgcaccagctgtacagccacagcctgctgcccgtggacatcagacagtacctggccgtgtggatcgaggaccagaactggcaggaggccgccctgggcagcgacgacagcaaggccaccatgctgttcttccacttcctggaccagctgaactacgagtgcggcagatgcagccaggaccccgagagcctgctgctgcagcacaacctgagaaagttctgcagagacatccaggaccccacccagctggccgagatgatcttcaacctgctgctggaggagaagagaatcctgatccaggcccagagagcccagctggagcagggcgagcccgtgctggagacccccgtggagagccagcagcacgagatcgagagcagaatcctggacctgagagccatgatggagaagctggtgaagagcatcagccagctgaaggaccagcaggacgtgttctgcttcagatacaagatccaggccaagggcaagacccccagcctggacccccaccagaccaaggagcagaagatcctgcaggagaccctgaacgagctggacaagagaagaaaggaggtgctggacgccagcaaggccctgctgggcagactgaccaccctgatcgagctgctgctgcccaagctggaggagtggaaggcccagcagcagaaggcctgcatcagagcccccatcgaccacggcctggagcagctggagacctggttcaccgccggcgccaagctgctgttccacctgagacagctgctgaaggagctgaagggcctgagctgcctggtgagctaccaggacgaccccctgaccaagggcgtggacctgagaaacgcccaggtgaccgagctgctgcagagactgctgcacagagccttcgtggtggagacccagccctgcatgccccagaccccccacagacccctgatcctgaagaccggcagcaagttcaccgtgagaaccagactgctggtgagactgcaggagggcaacgagagcctgaccgtggaggtgagcatcgacagaaaccccccccagctgcagggcttcagaaagttcaacatcctgaccagcaaccagaagaccctgacccccgagaagggccagagccagggcctgatctgggacttcggctacctgaccctggtggagcagagaagcggcggcagcggcaagggcagcaacaagggccccctgggcgtgaccgaggagctgcacatcatcagcttcaccgtgaagtacacctaccagggcctgaagcaggagctgaagaccgacaccctgcccgtggtgatcatcagcaacatgaaccagctgagcatcgcctgggccagcgtgctgtggttcaacctgctgagccccaacctgcagaaccagcagttcttcagcaacccccccaaggccccctggagcctgctgggccccgccctgagctggcagttcagcagctacgtgggcagaggcctgaacagcgaccagctgagcatgctgagaaacaagctgttcggccagaactgcagaaccgaggaccccctgctgagctgggccgacttcaccaagagagagagcccccccggcaagctgcccttctggacctggctggacaagatcctggagctggtgcacgaccacctgaaggacctgtggaacgacggcagaatcatgggcttcgtgagcagaagccaggagagaagactgctgaagaagaccatgagcggcaccttcctgctgagattcagcgagagcagcgagggcggcatcacctgcagctgggtggagcaccaggacgacgacaaggtgctgatctacagcgtgcagccctacaccaaggaggtgctgcagagcctgcccctgaccgagatcatcagacactaccagctgctgaccgaggagaacatccccgagaaccccctgagattcctgtaccccagaatccccagagacgaggccttcggctgctactaccaggagaaggtgaacctgcaggagagaagaaagtacctgaagcacagactgatcgtggtgagcaacagacaggtggacgagctgcagcagcccctggagctgaagcccgagcccgagctggagagcctggagctggagctgggcctggtgcccgagcccgagctgagcctggacctggagcccctgctgaaggccggcctggacctgggccccgagctggagagcgtgctggagagcaccctggagcccgtgatcgagcccaccctgtgcatggtgagccagaccgtgcccgagcccgaccagggccccgtgagccagcccgtgcccgagcccgacctgccctgcgacctgagacacctgaacaccgagcccatggagatcttcagaaactgcgtgaagatcgaggagatcatgcccaacggcgaccccctgctggccggccagaacaccgtggacgaggtgtacgtgagcagacccagccacttctacaccgacggccccctgatgcccagcgacttctag

SEQ ID NO: 259619 - DNA, 2544 bp, Artificial Sequence
  derived and/or modified sequence
atggcccagtgggaaatgctccagaacttggactcgccgttccaagatcagttgcaccagttgtactctcactcattacttcccgtggacattcggcaatatctggccgtgtggattgaagaccagaactggcaggaagcggcgctgggctcagatgactctaaggcgacgatgctgttcttccatttcttggatcagctcaactatgagtgcggacgctgctcgcaggacccagagagtctgctgctgcagcataacctgcggaagttttgcagagacatccaggacccaacccagctggcagagatgattttcaacttattactggaggagaaaagaatcctgattcaggcccagcgcgcccagctggagcagggcgagccagttctggagacacctgtggaatctcaacagcatgagatcgagagccggatcctcgatctaagggctatgatggaaaaactggtgaaaagcatctctcagctgaaagaccagcaggacgtgttctgttttcgctacaagattcaagccaagggcaagacccctagccttgacccccatcaaacaaaggaacagaagatcttgcaggagacattgaatgaacttgacaaacgcagaaaagaagtgttggacgcctccaaagcgttgctcggcaggctgacaacactgattgagctcctgctgcctaagttagaagagtggaaagcacagcagcaaaaggcctgcattcgtgccccgatcgatcacggccttgaacagctggagacctggtttacagccggcgcaaagctgttgtttcacctgaggcaactgttgaaggagcttaaaggactgtcgtgccttgtgtcctatcaggatgaccccttaactaaaggggtggacctgagaaacgctcaggtgaccgaactgctgcaacggctgctgcaccgggccttcgttgtcgaaacccagccgtgtatgccccaaacaccacatagaccccttatactaaagaccgggagtaagttcacggtccgcacacgtctattggttaggctccaggaagggaacgaatctttgacagtggaagtctccattgatcggaatcccccccagttgcaaggttttcgaaagtttaatatcctcactagtaaccaaaagaccctgaccccagagaagggacagtctcagggcctgatctgggacttcggatacctcaccctcgttgaacagcggtctggcggatcaggcaagggcagcaataaggggccattgggggtgaccgaggagctacatatcattagctttacagtgaagtacacctaccaagggctgaaacaggagctgaaaactgacacgttaccagtggtaatcatctctaacatgaaccagctgtctattgcctgggccagtgttctgtggttcaacctgctgtctcccaacctgcagaatcagcagtttttcagcaaccccccgaaggccccatggagcctcttgggaccagcactgtcctggcagttctcaagctacgtgggacggggcctgaatagtgatcagctctcaatgttaaggaataaactgtttgggcagaattgccgaacagaggatcctctgttgtcttgggccgattttaccaagcgtgagagcccccccggaaagctgcccttttggacctggctggataaaatcctcgaactcgttcacgatcacttgaaagatctttggaatgacgggagaattatgggctttgtctccaggagccaggagaggcggttactgaagaagacaatgtcgggaacctttcttctgcggttttctgagagttccgagggcggtattacatgtagctgggtggagcatcaagacgacgacaaggtgctcatctatagcgtgcagccttacacgaaggaggtgcttcagtccttgcccctcactgagatcattaggcactaccagctgcttacggaagagaacattcccgaaaatcccctccggttcctgtatccgcggatccctcgtgatgaagcatttggctgttactaccaggagaaggtcaatctccaggagcgccgcaagtacctgaagcatcgcttaattgttgtgtccaatcgccaggtcgacgagcttcaacagccgttagagctaaagcctgagcccgaactagaatccctcgagctggagctgggcctggtccccgaacccgagctgtccctggatttagagcccctgctgaaggcggggctggaccttggcccggagctagagtcagtacttgagtcaactttggaaccagtcatcgaacccactctatgcatggtctctcagactgtgcccgagcccgaccaaggcccggtctctcagcccgtgcccgagcccgacctcccgtgtgacctcaggcacctaaacaccgaacctatggaaatatttagaaactgtgtgaagattgaggaaatcatgccaaatggagacccgttgctggctgggcaaaatactgtcgatgaagtctacgtgagtagaccgtcacatttctataccgacggccctctcatgccatccgacttttag

SEQ ID NO: 259620 - DNA, 2544 bp, Artificial Sequence
  derived and/or modified sequence
atggcccagtgggagatgctgcagaacctggacagccccttccaggaccagctgcaccagctgtacagccacagcctgctgcctgtggacatccggcagtacctggccgtgtggattgaggaccagaactggcaggaggccgccctgggcagtgatgacagcaaggccaccatgctgttcttccacttcctggaccagctgaactatgaatgtggccgctgcagccaggaccctgagagcctgctgctgcagcacaacctgaggaagttctgccgggacatccaggaccccacccagctggccgagatgatcttcaacctgctgctggaggagaagaggatcctgatccaggcccagagggcccagctggagcagggcgagcctgtgctggagacccctgtggagagccagcagcatgaaattgagagccgcatcctggacctgcgggccatgatggagaagctggtgaagagcatcagccagctgaaggaccagcaggatgtgttctgcttccgctacaagatccaggccaagggcaagacccccagcctggacccccaccagaccaaggagcagaagatcctgcaggagaccctgaatgagctggacaagaggaggaaggaggtgctggatgccagcaaggccctgctgggccgcctgaccaccctcatcgagctgctgctgcccaagctggaggagtggaaggcccagcagcagaaggcctgcatccgggcccccatcgaccacggcctggagcagctggagacctggttcaccgctggggccaagctgctcttccacctgcggcagctgctgaaggagctgaagggcctgagctgcctggtgtcctaccaggatgaccccctgaccaagggcgtggacctgagaaatgcccaggtgacagagctgctgcagaggctgctgcaccgggcctttgtggtggagacccagccctgcatgccccagaccccccaccggcccctcatcctgaagacaggcagcaagttcaccgtgaggacccggctgctggtgcggctgcaggagggcaatgaaagcctgactgtggaggtgtccattgacagaaatccaccccagctgcagggcttcaggaagttcaacatcctgaccagcaaccagaagaccctgaccccagagaagggccagagccagggcctcatctgggactttggctacctgaccctggtggagcagaggtctgggggcagcggcaagggcagcaacaagggccccctgggcgtgacagaggagctgcacatcatctccttcaccgtgaagtacacctaccagggcctgaagcaggagctgaagacagacaccctgcctgtggtgatcatcagcaacatgaaccagctgagcatcgcctgggcctctgtgctgtggttcaacctgctgagccccaacctgcagaaccagcagttcttcagcaacccccccaaggccccctggagcctgctgggccctgccctgtcctggcagttcagcagctatgtgggccggggcctgaacagcgaccagctgtccatgctgaggaacaagctgtttggccagaactgcaggacagaggaccccctgctgtcctgggccgacttcaccaagcgggagagccccccaggcaagctgcccttctggacctggctggacaagatcctggagctggtgcatgaccacctgaaggacctgtggaatgatggccgcatcatgggctttgtgagccgcagccaggagcggcggctgctgaagaagaccatgagcggcaccttcctgctgcgcttcagcgagagcagcgagggcggcatcacctgctcctgggtggagcaccaggatgatgacaaggtgctgatctacagcgtgcagccctacaccaaggaggtgctgcagagcctgcccctgacagagatcatccgccactaccagctgctgacagaggagaacatccctgagaaccccctgcgcttcctgtacccccgcatccccagagatgaggccttcggctgctactaccaggagaaggtgaacctgcaggagaggaggaagtacctgaagcacaggctcatcgtggtgagcaaccggcaggtggatgagctgcagcagcccctggagctgaagccagagcctgagctggagagcctggagctggagctgggcctggtgcctgagcctgagctgagcctggacctggagcccctgctgaaggccggcctggacctgggccctgagctggagagcgtgctggagagcaccctggagcctgtgattgagcccaccctgtgcatggtgtcccagacagtgcctgagccagaccagggccctgtgtcccagcctgtgcctgagccagacctgccctgtgacctgcggcacctgaacacagagcccatggagatcttcaggaactgtgtgaagattgaggagatcatgcccaacggggaccccctgctggccggccagaacacagtggatgaggtgtatgtgtcccggcccagccacttctacacagatggccccctgatgcccagcgacttctag

SEQ ID NO: 259621 - DNA, 2544 bp, Artificial Sequence
  derived and/or modified sequence
atggcccagtgggagatgctgcagaacctggacagccccttccaggaccagttacaccaactgtattctcactcgctgttgcctgtagacatccgacagtatctggcagtgtggattgaggatcagaactggcaagaggcggccttggggtcagacgattcaaaagccaccatgctgtttttccacttcctggatcagctgaattacgagtgtggacggtgttcgcaggatcccgagagcctcctactgcagcacaatctccgcaagttttgcagagacatccaagatcctacccagttggctgagatgatattcaacttgctgctggaagagaaacgcatattaatacaagcgcagcgcgctcaactggagcaaggggaaccagtgctagaaacccctgtggaatcccaacagcatgaaattgaatcaagaatcctcgatctacgagctatgatggaaaaactggtcaagtcgatcagccaacttaaggatcagcaggacgttttctgttttagatataagattcaggctaaaggcaagacaccaagcctcgatccccatcagactaaagaacagaagattctccaggagaccctgaacgaactggataagcgcagaaaggaggtgttggacgcctcaaaagctctattgggacgtctgacgacgctgatagaactcctgttgcccaaactcgaggaatggaaagcgcagcaacagaaggcatgcatacgtgccccgatagaccacggcttggagcagctggagacatggtttacagctggcgccaagctccttttccaccttcggcagctcctgaaagaactgaaaggcctgtcgtgtctcgtgagctaccaggatgatcccctcacaaagggggtggacttgcgcaatgcgcaggtaaccgagctgttgcaacgtttgcttcacagagcctttgtagtagagacccagccatgcatgccccagacccctcacagacctttaatcttaaaaaccgggtccaagttcaccgtgagaacccggttactcgttcgattgcaggagggtaatgaatccctcaccgtcgaggtgagcatcgacagaaatccaccacaactccagggcttccggaagttcaatatactaactagtaatcaaaagaccctgacacccgagaagggccagagccaggggctgatctgggactttggctatttgaccctggtggagcaaagaagcggaggctctggcaaggggtctaacaaagggcccctgggcgttacagaggaactgcacatcatatctttcaccgtaaagtacacatatcagggacttaagcaagaattgaaaactgacacattgcccgtggtgatcatctctaacatgaaccaactgagcattgcgtgggccagcgtgctctggtttaacctcttaagccccaatctccagaatcagcaatttttttctaatcccccaaaggctccatggtcacttctgggaccggcactgagctggcagtttagttcctacgtcgggagagggctcaactcggatcagctgtccatgctgcggaacaagttgttcggtcagaattgcagaacagaggatccgctgttgtcctgggccgatttcacaaagcgtgagagtccccctgggaaactcccattctggacttggttggacaagatcctggagctagtgcacgaccacctgaaagatctttggaatgacgggaggatcatgggcttcgtttccagaagtcaggagcgcagactgctgaaaaaaaccatgtcgggcacattcttactgcgtttcagcgagtccagcgaagggggaattacttgttcgtgggtggagcaccaggacgatgataaagtgctcatttatagcgtacagccctacaccaaggaggtgttacagtcactgcccctgaccgaaatcattaggcactaccagttgcttacagaagaaaacattccagaaaacccgctccggtttctctacccacgcattccacgggatgaagcctttggctgctactaccaggagaaggtgaacctgcaggaaaggaggaagtacctcaaacacaggctgatcgtcgtgtcaaaccggcaggttgacgagcttcagcagccattagaactcaagccagagccagaacttgagtcactcgaactggagctgggcctggtccccgagccagagctctctctcgacctggaacctctcttgaaggccggcttggacctgggacctgagctggagagcgtactcgagtccacattggagccagtgatcgaacccacgctgtgcatggtgagtcagaccgtcccagaaccagatcagggaccggtaagtcagcctgtgcccgaacctgacctgccctgcgatctgaggcatctcaacactgaacctatggagatttttcggaattgcgtgaaaattgaggagattatgccaaatggcgacccccttcttgcaggccagaacaccgtggatgaggtttatgtctctaggccttcccatttctacacagatggacccctaatgccgagtgacttttag

SEQ ID NO: 259622 - DNA, 2544 bp, Artificial Sequence
  derived and/or modified sequence
atggcacagtgggagatgttacagaacctggacagcccctttcaagaccaactccaccagctgtacagtcacagtctcctccccgtagacatccgccagtacctagcagtgtggattgaagatcaaaattggcaagaggccgcactagggagtgatgatagcaaagccaccatgctgttttttcacttccttgaccagctcaactacgagtgtggaagatgctcccaggaccccgagagtttactactccagcataacctgcggaagttctgtagggacatacaagacccgactcagctggctgagatgatcttcaatcttctcctcgaagagaagcggatcctgatccaggcacaaagagctcagctagaacaaggtgagcctgttctggagacccctgtggagagccagcagcatgaaattgagtcacggattctcgacctccgggcaatgatggaaaagttggtgaagtctatttcgcagcttaaggatcagcaggacgtgttttgtttcaggtacaaaatccaggctaaagggaagactcctagcctggatccccaccagaccaaggaacagaaaatcctccaggaaacgctaaacgagttggacaagcgcaggaaggaggtgctggacgcatctaaggctctgctcgggcgtctgaccacgcttatcgaacttctgcttccaaaactggaggaatggaaagcccagcagcagaaagcctgcatccgagcccctatcgatcatgggctggagcagctcgagacctggttcacagccggagccaaattgcttttccatctgcggcaactgctgaaagagctcaagggtctgtcctgccttgtgtcttatcaggatgacccattgaccaaaggtgtcgacctgcggaacgcacaggtgaccgagcttcttcaacggctgctgcaccgggctttcgtggtggaaacacaaccgtgtatgccgcagaccccccaccgtcctctgattttaaagacaggcagcaaattcacagtgcgcacacgtcttctggtgagactccaagaaggaaacgagagccttaccgttgaggtgagcatcgatcgtaaccccccacagctgcagggattccgaaaatttaacattctgactagcaaccagaagaccctgacgcccgaaaagggacagtcccaagggctcatctgggactttggatatttaaccctggtcgagcaacggagcgggggatcgggaaagggctctaataagggtcctcttggagtgacagaagagctccacattatctccttcactgtgaagtatacataccaaggcctgaaacaggagctgaaaactgataccctgcccgtcgttattatttctaatatgaaccagctctccattgcctgggccagcgtgctgtggtttaaccttctttcacctaatctgcagaatcagcagtttttttccaacccccctaaggccccatggagtctactgggcccagccctcagttggcagttctcttcctatgttggaagaggtttaaactctgaccaactatccatgctgagaaacaagctttttggccagaattgccgcactgaggatcctctgttaagctgggccgatttcactaagcgggagagcccacccggaaagctgccattttggacatggctagacaagattttggaactcgtccatgaccatctgaaagatctgtggaacgacggcaggatcatgggcttcgttagcaggtcccaggagagacgcctgcttaagaagaccatgagcggcacgtttctgcttcgattcagtgagagctcggaaggcggtatcacatgcagctgggtagagcaccaggacgacgacaaagtacttatttacagtgtgcagccatacaccaaggaggttttacaatcccttccactgacagagataatacgccattaccagttgctaactgaggaaaacatccctgaaaatcctctgcgatttttatatcctaggatcccgagagatgaggctttcgggtgctactaccaggaaaaggtcaacctgcaggagaggcggaagtacctgaagcatcggctcatcgttgtgagcaatcgccaggttgatgagttacaacagccgctggagctgaaacctgagcctgaactggagagcttggagttagagcttggactcgttcctgagcccgagctgtctctggatctagagccccttcttaaggctgggttggacctgggtcccgagctggaatccgtgcttgaaagtacgctagagccagttattgagcccaccttgtgcatggtttcacagactgttcccgaacctgatcagggaccagtgtctcagcccgtgcctgagccggacttaccgtgcgacctgaggcatttgaataccgagccaatggagattttcaggaattgcgtgaaaatcgaagagatcatgcctaacggagatcccctcctggccggacaaaacaccgtggatgaggtgtacgtgtctcgcccatctcacttttataccgacggcccactgatgcccagcgatttctag

SEQ ID NO: 259623 - DNA, 3073 bp, Artificial Sequence
  derived and/or modified sequence
agctcatactagggacgggaagtcgcgaccagagccattggagggcgcggggactgcaaccctaatcagagcccaaatggcgcagtgggaaatgctgcagaatcttgacagcccctttcaggatcagctgcaccagctttactcgcacagcctcctgcctgtggacattcgacagtacttggctgtctggattgaagaccagaactggcaggaagctgcacttgggagtgatgattccaaggctaccatgctattcttccacttcttggatcagctgaactatgagtgtggccgttgcagccaggacccagagtccttgttgctgcagcacaatttgcggaaattctgccgggacattcaggatcctacccagttggctgagatgatctttaacctccttctggaagaaaaaagaattttgatccaggctcagagggcccaattggaacaaggagagccagttctcgaaacacctgtggagagccagcaacatgagattgaatcccggatcctggatttaagggctatgatggagaagctggtaaaatccatcagccaactgaaagaccagcaggatgtcttctgcttccgatataagatccaggccaaagggaagacaccctctctggacccccatcagaccaaagagcagaagattctgcaggaaactctcaatgaactggacaaaaggagaaaggaggtgctggatgcctccaaagcactgctaggccgattaactaccctaatcgagctactgctgccaaagttggaggagtggaaggcccagcagcaaaaagcctgcatcagagctcccattgaccacgggttggaacagctggagacatggttcacagctggagcaaagctgttgtttcacctgaggcagctgctgaaggagctgaagggactgagttgcctggttagctatcaggatgaccctctgaccaaaggggtggacctacgcaacgcccaggtcacagagttgctacagcgtctgctccacagagcctttgtggtagaaacccagccctgcatgccccaaactccccatcgacccctcatcctcaagactggcagcaagttcaccgtccgaacaaggctgctggtgagactccaggaaggcaatgagtcactgactgtggaagtctccattgacaggaatcctcctcaattacaaggcttccggaagttcaacattctgacttcaaaccagaaaactttgacccccgagaaggggcagagtcagggtttgatttgggactttggttacctgactctggtggagcaacgttcaggtggttcaggaaagggcagcaataaggggccactaggtgtgacagaggaactgcacatcatcagcttcacggtcaaatatacctaccagggtctgaagcaggagctgaaaacggacaccctccctgtggtgattatttccaacatgaaccagctctcaattgcctgggcttcagttctctggttcaatttgctcagcccaaaccttcagaaccagcagttcttctccaacccccccaaggccccctggagcttgctgggccctgctctcagttggcagttctcctcctatgttggccgaggcctcaactcagaccagctgagcatgctgagaaacaagctgttcgggcagaactgtaggactgaggatccattattgtcctgggctgacttcactaagcgagagagccctcctggcaagttaccattctggacatggctggacaaaattctggagttggtacatgaccacctgaaggatctctggaatgatggacgcatcatgggctttgtgagtcggagccaggagcgccggctgctgaagaagaccatgtctggcacctttctactgcgcttcagtgaatcgtcagaagggggcattacctgctcctgggtggagcaccaggatgatgacaaggtgctcatctactctgtgcaaccgtacacgaaggaggtgctgcagtcactcccgctgactgaaatcatccgccattaccagttgctcactgaggagaatatacctgaaaacccactgcgcttcctctatccccgaatcccccgggatgaagcttttgggtgctactaccaggagaaagttaatctccaggaacggaggaaatacctgaaacacaggctcattgtggtctctaatagacaggtggatgaactgcaacaaccgctggagcttaagccagagccagagctggagtcattagagctggaactagggctggtgccagagccagagctcagcctggacttagagccactgctgaaggcagggctggatctggggccagagctagagtctgtgctggagtccactctggagcctgtgatagagcccacactatgcatggtatcacaaacagtgccagagccagaccaaggacctgtatcacagccagtgccagagccagatttgccctgtgatctgagacatttgaacactgagccaatggaaatcttcagaaactgtgtaaagattgaagaaatcatgccgaatggtgacccactgttggctggccagaacaccgtggatgaggtttacgtctcccgccccagccacttctacactgatggacccttgatgccttctgacttctaggaaccacatttcctctgttcttttcatatctcttgcccttcctactcctcatagcatgatattgttctccaaggatgggaatcaggcatgtgtcccttccaagctgtgttaactgttcaaactcaggcctgtgtgactccattggggtgagaggtgaaagcataacatgggtacagaggggacaacaatgaatcagaacagatgctgagccataggtctaaataggatcctggaggctgcctgctgtgctgggaggtataggggtcctgggggcaggccagggcagttgacaggtacttggagggctcagggcagtggcttctttccagtatggaaggatttcaacattttaatagttggttaggctaaactggtgcatactggcattggcccttggtggggagcacagacacaggataggactccatttctttcttccattccttcatgtct

SEQ ID NO: 259624 - protein, 944 aa, Artificial Sequence
  derived and/or modified sequence
MAAVAAVAARRRRSWASLVLAFLGVCLGITLAVDRSNFKTCEESSFCKRQRSIRPGLSPYRALLDSLQLGPDSLTVHLIHEVTKVLLVLELQGLQKNMTRFRIDELEPRRPRYRVPDVLVADPPIARLSVSGRDENSVELTMAEGPYKIILTARPFRLDLLEDRSLLLSVNARGLLEFEHQRAPRVSQGSKDPAEGDGAQPEETPRDGDKPEETQGKAEKDEPGAWEETFKTHSDSKPYGPMSVGLDFSLPGMEHVYGIPEHADNLRLKVTEGGEPYRLYNLDVFQYELYNPMALYGSVPVLLAHNPHRDLGIFWLNAAETWVDISSNTAGKTLFGKMMDYLQGSGETPQTDVRWMSETGIIDVFLLLGPSISDVFRQYASLTGTQALPPLFSLGYHQSRWNYRDEADVLEVDQGFDDHNLPCDVIWLDIEHADGKRYFTWDPSRFPQPRTMLERLASKRRKLVAIVDPHIKVDSGYRVHEELRNLGLYVKTRDGSDYEGWCWPGSAGYPDFTNPTMRAWWANMFSYDNYEGSAPNLFVWNDMNEPSVFNGPEVTMLKDAQHYGGWEHRDVHNIYGLYVHMATADGLRQRSGGMERPFVLARAFFAGSQRFGAVWTGDNTAEWDHLKISIPMCLSLGLVGLSFCGADVGGFFKNPEPELLVRWYQMGAYQPFFRAHAHLDTGRREPWLLPSQHNDIIRDALGQRYSLLPFWYTLLYQAHREGIPVMRPLWVQYPQDVTTFNIDDQYLLGDALLVHPVSDSGAHGVQVYLPGQGEVWYDIQSYQKHHGPQTLYLPVTLSSIPVFQRGGTIVPRWMRVRRSSECMKDDPITLFVALSPQGTAQGELFLDDGHTFNYQTRQEFLLRRFSFSGNTLVSSSADPEGHFETPIWIERVVIIGAGKPAAVVLQTKGSPESRLSFQHDPETSVLVLRKPGINVASDWSIHLR

SEQ ID NO: 259625 - protein, 847 aa, Artificial Sequence
  derived and/or modified sequence
MTRFRIDELEPRRPRYRVPDVLVADPPIARLSVSGRDENSVELTMAEGPYKIILTARPFRLDLLEDRSLLLSVNARGLLEFEHQRAPRVSQGSKDPAEGDGAQPEETPRDGDKPEETQGKAEKDEPGAWEETFKTHSDSKPYGPMSVGLDFSLPGMEHVYGIPEHADNLRLKVTEGGEPYRLYNLDVFQYELYNPMALYGSVPVLLAHNPHRDLGIFWLNAAETWVDISSNTAGKTLFGKMMDYLQGSGETPQTDVRWMSETGIIDVFLLLGPSISDVFRQYASLTGTQALPPLFSLGYHQSRWNYRDEADVLEVDQGFDDHNLPCDVIWLDIEHADGKRYFTWDPSRFPQPRTMLERLASKRRKLVAIVDPHIKVDSGYRVHEELRNLGLYVKTRDGSDYEGWCWPGSAGYPDFTNPTMRAWWANMFSYDNYEGSAPNLFVWNDMNEPSVFNGPEVTMLKDAQHYGGWEHRDVHNIYGLYVHMATADGLRQRSGGMERPFVLARAFFAGSQRFGAVWTGDNTAEWDHLKISIPMCLSLGLVGLSFCGADVGGFFKNPEPELLVRWYQMGAYQPFFRAHAHLDTGRREPWLLPSQHNDIIRDALGQRYSLLPFWYTLLYQAHREGIPVMRPLWVQYPQDVTTFNIDDQYLLGDALLVHPVSDSGAHGVQVYLPGQGEVWYDIQSYQKHHGPQTLYLPVTLSSIPVFQRGGTIVPRWMRVRRSSECMKDDPITLFVALSPQGTAQGELFLDDGHTFNYQTRQEFLLRRFSFSGNTLVSSSADPEGHFETPIWIERVVIIGAGKPAAVVLQTKGSPESRLSFQHDPETSVLVLRKPGINVASDWSIHLR

SEQ ID NO: 259626 - DNA, 2835 bp, Artificial Sequence
  derived and/or modified sequence
atggccgccgtagccgctgtggccgctcgtcggagaaggagctgggcctccctagtgttggccttcctgggcgtgtgtctgggtatcaccctggcggtcgaccggtccaatttcaagacctgtgaggagtcctcattttgtaaacgacaacgatccattcgtccaggtctgtccccgtacagggcccttctcgatagcctgcagttgggtccggattctcttaccgtgcaccttatccacgaggtgactaaagtgctcctcgtgctcgagcttcagggcctacagaagaacatgacacgcttccgcatcgatgagctggaaccccggagacctcgctatcgagttccggacgtgctagtcgccgaccctcccatcgcccgactctcagtgagtggccgggatgagaatagtgtcgagctcactatggctgagggaccttacaagatcattcttactgcacgaccctttagactggacctcttagaagatagaagcctgctgcttagtgtgaatgcgcgcggattgctggagtttgagcaccagcgggcgcccagggttagccagggctcaaaagaccccgctgagggagacggcgcgcagccggaggaaacacctcgcgacggtgacaaaccagaggagacacaggggaaagccgaaaaagacgaaccaggagcttgggaagaaacattcaagacccattccgactcaaaaccatacggccccatgtcagtcggactggactttagcttgcctggcatggagcacgtgtatgggattccggaacacgcagacaacctcagactcaaggtgaccgaaggaggggagccgtaccgcctctacaatttagacgtatttcaatacgaactgtacaacccgatggctttatacgggagcgttcctgttctgctcgcccacaatcctcaccgtgacctggggatcttctggttgaacgcggccgagacatgggtggatatcagctccaacacggcgggaaaaaccctctttggcaagatgatggactacctgcaaggctctggagagactccacagaccgatgtgcgttggatgagcgagacgggaatcatcgacgtgttcttgttgttaggcccttcaatatcagacgtgtttaggcagtacgcgtctcttacaggaacacaggctctccccccattgttttccctcgggtaccaccagagccggtggaactatagagatgaggcagatgtgctcgaagtcgaccaggggttcgatgaccacaacctgccatgcgatgtaatatggctggatatcgaacacgctgacggcaagcgctacttcacttgggacccttccaggtttccccaaccgaggaccatgcttgaaaggctggcctcaaaaagacgcaagttagtggccatcgttgatccccatattaaagtcgatagtgggtacagggtgcacgaggaattgaggaacctgggactgtacgttaaaacgagggacggaagtgattacgaggggtggtgctggccaggatccgccggatatcctgatttcacaaaccccactatgcgggcctggtgggctaacatgtttagctacgacaactatgaaggctctgctcccaatttgttcgtctggaatgatatgaatgaaccgtcggtgtttaacgggccagaagtcactatgctaaaagacgctcaacactacggagggtgggagcaccgggacgtacataacatatatggcctctatgtccacatggcgacagccgacggtttaagacagagatctggggggatggaacgacctttcgttctggccagagccttcttcgccggatcacaacggtttggagctgtctggacaggagataacaccgcagagtgggatcacctgaagatcagtatcccaatgtgtctttcactcggcctggttgggttgtcattctgcggtgccgatgtagggggcttcttcaagaatcccgagcccgagctgcttgtccgatggtatcaaatgggcgcgtaccaaccctttttcagagctcatgcgcatctggataccggccggcgcgagccttggctgctccctagtcaacacaacgatataattcgggacgctttgggacagaggtacagcctgctccccttttggtataccttgctctaccaggcacaccgcgagggcatccctgtgatgcggccactctgggtgcaatacccccaggatgtgacaacctttaacatcgatgaccagtatctccttggggacgccctgctggttcaccccgtcagcgacagcggggcacatggggtgcaggtttatctgcccgggcagggagaggtttggtacgatatacaaagctatcagaagcatcacggtccacagaccctatacctgcccgtcacattgtcgagtattcccgtctttcagcgcggaggaactatcgttccgcggtggatgagggtgagacgcagcagcgaatgtatgaaagatgaccccataactctgttcgtggctttatctccccaagggactgcacagggagagctatttctggacgatggacacacattcaactaccagaccaggcaggagttcttgttgcggcggtttagcttctccggaaataccttggttagctcgtccgcagatcctgagggacattttgagactccaatctggatcgagcgcgttgtgatcattggcgcgggaaagcccgccgctgtggtgttacagacaaagggctccccagaatcaagactcagcttccaacatgaccccgaaacatcggtgcttgtgctgagaaaacctgggataaacgtcgcttcagactggtctatccatcttcggtag

SEQ ID NO: 259627 - DNA, 3608 bp, Artificial Sequence
  derived and/or modified sequence
agcaaactctgcacaagatggcggcggtagcggcagtggcggcgcgtaggaggcggtcttgggcgtctttggtactggcttttttaggggtctgcctggggattacccttgctgtggatagaagcaactttaagacctgtgaagagagttctttctgcaagcgacagagaagcatacggccaggcctctctccataccgagccttgctggactctctacagcttggtcctgattccctcacggtccatctgatccatgaggtcaccaaggtgttgctggtgctagagcttcaggggcttcaaaagaacatgactcggttcaggattgatgagctggagcctcggcgaccccgataccgtgtaccagatgttttggtggctgatccaccaatagcccggctttctgtctctggtcgtgatgagaacagtgtggagttaaccatggctgagggaccctacaagatcatcttgacagcacggccattccgccttgacctactagaggaccgaagtcttttgcttagtgtcaatgcccgaggactcttggagtttgagcatcagagggcccctagggtctcgcaaggatcaaaagacccagctgagggcgatggggcccagcctgaggaaacacccagggatggcgacaagccagaggagactcaggggaaggcagagaaagatgagccaggagcctgggaggagacattcaaaactcactctgacagcaagccgtatggccccatgtctgtgggtttggacttctctctgccaggcatggagcatgtctatgggatccctgagcatgcagacaacctgaggctgaaggtcactgagggtggggagccatatcgcctctacaatttggatgtgttccagtatgagctgtacaacccaatggccttgtatgggtctgtgcctgtgctcctggcacacaaccctcatcgcgacttgggcatcttctggctcaatgctgcagagacctgggttgatatatcttccaacactgccgggaagaccctgtttgggaagatgatggactacctgcagggctctggggagaccccacagacagatgttcgctggatgtcagagactggcatcattgacgtcttcctgctgctggggccctccatctctgatgttttccggcaatatgctagtctcacaggaacccaggcgttgcccccactcttctccctcggctaccaccagagccgttggaactaccgggacgaggctgatgtgctggaagtggatcagggctttgatgatcacaacctgccctgtgatgtcatctggctagacattgaacatgctgatggcaagcggtatttcacctgggaccccagtcgcttccctcagccccgcaccatgcttgagcgcttggcttctaagaggcggaagctggtggccatcgtagacccccacatcaaggtggactccggctaccgagttcacgaggagctgcggaacctggggctgtatgttaaaacccgggatggctctgactatgagggctggtgctggccaggctcagctggttaccctgacttcactaatcccacgatgagggcctggtgggctaacatgttcagctatgacaattatgagggctcagctcccaacctctttgtctggaatgacatgaacgaaccatctgtgttcaatggtcctgaggtcaccatgctcaaggatgcccagcattatgggggctgggagcaccgggatgtgcataacatctatggcctttatgtgcacatggcgactgctgatgggctgagacagcgctctgggggcatggaacgcccctttgtcctggccagggccttcttcgctggctcccagcgctttggagccgtgtggacaggggacaacactgccgagtgggaccatttgaagatctctattcctatgtgtctcagcttggggctggtgggactttccttctgtggggcggatgtgggtggcttcttcaaaaacccagagccagagctgcttgtgcgctggtaccagatgggtgcttaccagccattcttccgggcacatgcccacttggacactgggcgacgagagccatggctgttaccatctcagcacaatgatataatccgagatgccttgggccagcgatattctttgctgcccttctggtacaccctcttatatcaggcccatcgggaaggcattcctgtcatgaggcccctgtgggtgcagtaccctcaggatgtgactaccttcaatatagatgatcagtacttgcttggggatgcgttgctggttcaccctgtatcagactctggagcccatggtgtccaggtctatctgcctggccaaggggaggtgtggtatgacattcaaagctaccagaagcatcatggtccccagaccctgtacctgcctgtaactctaagcagtatccctgtgttccagcgtggagggacaatcgtgcctcgatggatgcgagtgcggcggtcttcagaatgtatgaaggatgaccccatcactctctttgttgcacttagccctcagggtacagctcaaggagagctctttctggatgatgggcacacgttcaactatcagactcgccaagagttcctgctgcgtcgattctcattctctggcaacacccttgtctccagctcagcagaccctgaaggacactttgagacaccaatctggattgagcgggtggtgataataggggctggaaagccagcagctgtggtactccagacaaaaggatctccagaaagccgcctgtccttccagcatgaccctgagacctctgtgttggtcctgcgcaagcctggcatcaatgtggcatctgattggagtattcacctgcgataacccaagggatgttctgggttagggggagggaaggggagcattagtgctgagagatattctttcttctgccttggagttcggccctccccagacttcacttatgctagtctaagacccagattctgccaacatttgggcaggatgagagggctgaccctgggctccaaattcctcttgtgatctcctcacctctcccactccattgataccaactctttcccttcattcccccaacatcctgttgctctaactggagcacattcacttacgaacaccaggaaaccacagggcccttgtcgccccttctctttcccttatttaggagccctgaactcccccagagtctatccattcatgcctcttgtatgttgatgccacttcttggaagaagatgagggcaatgagttagggctccttttccccttccctcccaccagattgctctcccacctttcatttcttcctccaggctttactcccctttttatgccccaccgatacactgggaccaccccttaccccggacaggatgaatggatcaaaggagtgaggttgctaaagaacatccttttccctctcattctacccttttcctctccccgattccttgtagagctgctgcaattcttagaggggcagttctacctcctctgtccctcggcagaaagacgtttccacacctcttaggggatgcgcattaaacttcttttgcccccttcttgtcccctttgaggggcacttaagatggagaaatca

SEQ ID NO: 259628 - DNA, 2749 bp, Artificial Sequence
  derived and/or modified sequence
tctgcacaagatggcggcggtagcggcagtggcggcgcgtaggaggcggtcttgggcgtctttggtactggcttttttaggggtctgcctggggattacccttgctgtggatagaagcaactttaagacctgtgaagagagttctttctgcaagtgttgctggtgctagagcttcaggggcttcaaaagaacatgactcggttcaggattgatgagctggagcctcggcgaccccgataccgtgtaccagatgttttggtggctgatccaccaatagcccggctttctgtctctggtcgtgatgagaacagtgtggagttaaccatggctgagggaccctacaagatcatcttgacagcacggccattccgccttgacctactagaggaccgaagtcttttgcttagtgtcaatgcccgaggactcttggagtttgagcatcagagggcccctagggtctcgcaaggatcaaaagacccagctgagggcgatggggcccagcctgaggaaacacccagggatggcgacaagccagaggagactcaggggaaggcagagaaagatgagccaggagcctgggaggagacattcaaaactcactctgacagcaagccgtatggccccatgtctgtgggtttggacttctctctgccaggcatggagcatgtctatgggatccctgagcatgcagacaacctgaggctgaaggtcactgagggtggggagccatatcgcctctacaatttggatgtgttccagtatgagctgtacaacccaatggccttgtatgggtctgtgcctgtgctcctggcacacaaccctcatcgcgacttgggcatcttctggctcaatgctgcagagacctgggttgatatatcttccaacactgccgggaagaccctgtttgggaagatgatggactacctgcagggctctggggagaccccacagacagatgttcgctggatgtcagagactggcatcattgacgtcttcctgctgctggggccctccatctctgatgttttccggcaatatgctagtctcacaggaacccaggcgttgcccccactcttctccctcggctaccaccagagccgttggaactaccgggacgaggctgatgtgctggaagtggatcagggctttgatgatcacaacctgccctgtgatgtcatctggctagacattgaacatgctgatggcaagcggtatttcacctgggaccccagtcgcttccctcagccccgcaccatgcttgagcgcttggcttctaagaggcggaagctggtggccatcgtagacccccacatcaaggtggactccggctaccgagttcacgaggagctgcggaacctggggctgtatgttaaaacccgggatggctctgactatgagggctggtgctggccaggctcagctggttaccctgacttcactaatcccacgatgagggcctggtgggctaacatgttcagctatgacaattatgagggctcagctcccaacctctttgtctggaatgacatgaacgaaccatctgtgttcaatggtcctgaggtcaccatgctcaaggatgcccagcattatgggggctgggagcaccgggatgtgcataacatctatggcctttatgtgcacatggcgactgctgatgggctgagacagcgctctgggggcatggaacgcccctttgtcctggccagggccttcttcgctggctcccagcgctttggagccgtgtggacaggggacaacactgccgagtgggaccatttgaagatctctattcctatgtgtctcagcttggggctggtgggactttccttctgtggggcggatgtgggtggcttcttcaaaaacccagagccagagctgcttgtgcgctggtaccagatgggtgcttaccagccattcttccgggcacatgcccacttggacactgggcgacgagagccatggctgttaccatctcagcacaatgatataatccgagatgccttgggccagcgatattctttgctgcccttctggtacaccctcttatatcaggcccatcgggaaggcattcctgtcatgaggcccctgtgggtgcagtaccctcaggatgtgactaccttcaatatagatgatcagtacttgcttggggatgcgttgctggttcaccctgtatcagactctggagcccatggtgtccaggtctatctgcctggccaaggggaggtgtggtatgacattcaaagctaccagaagcatcatggtccccagaccctgtacctgcctgtaactctaagcagtatccctgtgttccagcgtggagggacaatcgtgcctcgatggatgcgagtgcggcggtcttcagaatgtatgaaggatgaccccatcactctctttgttgcacttagccctcagggtacagctcaaggagagctctttctggatgatgggcacacgttcaactatcagactcgccaagagttcctgctgcgtcgattctcattctctggcaacacccttgtctccagctcagcagaccctgaaggacactttgagacaccaatctggattgagcgggtggtgataataggggctggaaagccagcagctgtggtactccagacaaaaggatctccagaaagccgcctgtccttccagcatgaccctgagacctctgtgttggtcctgcgcaagcctggcatcaatgtggcatctgattggagtattcacctgcgataacccaagggatgtt

SEQ ID NO: 259629 - DNA, 2835 bp, Artificial Sequence
  derived and/or modified sequence
atggctgctgtggccgctgtggccgccaggagaagaagatcctgggccagcctggtgctggccttcctgggcgtgtgcctgggcatcaccctggccgtggacaggagcaacttcaagacctgtgaggagagcagcttctgcaagaggcagaggagcatccggcccggcctgagcccctaccgggccctgctggacagcctgcagctgggccctgacagcctgactgtgcacctgatccacgaggtgaccaaggtgctgctggtgctggagctgcagggcctgcagaagaacatgacccgcttcagaattgatgagctggagccccggcggccccgctacagagtgcctgatgtgctggtggccgacccccccatcgcccggctgtctgtgtctggaagagatgaaaattctgtggagctgaccatggccgagggcccctacaagatcatcctgacagcccggcccttccggctggacctgctggaggacaggagcctgctgctgtctgtgaatgcccggggcctgctggagtttgagcaccagagggccccccgggtgtcccagggcagcaaggaccctgcagaaggagatggagcccagcctgaggagaccccaagagatggagacaagccagaggagacccagggcaaggccgagaaggatgagcccggggcctgggaggagaccttcaagacccacagcgacagcaagccctacggccccatgtctgtgggcctggacttcagcctgcccggcatggagcacgtgtatggcatccctgagcacgccgacaacctgcggctgaaggtgacagaaggaggagagccctaccgcctgtacaacctggatgtgttccagtatgagctgtacaaccccatggccctgtatggctctgtgcctgtgctgctggcccacaacccccaccgggacctgggcatcttctggctgaatgctgctgagacctgggtggacatcagcagcaacacagctgggaagaccctgtttgggaagatgatggactacctgcagggcagcggggagaccccccagacagatgtgcgctggatgtctgaaacaggcatcattgatgtgttcctgctgctgggccccagcatcagtgatgtgttccggcagtatgccagcctgaccggcacccaggccctgcccccactcttcagcctgggctaccaccagagccgctggaactacagagatgaagcagatgtgctggaggtggaccagggctttgatgaccacaacctgccctgtgatgtgatctggctggacatcgagcacgcagatggcaagcgctacttcacctgggaccccagccgcttcccccagcccaggaccatgctggagcggctggccagcaagaggaggaagctggtggccatcgtggacccccacatcaaggtggacagcggctacagagtgcatgaggagctgaggaacctgggcctgtatgtgaagaccagagatggcagtgactatgagggctggtgctggccaggcagcgctggctacccagacttcaccaaccccaccatgagggcctggtgggccaacatgttctcctatgacaactatgagggcagcgcccccaacctgtttgtgtggaatgacatgaatgagcccagcgtcttcaacggccctgaggtgaccatgctgaaggatgcccagcactatggaggctgggagcacagagatgtgcacaacatctacggcctgtatgtgcacatggccacagcagatggcctgcggcagaggtctgggggcatggagcggccctttgtgctggcccgggccttctttgctggcagccagagatttggagctgtgtggacaggagacaacacagctgagtgggaccacctgaagatcagcatccccatgtgcctgagcctgggcctggtgggcctgtccttctgtggggctgatgtgggcggcttcttcaagaaccctgagcctgagctgctggtgcgctggtaccagatgggcgcctaccagcccttcttccgggcccacgcccacctggacacaggaagaagagagccctggctgctgcccagccagcacaatgacatcatcagagatgccctgggccagcgctacagcctgctgcccttctggtacaccctgctgtaccaggcccaccgggagggcatccctgtgatgaggcccctgtgggtgcagtacccccaggatgtgaccaccttcaacattgatgaccagtacctgctgggagatgccctgctggtgcaccctgtgtctgacagcggggcccatggagtgcaggtgtacctgcccggccagggcgaggtgtggtatgacatccagagctaccagaagcaccacggcccccagaccctgtacctgcctgtgaccctgagcagcatccctgtgttccagaggggcggcaccatcgtgccccgctggatgagggtgagaagaagcagcgagtgcatgaaggatgaccccatcaccctgtttgtggccctgagcccccagggcacagcccagggcgagctgttcctggatgatggccacaccttcaactaccagacccggcaggagttcctgctgcggcgcttctccttcagcggcaacaccctggtgagcagcagcgctgaccctgagggccactttgagacccccatctggattgagcgggtggtgatcattggagctgggaagccagctgctgtggtgctgcagaccaagggcagccctgagagccggctgtccttccagcacgaccctgagacctctgtgctggtgctgaggaagccaggcatcaacgtggccagtgactggagcatccacctgaggtag

SEQ ID NO: 259630 - DNA, 2835 bp, Artificial Sequence
  derived and/or modified sequence
atggccgccgtggccgccgtggccgcccggcggcggcggagctgggcttccctggtcctggcctttctgggcgtgtgtttgggcatcacccttgcagtggatagatccaattttaaaacatgcgaggaatcatccttttgcaagaggcagcgttccatccgccccggactgtcaccctatagggccctgctggacagccttcagctggggccagacagtctgaccgttcatctgatccacgaggttacgaaggttctcctcgtgctagaattacaaggactgcagaagaatatgactcgcttccggatcgacgaacttgagccacgtaggccccgctaccgggtccccgatgtgttagtcgcagatccccccattgcccggctttcagttagcggcagagacgagaattccgtggagctgacgatggccgagggcccatataagattattctgactgctcgccccttccggttagatctgttggaagatcgctccttgctgcttagcgtgaatgctcgcgggctcctggaatttgagcaccagcgcgcccctcgggttagccaaggatccaaggatcccgccgaaggcgacggcgctcagccagaggaaactcccagggatggcgacaaaccagaagagacccagggcaaggccgaaaaggatgaacctggagcctgggaagagacattcaagacccacagcgattccaaaccttacgggcccatgtccgtaggtctcgacttctccctccccggcatggagcatgtctacgggattccagagcatgccgataatctgcgtcttaaggtgacagagggtggtgagccttatcgcctgtataacttagacgttttccagtatgagttatataaccctatggcactgtacggtagtgtaccggtattgttagcccacaacccacacagggacctcgggatcttttggctgaatgccgcagagacctgggtggatatctcctctaacacagctggtaaaaccctgttcggaaaaatgatggactacctccagggctcgggggagactccgcagaccgacgtgcggtggatgtctgaaaccggtattatcgatgtatttttgcttctcggaccctctatctcagacgtcttcagacagtatgccagcctgacaggaacccaggcccttcctcccctcttttcactgggttatcatcagtcacgctggaattacagagacgaggccgacgttctcgaggtggaccaaggtttcgacgatcataatctaccttgcgatgtgatttggctggatatcgagcacgcggacggcaaacgatactttacgtgggatcccagccgattcccacaaccccgcactatgctggaacgactagcctcaaagcgtcggaaacttgtggccatcgtcgacccccacattaaagtggatagtggctaccgcgtccacgaagagttgcgcaacctgggtctgtacgtgaaaacacgggatgggagtgattatgaaggctggtgctggccaggtagcgctgggtatccggactttacgaaccccacaatgcgcgcttggtgggctaacatgttcagctacgataattacgaggggtccgcccctaacctttttgtttggaacgacatgaatgagccttctgtatttaatggccctgaggtcaccatgcttaaagacgcccagcattacggaggttgggaacacagagatgtgcacaatatctacggcctgtatgtgcacatggcaacagccgacgggctgcgccagagatctggaggtatggagagacctttcgttctcgcccgcgctttctttgctgggtcccagcgatttggcgcagtatggaccggagacaacacggcggaatgggatcatttgaaaatttctattcccatgtgcctctctctcggtctggttggcttgtccttctgcggcgccgacgtaggtggcttttttaaaaaccccgaaccagagcttttggtccgatggtatcagatgggagcctaccagccgttttttcgtgctcatgctcacctcgataccggccggagagaaccttggctgcttccttcccagcacaatgacatcatccgcgacgcactcggacagagatactccttactgcccttctggtatacattgctgtaccaggcacacagggaggggattccagtaatgagaccactgtgggttcagtatccccaggatgtgacgacttttaacatagatgatcagtatctcctgggcgacgccttacttgtacacccggtgagcgatagcggggcccacggtgtccaggtttacctgcccggccagggcgaagtgtggtacgacattcagtcctatcaaaagcatcacggaccgcagacactgtacctgccagtaacgctctctagtattcccgtgttccagaggggcggtaccatagtgcccaggtggatgcgggtccggcgatcatccgaatgtatgaaagatgacccaattaccctatttgtagcgctctcaccacaggggaccgcccaaggggagctgtttttggacgacggtcataccttcaactaccaaacccgccaggaatttctgttgagacgtttcagctttagcggaaacacactggttagctcgagcgccgatcccgaaggccacttcgagaccccaatttggattgagcgcgtagtcatcatcggcgctggaaagccagctgcggtggtcctccaaaccaaagggtcacctgagtccaggttatcattccaacacgatcccgagacttcggttctggtcctcagaaagcccggaatcaacgtggcgtcagattggagtatacacctgcgatag

SEQ ID NO: 259631 - DNA, 2835 bp, Artificial Sequence
  derived and/or modified sequence
atggctgccgtcgcagcagtagccgcacgcaggagacgatcatgggcgagtctggtgctcgctttccttggagtgtgcttagggattactctcgcagtcgaccggtcaaatttcaagacctgtgaagaatcctccttctgtaagcggcagagatctattcgaccagggctgagtccctaccgggcactcctcgattccctgcaactgggtcctgattccttgactgtccatctgatccacgaggttaccaaagtgctgcttgtgcttgagcttcagggtttgcagaagaatatgacaagatttagaattgacgagctggagccgcgacgtcctcgatacagggtcccagatgtgcttgtcgcggacccaccaatagcgcgattaagcgttagcggaagagacgagaattcagtggaactcacaatggcagaaggaccctacaaaataatacttaccgcacgaccttttagactggatctgctggaagatcgttctctgctgctgagcgtgaatgccaggggtttgctggagttcgaacaccagcgagctccacgcgtttcacagggctccaaggatcccgctgagggggacggtgcccagccagaggagacccccagggacggagacaaacccgaagaaactcagggcaaggcggagaaggatgagcccggtgcctgggaggagacgttcaagacccactcagacagcaaaccctatggccctatgtctgtagggcttgattttagtctgcctgggatggaacatgtctacggaatcccagaacatgccgacaacctcagactgaaagtaacagaggggggagagccctaccggctgtataatctcgatgtgttccagtacgaactgtacaatcccatggcactctacggcagtgtgccggtgctgttggcacacaaccctcaccgggatcttggtatcttttggttgaacgccgctgagacatgggtcgatatttcttcaaacaccgcaggcaagaccctgttcggcaagatgatggattacctgcagggctcaggtgagaccccccagaccgatgtgcggtggatgagtgagacaggaataattgacgtatttttgctgctgggacctagcatcagcgacgtgttccgccagtacgcctccttgacgggcacacaagctctgccacccttgttctcgttaggataccatcaatctaggtggaattatcgcgatgaggcggatgtgctcgaagtggaccaaggattcgatgaccacaacctgccttgtgacgtaatatggcttgacatcgagcatgcagacggaaagcgctatttcacctgggacccttctcgattcccgcagcctagaaccatgctggaaagactcgcttccaaacggcgtaagcttgtggctatcgttgacccacatattaaagtggacagtggatacagagtacatgaggagttaagaaatctcggactttacgtcaagacgcgggacggaagcgattacgaaggatggtgctggcccggaagcgccggatatcctgattttaccaatcccacaatgagagcttggtgggccaatatgttttcatacgacaattatgagggtagcgcgccaaacctgtttgtgtggaatgacatgaacgagcctagtgtttttaatgggccagaggtcacaatgttgaaagatgcccagcactatggcggatgggaacaccgcgacgtgcacaatatctacgggctttacgtgcacatggccaccgccgacggcctccgtcaacgtagcggcggaatggaacgtccctttgtcctcgcacgggcttttttcgctggttcacagaggttcggcgctgtttggacaggcgacaatacagctgagtgggaccacctgaagatcagcatccccatgtgtctttcactggggttggtcggattgagcttctgtggagccgacgttggaggattttttaagaaccccgaaccagagctcttggtgaggtggtatcaaatgggggcttaccagccatttttcagagcacatgcccacctagataccggtcgcagggagccatggctgcttccatctcagcacaacgatatcatcagagacgctctgggtcaacggtattccctgttgcccttttggtataccctgctctaccaggcacaccgtgaaggaatcccagtcatgaggcctctgtgggtccaatatccacaagacgtgactacatttaacattgatgatcaatatcttctgggggacgctctgctggtgcatcccgtatcggactctggagctcacggcgttcaagtctatttgcctggtcagggcgaagtttggtatgatattcaatcatatcagaaacatcacggaccccagactctttacctgcccgtaacactgtctagcattcctgtctttcagcgaggcggtacaatagtccctcgttggatgagggtgcggagatctagcgagtgtatgaaagatgaccccattaccctgtttgtggctctgagcccgcagggcacggctcagggtgagctgtttctagatgacggccacacctttaattaccagaccaggcaggagttcctgctgcgacgatttagttttagcggcaataccttggtcagctcctctgctgacccagagggccactttgagacaccaatttggatcgagagagtggttattattggtgctggaaagcccgcagcagtggtgctccagaccaagggctcccccgagagtaggctgagcttccagcacgatccagaaaccagcgtgctggtccttcgtaagccgggtatcaatgtggccagcgattggtcgatccacctgcgctag

SEQ ID NO: 259632 - DNA, 2835 bp, Artificial Sequence
  derived and/or modified sequence
atggccgccgtggccgccgtggccgccagaagaagaagaagctgggccagcctggtgctggccttcctgggcgtgtgcctgggcatcaccctggccgtggacagaagcaacttcaagacctgcgaggagagcagcttctgcaagagacagagaagcatcagacccggcctgagcccctacagagccctgctggacagcctgcagctgggccccgacagcctgaccgtgcacctgatccacgaggtgaccaaggtgctgctggtgctggagctgcagggcctgcagaagaacatgaccagattcagaatcgacgagctggagcccagaagacccagatacagagtgcccgacgtgctggtggccgacccccccatcgccagactgagcgtgagcggcagagacgagaacagcgtggagctgaccatggccgagggcccctacaagatcatcctgaccgccagacccttcagactggacctgctggaggacagaagcctgctgctgagcgtgaacgccagaggcctgctggagttcgagcaccagagagcccccagagtgagccagggcagcaaggaccccgccgagggcgacggcgcccagcccgaggagacccccagagacggcgacaagcccgaggagacccagggcaaggccgagaaggacgagcccggcgcctgggaggagaccttcaagacccacagcgacagcaagccctacggccccatgagcgtgggcctggacttcagcctgcccggcatggagcacgtgtacggcatccccgagcacgccgacaacctgagactgaaggtgaccgagggcggcgagccctacagactgtacaacctggacgtgttccagtacgagctgtacaaccccatggccctgtacggcagcgtgcccgtgctgctggcccacaacccccacagagacctgggcatcttctggctgaacgccgccgagacctgggtggacatcagcagcaacaccgccggcaagaccctgttcggcaagatgatggactacctgcagggcagcggcgagaccccccagaccgacgtgagatggatgagcgagaccggcatcatcgacgtgttcctgctgctgggccccagcatcagcgacgtgttcagacagtacgccagcctgaccggcacccaggccctgccccccctgttcagcctgggctaccaccagagcagatggaactacagagacgaggccgacgtgctggaggtggaccagggcttcgacgaccacaacctgccctgcgacgtgatctggctggacatcgagcacgccgacggcaagagatacttcacctgggaccccagcagattcccccagcccagaaccatgctggagagactggccagcaagagaagaaagctggtggccatcgtggacccccacatcaaggtggacagcggctacagagtgcacgaggagctgagaaacctgggcctgtacgtgaagaccagagacggcagcgactacgagggctggtgctggcccggcagcgccggctaccccgacttcaccaaccccaccatgagagcctggtgggccaacatgttcagctacgacaactacgagggcagcgcccccaacctgttcgtgtggaacgacatgaacgagcccagcgtgttcaacggccccgaggtgaccatgctgaaggacgcccagcactacggcggctgggagcacagagacgtgcacaacatctacggcctgtacgtgcacatggccaccgccgacggcctgagacagagaagcggcggcatggagagacccttcgtgctggccagagccttcttcgccggcagccagagattcggcgccgtgtggaccggcgacaacaccgccgagtgggaccacctgaagatcagcatccccatgtgcctgagcctgggcctggtgggcctgagcttctgcggcgccgacgtgggcggcttcttcaagaaccccgagcccgagctgctggtgagatggtaccagatgggcgcctaccagcccttcttcagagcccacgcccacctggacaccggcagaagagagccctggctgctgcccagccagcacaacgacatcatcagagacgccctgggccagagatacagcctgctgcccttctggtacaccctgctgtaccaggcccacagagagggcatccccgtgatgagacccctgtgggtgcagtacccccaggacgtgaccaccttcaacatcgacgaccagtacctgctgggcgacgccctgctggtgcaccccgtgagcgacagcggcgcccacggcgtgcaggtgtacctgcccggccagggcgaggtgtggtacgacatccagagctaccagaagcaccacggcccccagaccctgtacctgcccgtgaccctgagcagcatccccgtgttccagagaggcggcaccatcgtgcccagatggatgagagtgagaagaagcagcgagtgcatgaaggacgaccccatcaccctgttcgtggccctgagcccccagggcaccgcccagggcgagctgttcctggacgacggccacaccttcaactaccagaccagacaggagttcctgctgagaagattcagcttcagcggcaacaccctggtgagcagcagcgccgaccccgagggccacttcgagacccccatctggatcgagagagtggtgatcatcggcgccggcaagcccgccgccgtggtgctgcagaccaagggcagccccgagagcagactgagcttccagcacgaccccgagaccagcgtgctggtgctgagaaagcccggcatcaacgtggccagcgactggagcatccacctgagatag

SEQ ID NO: 259633 - protein, 966 aa, Artificial Sequence
  derived and/or modified sequence
MAAVAAVAARRRRSWASLVLAFLGVCLGITLAVDRSNFKTCEESSFCKRQRSIRPGLSPYRALLDSLQLGPDSLTVHLIHEVTKVLLVLELQGLQKNMTRFRIDELEPRRPRYRVPDVLVADPPIARLSVSGRDENSVELTMAEGPYKIILTARPFRLDLLEDRSLLLSVNARGLLEFEHQRAPRVSFSDKVNLTLGSIWDKIKNLFSRQGSKDPAEGDGAQPEETPRDGDKPEETQGKAEKDEPGAWEETFKTHSDSKPYGPMSVGLDFSLPGMEHVYGIPEHADNLRLKVTEGGEPYRLYNLDVFQYELYNPMALYGSVPVLLAHNPHRDLGIFWLNAAETWVDISSNTAGKTLFGKMMDYLQGSGETPQTDVRWMSETGIIDVFLLLGPSISDVFRQYASLTGTQALPPLFSLGYHQSRWNYRDEADVLEVDQGFDDHNLPCDVIWLDIEHADGKRYFTWDPSRFPQPRTMLERLASKRRKLVAIVDPHIKVDSGYRVHEELRNLGLYVKTRDGSDYEGWCWPGSAGYPDFTNPTMRAWWANMFSYDNYEGSAPNLFVWNDMNEPSVFNGPEVTMLKDAQHYGGWEHRDVHNIYGLYVHMATADGLRQRSGGMERPFVLARAFFAGSQRFGAVWTGDNTAEWDHLKISIPMCLSLGLVGLSFCGADVGGFFKNPEPELLVRWYQMGAYQPFFRAHAHLDTGRREPWLLPSQHNDIIRDALGQRYSLLPFWYTLLYQAHREGIPVMRPLWVQYPQDVTTFNIDDQYLLGDALLVHPVSDSGAHGVQVYLPGQGEVWYDIQSYQKHHGPQTLYLPVTLSSIPVFQRGGTIVPRWMRVRRSSECMKDDPITLFVALSPQGTAQGELFLDDGHTFNYQTRQEFLLRRFSFSGNTLVSSSADPEGHFETPIWIERVVIIGAGKPAAVVLQTKGSPESRLSFQHDPETSVLVLRKPGINVASDWSIHLR

SEQ ID NO: 259634 - DNA, 2901 bp, Artificial Sequence
  derived and/or modified sequence
atggccgcggtggccgctgtcgccgcccgcagacgcagaagctgggcctccctggtcctggcctttctgggcgtgtgtcttgggattactctggctgtcgacagatcgaacttcaaaacatgcgaggaatcttctttttgcaagaggcagcgctcaatccgccccggactgtctccttatcgcgccctgttggactcactccagctgggtcccgactcactcactgtgcatcttattcacgaggttacaaaagtgctgctggtgctggagctgcaaggcttgcagaagaatatgacacgcttccgcatcgatgaattggagccacgacgacctcgatatagggtgccggacgttttggtcgccgaccctccaatcgctaggctatccgtctctggacgagatgaaaactccgtggaactgacaatggctgagggaccatataaaatcattctcacagcccgacccttcagactcgacctactcgaggataggtccctgctcctgtcagttaatgcccgcggcttgctcgaattcgagcaccaaagagcaccgagagtgtctttcagtgataaggtaaatctgaccttggggtcaatctgggacaaaatcaagaatctgtttagcagacaggggagtaaagaccccgcagagggggacggggcccagcctgaggaaacacctcgggatggagataaaccagaggagactcagggaaaagccgagaaggacgagcccggcgcatgggaggaaacattcaaaacacactccgacagcaaaccatacggcccgatgtcggtgggactcgatttctctctcccgggaatggaacacgtgtatgggatcccagaacacgccgataacctgagattaaaagtgacagaaggcggggaaccctaccgtctttataatctagacgtgttccagtacgaactctataaccctatggcactgtacggatctgtgccggttctgctcgctcacaacccccaccgggatctcggtattttttggctcaatgccgcagagacttgggtggacatctcttccaatactgccgggaagaccctgtttgggaagatgatggactatctgcaaggatccggagagactccccagacagacgtccggtggatgagcgagactgggattatagacgtctttctgctgctggggccgtcaattagcgatgtcttcagacagtacgctagcctgaccgggacccaggccctgcctcccctttttagccttggctaccatcagtcaaggtggaattatcgggacgaggcagatgtgctggaggtggatcagggatttgatgatcataatctcccatgcgatgtcatatggctcgacattgaacacgccgacgggaagagatacttcacatgggatccaagccggttcccacagccaaggacaatgttggagagacttgccagcaaaagaagaaagctggtcgctatcgttgacccacatattaaggtggactccgggtaccgcgttcatgaagaacttaggaatctcggtttgtacgttaagaccagagatgggagcgattatgaaggctggtgttggcctggatcagcgggctacccagatttcaccaaccctacaatgagagcctggtgggccaatatgtttagctatgacaattatgagggttcagctcccaatttgtttgtatggaatgatatgaacgagcccagcgtgttcaatggaccggaggttaccatgctgaaggatgcgcagcattacggcggctgggagcatcgagatgtgcataatatctacggcctctatgtgcatatggccacagcagatggattgcggcagcgcagcggagggatggaaaggccttttgttctggctcgggcgttttttgcaggctcccagcgctttggcgcagtttggacaggggataatactgcagagtgggaccatttgaagatctccatccccatgtgcctaagtctgggccttgtcggactgtccttttgtggcgcggacgtggggggattttttaaaaatccggaaccagagctcctcgtgcggtggtaccagatgggagcttaccagccatttttcagagcacacgcgcatctcgacactggccgacgagagccctggctgctaccgagccagcacaatgacattatcagagacgccctagggcagcggtatagcctcctgcctttttggtataccttgctctatcaggcccatagggaaggcatccccgtcatgcgccctctgtgggtgcagtaccctcaagacgtgacgacgttcaacattgatgaccagtatctgttgggcgacgcccttctggtgcaccccgtctcagactcaggagcccacggggtacaggtctatctgcctggacagggcgaagtgtggtatgacatccaatcatatcaaaagcaccacgggccacagacactctatctccccgtgactctaagtagtatcccagtctttcagcgaggaggaaccattgtcccaagatggatgagagtgcggaggagcagcgaatgtatgaaggatgatcccatcacgttattcgtagcactctcccctcaaggaactgctcagggggaactgttcttggacgacggtcataccttcaactatcaaactcgccaggagtttctcttacggaggttttcattctccgggaataccctcgttagtagctccgccgatccagaaggccatttcgaaacccctatctggattgaacgtgttgtgattatcggggccggtaaacctgctgccgtggtgctccagactaaaggcagcccggaatcacgcctgagcttccagcatgatccagaaactagcgtgctcgtgcttcggaaacccggaatcaatgtcgctagtgattggagtattcacctgcgttag

SEQ ID NO: 259635 - DNA, 3906 bp, Artificial Sequence
  derived and/or modified sequence
gcaaactctgcacaagatggcggcggtagcggcagtggcggcgcgtaggaggcggtcttgggcgtctttggtactggcttttttaggggtctgcctggggattacccttgctgtggatagaagcaactttaagacctgtgaagagagttctttctgcaagcgacagagaagcatacggccaggcctctctccataccgagccttgctggactctctacagcttggtcctgattccctcacggtccatctgatccatgaggtcaccaaggtgttgctggtgctagagcttcaggggcttcaaaagaacatgactcggttcaggattgatgagctggagcctcggcgaccccgataccgtgtaccagatgttttggtggctgatccaccaatagcccggctttctgtctctggtcgtgatgagaacagtgtggagttaaccatggctgagggaccctacaagatcatcttgacagcacggccattccgccttgacctactagaggaccgaagtcttttgcttagtgtcaatgcccgaggactcttggagtttgagcatcagagggcccctagggtctctttctcggataaggttaatctcacgcttggtagcatatgggataagatcaagaaccttttctctaggcaaggatcaaaagacccagctgagggcgatggggcccagcctgaggaaacacccagggatggcgacaagccagaggagactcaggggaaggcagagaaagatgagccaggagcctgggaggagacattcaaaactcactctgacagcaagccgtatggccccatgtctgtgggtttggacttctctctgccaggcatggagcatgtctatgggatccctgagcatgcagacaacctgaggctgaaggtcactgagggtggggagccatatcgcctctacaatttggatgtgttccagtatgagctgtacaacccaatggccttgtatgggtctgtgcctgtgctcctggcacacaaccctcatcgcgacttgggcatcttctggctcaatgctgcagagacctgggttgatatatcttccaacactgccgggaagaccctgtttgggaagatgatggactacctgcagggctctggggagaccccacagacagatgttcgctggatgtcagagactggcatcattgacgtcttcctgctgctggggccctccatctctgatgttttccggcaatatgctagtctcacaggaacccaggcgttgcccccactcttctccctcggctaccaccagagccgttggaactaccgggacgaggctgatgtgctggaagtggatcagggctttgatgatcacaacctgccctgtgatgtcatctggctagacattgaacatgctgatggcaagcggtatttcacctgggaccccagtcgcttccctcagccccgcaccatgcttgagcgcttggcttctaagaggcggaagctggtggccatcgtagacccccacatcaaggtggactccggctaccgagttcacgaggagctgcggaacctggggctgtatgttaaaacccgggatggctctgactatgagggctggtgctggccaggctcagctggttaccctgacttcactaatcccacgatgagggcctggtgggctaacatgttcagctatgacaattatgagggctcagctcccaacctctttgtctggaatgacatgaacgaaccatctgtgttcaatggtcctgaggtcaccatgctcaaggatgcccagcattatgggggctgggagcaccgggatgtgcataacatctatggcctttatgtgcacatggcgactgctgatgggctgagacagcgctctgggggcatggaacgcccctttgtcctggccagggccttcttcgctggctcccagcgctttggagccgtgtggacaggggacaacactgccgagtgggaccatttgaagatctctattcctatgtgtctcagcttggggctggtgggactttccttctgtggggcggatgtgggtggcttcttcaaaaacccagagccagagctgcttgtgcgctggtaccagatgggtgcttaccagccattcttccgggcacatgcccacttggacactgggcgacgagagccatggctgttaccatctcagcacaatgatataatccgagatgccttgggccagcgatattctttgctgcccttctggtacaccctcttatatcaggcccatcgggaaggcattcctgtcatgaggcccctgtgggtgcagtaccctcaggatgtgactaccttcaatatagatgatcagtacttgcttggggatgcgttgctggttcaccctgtatcagactctggagcccatggtgtccaggtctatctgcctggccaaggggaggtgtggtatgacattcaaagctaccagaagcatcatggtccccagaccctgtacctgcctgtaactctaagcagtatccctgtgttccagcgtggagggacaatcgtgcctcgatggatgcgagtgcggcggtcttcagaatgtatgaaggatgaccccatcactctctttgttgcacttagccctcagggtacagctcaaggagagctctttctggatgatgggcacacgttcaactatcagactcgccaagagttcctgctgcgtcgattctcattctctggcaacacccttgtctccagctcagcagaccctgaaggacactttgagacaccaatctggattgagcgggtggtgataataggggctggaaagccagcagctgtggtactccagacaaaaggatctccagaaagccgcctgtccttccagcatgaccctgagacctctgtgttggtcctgcgcaagcctggcatcaatgtggcatctgattggagtattcacctgcgataacccaagggatgttctgggttagggggagggaaggggagcattagtgctgagagatattctttcttctgccttggagttcggccctccccagacttcacttatgctagtctaagacccagattctgccaacatttgggcaggatgagagggctgaccctgggctccaaattcctcttgtgatctcctcacctctcccactccattgataccaactctttcccttcattcccccaacatcctgttgctctaactggagcacattcacttacgaacaccaggaaaccacagggcccttgtcgccccttctctttcccttatttaggagccctgaactcccccagagtctatccattcatgcctcttgtatgttgatgccacttcttggaagaagatgagggcaatgagttagggctccttttccccttccctcccaccagattgctctcccacctttcatttcttcctccaggctttactcccctttttatgccccaccgatacactgggaccaccccttaccccggacaggatgaatggatcaaaggagtgaggttgctaaagaacatccttttccctctcattctacccttttcctctccccgattccttgtagagctgctgcaattcttagaggggcagttctacctcctctgtccctcggcagaaagacgtttccacacctcttaggggatgcgcattaaacttcttttgcccccttcttgtcccctttgaggggcacttaagatggagaaatcagttgtggtttcagtgaatcatggtcacctgtatttattgctaggagaagcctgagggtggggggagatgatcatgtgtgctcggggttggctggaagccctgggtggggggttgggggaggactaatggggagtcggggaatatttgtgggtattttttttacttcctcttggttcccagctgtgacacgttttgatcaaaggagaaacaataaagggataaaccataaataa

SEQ ID NO: 259636 - DNA, 2901 bp, Artificial Sequence
  derived and/or modified sequence
atggctgctgtggccgctgtggccgccaggagaagaagatcctgggccagcctggtgctggccttcctgggcgtgtgcctgggcatcaccctggccgtggacaggagcaacttcaagacctgtgaggagagcagcttctgcaagaggcagaggagcatccggcccggcctgagcccctaccgggccctgctggacagcctgcagctgggccctgacagcctgactgtgcacctgatccacgaggtgaccaaggtgctgctggtgctggagctgcagggcctgcagaagaacatgacccgcttcagaattgatgagctggagccccggcggccccgctacagagtgcctgatgtgctggtggccgacccccccatcgcccggctgtctgtgtctggaagagatgaaaattctgtggagctgaccatggccgagggcccctacaagatcatcctgacagcccggcccttccggctggacctgctggaggacaggagcctgctgctgtctgtgaatgcccggggcctgctggagtttgagcaccagagggccccccgggtgtccttcagtgacaaggtgaacctgaccctgggcagcatctgggacaagatcaagaacctcttcagccggcagggcagcaaggaccctgcagaaggagatggagcccagcctgaggagaccccaagagatggagacaagccagaggagacccagggcaaggccgagaaggatgagcccggggcctgggaggagaccttcaagacccacagcgacagcaagccctacggccccatgtctgtgggcctggacttcagcctgcccggcatggagcacgtgtatggcatccctgagcacgccgacaacctgcggctgaaggtgacagaaggaggagagccctaccgcctgtacaacctggatgtgttccagtatgagctgtacaaccccatggccctgtatggctctgtgcctgtgctgctggcccacaacccccaccgggacctgggcatcttctggctgaatgctgctgagacctgggtggacatcagcagcaacacagctgggaagaccctgtttgggaagatgatggactacctgcagggcagcggggagaccccccagacagatgtgcgctggatgtctgaaacaggcatcattgatgtgttcctgctgctgggccccagcatcagtgatgtgttccggcagtatgccagcctgaccggcacccaggccctgcccccactcttcagcctgggctaccaccagagccgctggaactacagagatgaagcagatgtgctggaggtggaccagggctttgatgaccacaacctgccctgtgatgtgatctggctggacatcgagcacgcagatggcaagcgctacttcacctgggaccccagccgcttcccccagcccaggaccatgctggagcggctggccagcaagaggaggaagctggtggccatcgtggacccccacatcaaggtggacagcggctacagagtgcatgaggagctgaggaacctgggcctgtatgtgaagaccagagatggcagtgactatgagggctggtgctggccaggcagcgctggctacccagacttcaccaaccccaccatgagggcctggtgggccaacatgttctcctatgacaactatgagggcagcgcccccaacctgtttgtgtggaatgacatgaatgagcccagcgtcttcaacggccctgaggtgaccatgctgaaggatgcccagcactatggaggctgggagcacagagatgtgcacaacatctacggcctgtatgtgcacatggccacagcagatggcctgcggcagaggtctgggggcatggagcggccctttgtgctggcccgggccttctttgctggcagccagagatttggagctgtgtggacaggagacaacacagctgagtgggaccacctgaagatcagcatccccatgtgcctgagcctgggcctggtgggcctgtccttctgtggggctgatgtgggcggcttcttcaagaaccctgagcctgagctgctggtgcgctggtaccagatgggcgcctaccagcccttcttccgggcccacgcccacctggacacaggaagaagagagccctggctgctgcccagccagcacaatgacatcatcagagatgccctgggccagcgctacagcctgctgcccttctggtacaccctgctgtaccaggcccaccgggagggcatccctgtgatgaggcccctgtgggtgcagtacccccaggatgtgaccaccttcaacattgatgaccagtacctgctgggagatgccctgctggtgcaccctgtgtctgacagcggggcccatggagtgcaggtgtacctgcccggccagggcgaggtgtggtatgacatccagagctaccagaagcaccacggcccccagaccctgtacctgcctgtgaccctgagcagcatccctgtgttccagaggggcggcaccatcgtgccccgctggatgagggtgagaagaagcagcgagtgcatgaaggatgaccccatcaccctgtttgtggccctgagcccccagggcacagcccagggcgagctgttcctggatgatggccacaccttcaactaccagacccggcaggagttcctgctgcggcgcttctccttcagcggcaacaccctggtgagcagcagcgctgaccctgagggccactttgagacccccatctggattgagcgggtggtgatcattggagctgggaagccagctgctgtggtgctgcagaccaagggcagccctgagagccggctgtccttccagcacgaccctgagacctctgtgctggtgctgaggaagccaggcatcaacgtggccagtgactggagcatccacctgaggtag

SEQ ID NO: 259637 - DNA, 2901 bp, Artificial Sequence
  derived and/or modified sequence
atggccgccgtggccgccgtggccgcccggcggcggcggagctgggctagcctcgtattggcgtttcttggtgtctgtctggggatcaccctcgctgtggaccgcagtaacttcaagacctgcgaagagtcctctttctgcaagcgtcagcggtcaatcaggccaggcctcagcccatatcgcgccctcctcgatagcctacagctcggccccgatagcctgactgtgcacctcattcacgaggttactaaagtgttgttggttctcgagctgcagggattgcaaaaaaacatgacacggtttcgcatcgatgaactggagcccagaagacctcgatatcgagtacccgatgtcctggtagctgaccctccaattgccagactgtcagtgagcggcagggacgaaaatagcgtggaacttactatggccgaaggtccttacaaaattatcctcacggctaggcccttccggttggaccttcttgaagacagatcactgctgctaagtgtgaacgctcgcggcctcttagagtttgagcaccagcgcgcccctagggtgtcattcagcgataaggtgaatctgaccctgggttcaatttgggataagatcaagaatttgttttcccgacaaggctccaaggatccagccgagggcgatggggctcagcccgaggagacccccagagatggcgacaaacctgaggagacacagggaaaagccgagaaggacgaaccaggtgcttgggaagagacctttaagacgcattctgactcgaaaccttatggccccatgtcagtaggcctggacttttctctgcccggcatggaacacgtctatggcatccctgagcacgccgacaacttgcgcctgaaagtgaccgaaggaggagagccttaccgactgtacaatctggacgtatttcagtacgagctatataaccccatggcgctgtacggcagtgtgccggttctgctggctcacaacccccaccgcgatctgggaatcttttggctcaatgcagcagagacatgggtggatatctcttcgaacaccgccggaaaaaccctgttcggaaaaatgatggactacttgcagggatcgggcgaaactccccagaccgatgtccgttggatgagcgaaacggggattatcgatgtgtttcttctcctgggtccgagcattagcgacgtgtttagacagtatgcgagtctgaccggaacacaggctctccctccgctgttctcactagggtaccaccagagcagatggaattaccgggatgaagccgatgtgcttgaggtggatcaaggttttgacgatcacaatctcccatgtgatgtaatttggttggatatagaacacgccgatggaaagaggtacttcacttgggatcctagccgttttccgcaacccagaacaatgctggaaagactggcatcgaagcgcagaaaactcgtagctattgtggatccacatattaaagtggactctggatatcgggtccacgaggagcttcgaaatttagggctctatgttaagacaagagacgggtcggactatgaggggtggtgctggccgggcagcgcaggataccctgatttcacaaacccgacaatgcgtgcgtggtgggcaaacatgttttcctatgataattacgaggggtcagcacctaatttgttcgtctggaatgacatgaatgagccaagtgtgttcaacgggcccgaggtcacaatgctcaaagacgcccaacactatgggggctgggagcaccgggacgtgcataacatctacggtctctacgtacacatggcaacagcagatggtctccgccagaggagcggcggaatggagaggccatttgtgctggcccgggccttttttgcaggtagtcagaggttcggcgcggtttggaccggggataacacagcggagtgggatcacctgaagatcagtatacccatgtgcctgtcactcgggctagtgggcctctccttctgcggagcagatgttggcggcttctttaagaatccagagcccgaactgctcgtgcgatggtatcagatgggagcctatcaacccttctttcgagctcatgcccatctcgacaccggccgccgagagccctggctgctcccctcacagcacaatgatatcatccgggacgcccttgggcagagatactccctcctaccattttggtacactctcttgtaccaggcacatcgcgagggtattcccgtgatgcgacctctttgggtccagtaccctcaagacgtcacaaccttcaatattgacgaccagtacctcctcggagatgccctacttgtccacccagtttcagattctggagcccatggcgtgcaagtatatctgcccggtcaaggcgaagtctggtacgacatccagagctatcagaagcaccatggcccacaaacgctgtacttaccagttactctgagctcaatccctgtattccaacggggcggcactatcgtacctcgatggatgcgggttcgacgttcatctgagtgcatgaaggatgatccaattaccctgtttgtcgccttatccccccaaggcactgcccagggagagctcttcctagatgatggacacacctttaattaccagacacgccaggagtttcttctcagacggttttctttttcaggcaataccctggtgtccagcagtgctgaccccgaaggccactttgagacgcccatttggatagaacgggtggtgatcatcggcgctggcaagccggcagccgttgttttgcaaacaaaaggcagccctgagtccaggctcagctttcagcatgacccagaaacgagcgtgctcgtccttcgaaagcccggcattaacgttgcctctgattggagcatacacctccgatag

SEQ ID NO: 259638 - DNA, 2901 bp, Artificial Sequence
  derived and/or modified sequence
atggctgccgtggccgcagtggccgctagacggaggagatcatgggccagcctggtcctagctttcctaggagtctgcttagggatcaccctggcagttgataggagcaacttcaagacttgtgaagaatcatcattttgtaaaagacagaggagcattcggcctggtctgtctccataccgggctctcctagatagcttgcagttgggtcctgactctctgactgttcatctgattcacgaggtgaccaaagtattgctggtgctggaactccagggcctgcagaaaaacatgacgaggttccgaatcgatgagctggaacctaggcgcccaaggtatcgcgtgcccgacgtactggtggcagatccaccaatcgcaagacttagcgtgtcgggccgagatgaaaactcagtcgagctgacaatggcggagggaccttacaagatcatcctcaccgcacgcccttttcgcctggatcttttggaagatcggagtttactcctctctgtcaacgcccgtgggctgctggaatttgaacatcagcgtgcccctagggtctcattctctgacaaagtcaatcttacgctgggatccatttgggataagatcaagaatctcttttccaggcagggctcaaaggacccggcagagggagatggcgcacagcctgaagaaacgccccgagacggggacaaacctgaggagactcaaggcaaagcagagaaggatgagccaggagcctgggaggagaccttcaaaactcatagcgattcaaagccttatggaccgatgtcagtggggctggactttagcctgcctggaatggaacatgtgtacgggatccccgagcacgccgacaatcttcgcttgaaggtcacagagggcggagaaccttaccgcctgtacaaccttgacgttttccagtacgagctgtataaccccatggctctatatggctccgtgccagtgctcctggcccacaatccacatcgtgacctgggcatattttggctgaacgctgccgaaacctgggtggatatctcctccaacacagccggaaaaactctgtttggcaaaatgatggactacctgcaaggctcaggagaaacaccccagaccgacgtaaggtggatgtctgaaaccgggattatcgacgtattcctgctgcttggaccaagcatttctgatgtgttcaggcagtacgcctcacttaccggaactcaggccctgcctcccctgtttagcctcgggtaccatcagtcccgctggaattatcgggacgaagcagatgtgttggaggtggatcagggcttcgacgaccacaatctcccttgtgacgtcatctggttggacatcgagcacgccgacgggaaaaggtactttacatgggacccaagtagattcccccaaccgagaacgatgttagagaggcttgcttctaaacggcgaaaactggttgcaatcgtggatccacacattaaagtcgactctggttaccgcgtccacgaggagctgcgtaaccttggactttatgtgaagacgagggatggtagcgactatgagggatggtgctggccgggtagtgcaggctatcctgactttaccaatcctacaatgagggcctggtgggccaacatgttcagctatgacaactacgagggaagcgccccaaatctgttcgtgtggaatgatatgaatgagccatcagtcttcaacggtccagaagttacaatgcttaaagatgcccagcattatggaggatgggagcatcgagacgtgcataatatatacggcttgtatgtccatatggccacagccgacgggctcagacaaaggtctggcggtatggaaagacctttcgtgctggcgagggccttctttgcgggatcacagcgcttcggagccgtctggacgggggacaatactgctgagtgggaccatttgaaaatctccatccccatgtgtttaagcctgggtcttgtagggctgtcattctgcggcgctgacgtcggaggtttcttcaagaatcctgagcctgagcttttagttcgctggtatcagatgggcgcataccagccattcttccgggcacatgctcacctggacactggcagacgtgagccttggttattgccttcccaacacaatgatattatcagagatgccctcggccaacgatatagtctcctgcctttttggtatactctgctgtaccaggcacaccgtgaagggatccccgtgatgcgtcccttgtgggtacaataccctcaggatgtgacaaccttcaatattgacgaccagtacctgcttggagatgccctgttggtccaccctgtgagcgatagtggtgcacacggagtgcaggtctatctacctgggcaaggggaggtttggtacgacatccagtcttatcagaagcatcacggccctcaaacattgtatcttcctgtcacgctctccagtattccggtgtttcagagggggggaactatcgtgccgaggtggatgcgcgtgagaaggtccagtgaatgtatgaaagacgacccaatcaccttatttgtagctctctctccacagggcacagctcagggcgagctgtttctggatgatggacacacttttaattaccagacacggcaggagttcttactacgccgtttctcattctcaggtaataccctggtttcatccagtgcagaccctgaggggcattttgagacaccgatttggatcgaaagggtggtcattattggggcaggtaaaccagccgctgtggtccttcagacgaagggcagcccagaatcccgcctgtcatttcagcacgatccagaaactagtgtactcgtgctgcgaaagccgggaataaacgttgctagcgactggtctatacacttgagatag

SEQ ID NO: 259639 - DNA, 2901 bp, Artificial Sequence
  derived and/or modified sequence
atggccgccgtggccgccgtggccgccagaagaagaagaagctgggccagcctggtgctggccttcctgggcgtgtgcctgggcatcaccctggccgtggacagaagcaacttcaagacctgcgaggagagcagcttctgcaagagacagagaagcatcagacccggcctgagcccctacagagccctgctggacagcctgcagctgggccccgacagcctgaccgtgcacctgatccacgaggtgaccaaggtgctgctggtgctggagctgcagggcctgcagaagaacatgaccagattcagaatcgacgagctggagcccagaagacccagatacagagtgcccgacgtgctggtggccgacccccccatcgccagactgagcgtgagcggcagagacgagaacagcgtggagctgaccatggccgagggcccctacaagatcatcctgaccgccagacccttcagactggacctgctggaggacagaagcctgctgctgagcgtgaacgccagaggcctgctggagttcgagcaccagagagcccccagagtgagcttcagcgacaaggtgaacctgaccctgggcagcatctgggacaagatcaagaacctgttcagcagacagggcagcaaggaccccgccgagggcgacggcgcccagcccgaggagacccccagagacggcgacaagcccgaggagacccagggcaaggccgagaaggacgagcccggcgcctgggaggagaccttcaagacccacagcgacagcaagccctacggccccatgagcgtgggcctggacttcagcctgcccggcatggagcacgtgtacggcatccccgagcacgccgacaacctgagactgaaggtgaccgagggcggcgagccctacagactgtacaacctggacgtgttccagtacgagctgtacaaccccatggccctgtacggcagcgtgcccgtgctgctggcccacaacccccacagagacctgggcatcttctggctgaacgccgccgagacctgggtggacatcagcagcaacaccgccggcaagaccctgttcggcaagatgatggactacctgcagggcagcggcgagaccccccagaccgacgtgagatggatgagcgagaccggcatcatcgacgtgttcctgctgctgggccccagcatcagcgacgtgttcagacagtacgccagcctgaccggcacccaggccctgccccccctgttcagcctgggctaccaccagagcagatggaactacagagacgaggccgacgtgctggaggtggaccagggcttcgacgaccacaacctgccctgcgacgtgatctggctggacatcgagcacgccgacggcaagagatacttcacctgggaccccagcagattcccccagcccagaaccatgctggagagactggccagcaagagaagaaagctggtggccatcgtggacccccacatcaaggtggacagcggctacagagtgcacgaggagctgagaaacctgggcctgtacgtgaagaccagagacggcagcgactacgagggctggtgctggcccggcagcgccggctaccccgacttcaccaaccccaccatgagagcctggtgggccaacatgttcagctacgacaactacgagggcagcgcccccaacctgttcgtgtggaacgacatgaacgagcccagcgtgttcaacggccccgaggtgaccatgctgaaggacgcccagcactacggcggctgggagcacagagacgtgcacaacatctacggcctgtacgtgcacatggccaccgccgacggcctgagacagagaagcggcggcatggagagacccttcgtgctggccagagccttcttcgccggcagccagagattcggcgccgtgtggaccggcgacaacaccgccgagtgggaccacctgaagatcagcatccccatgtgcctgagcctgggcctggtgggcctgagcttctgcggcgccgacgtgggcggcttcttcaagaaccccgagcccgagctgctggtgagatggtaccagatgggcgcctaccagcccttcttcagagcccacgcccacctggacaccggcagaagagagccctggctgctgcccagccagcacaacgacatcatcagagacgccctgggccagagatacagcctgctgcccttctggtacaccctgctgtaccaggcccacagagagggcatccccgtgatgagacccctgtgggtgcagtacccccaggacgtgaccaccttcaacatcgacgaccagtacctgctgggcgacgccctgctggtgcaccccgtgagcgacagcggcgcccacggcgtgcaggtgtacctgcccggccagggcgaggtgtggtacgacatccagagctaccagaagcaccacggcccccagaccctgtacctgcccgtgaccctgagcagcatccccgtgttccagagaggcggcaccatcgtgcccagatggatgagagtgagaagaagcagcgagtgcatgaaggacgaccccatcaccctgttcgtggccctgagcccccagggcaccgcccagggcgagctgttcctggacgacggccacaccttcaactaccagaccagacaggagttcctgctgagaagattcagcttcagcggcaacaccctggtgagcagcagcgccgaccccgagggccacttcgagacccccatctggatcgagagagtggtgatcatcggcgccggcaagcccgccgccgtggtgctgcagaccaagggcagccccgagagcagactgagcttccagcacgaccccgagaccagcgtgctggtgctgagaaagcccggcatcaacgtggccagcgactggagcatccacctgagatag

SEQ ID NO: 259640 - protein, 178 aa, Artificial Sequence
  derived and/or modified sequence
MPRLHDHFWSCSCAHSARRRGPPRASAKLDFANNVQLSLTLAALSLGLWWTFDRSRSGLGLGITIAFLATLITQFLVYNGVYQYTSPDFLYIRSWLPCIFFSGGVTVGNIGRQLAMLIPFCEELNLKTTWLFHKTRSNYRVFLKSPIVIESSKPPILRARKILEENLTVDYDKDYLFS

SEQ ID NO: 259641 - DNA, 537 bp, Artificial Sequence
  derived and/or modified sequence
atgccgcgcctgcatgatcacttttggtcatgcagctgtgcacacagcgctagacgtcggggaccccctagagcatcagccaaactggatttcgccaacaacgtgcaactgtccctgaccctggcagccttgtcattgggactctggtggaccttcgacaggagtagatcaggcttaggcctcggaattacgatcgccttcttggccactttgattacacagttcctggtatataatggcgtgtatcagtatacctcccctgatttcctttatataagatcatggctgccttgcattttttttagcggaggtgtgacagttggaaacattggcaggcagctggcaatgttgattcctttctgtgaagagttgaacctgaagaccacctggctgtttcacaaaaccagatcaaactatcgcgtgttcttgaaatccccaatagtcatcgagtcttcgaagccgcctattctacgcgctcgcaaaattcttgaggagaacttgaccgttgattatgacaaagactacctgtttagctag

SEQ ID NO: 259642 - DNA, 2623 bp, Artificial Sequence
  derived and/or modified sequence
cacgcccctgggcggtgcgcgcgggcggtgggtaggccgggcaggctcacgtgatgcgggccccgcggcccgccatataaacccgcgcgcccgccaggcgctgcggccgtcccgggccgtgactcctcctttcccccgccccgcctccgttcggagagccggcgggcgggcgcctctcggccaggaagcgcctcttggacgcgtgtgaccgatgcccagattgcacgaccacttctggagctgctcctgtgcgcacagcgcgaggcgccgaggccccccgcgagccagcgccaaattggattttgccaataatgtccagctgtccttgactttagcagccctatctttgggcctttggtggacatttgatcgttccagaagtggccttgggctggggatcaccatagcttttctagctacgctgatcacgcagtttctcgtgtataatggtgtctatcagtatacatccccagatttcctctatattcgttcttggctcccttgtatatttttctcaggaggcgtcacggtggggaacataggacgacagttagctatgctgatacccttctgtgaggagttgaatttgaagaccacttggctgtttcacaaaaccagaagtaattacagggtgttcctgaaaagccccatagtgattgagtcttcaaaaccaccgattctgagagcaaggaagattttggaagaaaatctgactgtggattatgacaaagattatcttttttcttaagtaatctatttagatcgggctgactgtacaaatgactcctggaaaaaactcttcacctagtctagaatagggaggtggagaatgatgacttaccctgaagtcttcccttgactgcccgcactggcgcctgtctgtgccctggagcattctgcccaggctacgtgggttcaggcaggtggcagcttcccaagtattcgatttcattcatgtgattaaaacaagttgccatatttcaaagccttgaactaagactcaattaccaacccgcagttttgtgtcagtgcccaaaggaggtaggttgatggtgcttaacaaacatgaagtatggtgtaataggaataatatttatccaaaagatttttaaaaatagggctgtgtttaaaaaaaaaaacaaaacaagaaaagcagcagtgattatagagaggtcacactctaagtggggtcgcggcgtggccacgcttcacggtcacgctcgtccgtcctgcagtggcgtgtttacatggtcacacgtgtgtgtatcaccagtgggtcaactgcttgtcattcctcccgtggcagtttgtgtagacaatcttactgagcaaaaggcaatgaaaagtcttggttcccacactgcgatatattggaattttcacctcagtttatgaagtttatttcgaaatccatagtcatctaagaatgaatacctgtctgccatgtatttcaatcttagtgagccaaaattgtttgtttgttactacagaatagagatgactgttttttgccacagccctatggaatttgcaatctgtgattgccttgtaaaaaggagagtgcatatggcactgcattaaacgtgtggtgtttctagtcaatgatattggtgagcacaatgtattcatttaatggcatagaccataccagacctaatttgcaagtattgggtcttaaacttcaagtgcaatgtatatgaaaaccaatctgagccttgtatctcttaaatatttattttttttaacgtgtgagatgttcgagagaaggttctccattcatttcagtgctgcctggaggaaactcggcaatgatttctttcagttgtgaagttcctttcgtgttacaccctccactgaaccctcaaccttcgaaatactccagttttgtgggtttggtcatttttacttataaatttacctttttgtattttgcaatttacatgtgtttggtttgttttaaattctgtgaaagtggcttgattaaaagactccttttaaatggaagccaccagtcagcagaatggaagcttagaggaacttgcctgtgagcgctggtctttgtgtttggttttgtgatgtaacgatctttgctggggttttttgctttgttttgagggaaatgtcttggagtaaattttaagttcctggagttaatttgttttacaggaattttgttttttaaaaaaataggatcattctgaactttggaatgacccccttatatattttctgaaaatgaaaacagttacatgaaaaaaatttccaatgaagatgtcagcattttatgaaaaaccagaagttattagatgaaagcagcgagtgaatctttaaaacagacttgatcacgcacacacaataagtctttctctccgaaaccggaagtaaatctatatctgttagaaataatgtagccaaaagaatgtaaatttgaggatttttttgccaatagtttatagaaaatatatgaaccaaagtgatttgagtttgtaaaaatgtaaaatagtatgaacaaaatttgcactctaccagatttgaacatctagtgaggttcacattcatactaagttttcaacattgtgttctttttgcattcattttttacttttattaaaggttcaaaacc

SEQ ID NO: 259643 - DNA, 537 bp, Artificial Sequence
  derived and/or modified sequence
atgccccggctgcatgaccacttctggagctgcagctgtgcccacagcgccaggagaagaggccccccccgggccagcgccaagctggactttgccaacaacgtgcagctgagcctgaccctggccgccctgagcctgggcctgtggtggacctttgacaggagccgcagcggcctgggcctgggcatcaccatcgccttcctggccaccctcatcacccagttcctggtgtacaatggagtgtaccagtacaccagcccagacttcctgtacatccgctcctggctgccctgcatcttcttcagcggcggcgtgacagtgggcaacatcggccggcagctggccatgctgatccccttctgtgaggagctgaacctgaagaccacctggctgttccacaagaccaggagcaactacagagtcttcctgaagagccccatcgtgattgagagcagcaagccacccatcctgcgggccaggaagatcctggaggagaacctgactgtggactatgacaaggactacctgttctcctag

SEQ ID NO: 259644 - DNA, 537 bp, Artificial Sequence
  derived and/or modified sequence
atgccccggctgcacgaccacttctggagctgcagctgcgcccactctgctagacgacgcggaccgcctagggcttctgccaaacttgactttgccaataacgttcagctttccttgaccctcgccgccctgagcctgggattgtggtggacattcgaccggtcacggtcaggcctggggctggggatcacaatcgcctttcttgcaacactcatcacccagttcctggtgtacaatggggtctatcaatatactagccccgacttcctctacatccggagctggctgccatgtatattcttcagcggaggagtcacagtgggaaatatcgggagacagttggccatgctgatccctttttgcgaagagctgaatctgaagactacttggctgtttcacaagactcgttccaactatagggtgttccttaagtcaccaatcgtaattgagagctcgaagccaccaatcctgagggcacgtaagatcctcgaggaaaacctcacagtggactacgacaaagattatttattttcatag

SEQ ID NO: 259645 - DNA, 537 bp, Artificial Sequence
  derived and/or modified sequence
atgccgcgtctccatgatcacttttggtcatgctcctgtgcacatagcgcacggaggaggggcccacctagagcctctgccaaactggacttcgctaacaacgtgcagttgtccctgactctcgcagctctatctctggggctatggtggacatttgacagaagtcgttctggtctagggctcgggattacaatcgccttccttgccacccttatcactcagtttctggtgtataacggagtgtatcagtacacatccccggattttctctacatacggtcctggctcccttgtattttcttctcagggggagtgacagtgggcaatattgggcgtcaactcgctatgttaataccattttgcgaagaattaaaccttaaaaccacatggctgtttcacaagacccggtctaactatagggtgtttctcaaatcaccgatcgtaatcgaatcctctaagcccccaattctccgcgcacggaaaatcctggaagaaaaccttacagtggattacgacaaggattatctgttctcatag

SEQ ID NO: 259646 - DNA, 537 bp, Artificial Sequence
  derived and/or modified sequence
atgcccagactgcacgaccacttctggagctgcagctgcgcccacagcgccagaagaagaggcccccccagagccagcgccaagctggacttcgccaacaacgtgcagctgagcctgaccctggccgccctgagcctgggcctgtggtggaccttcgacagaagcagaagcggcctgggcctgggcatcaccatcgccttcctggccaccctgatcacccagttcctggtgtacaacggcgtgtaccagtacaccagccccgacttcctgtacatcagaagctggctgccctgcatcttcttcagcggcggcgtgaccgtgggcaacatcggcagacagctggccatgctgatccccttctgcgaggagctgaacctgaagaccacctggctgttccacaagaccagaagcaactacagagtgttcctgaagagccccatcgtgatcgagagcagcaagccccccatcctgagagccagaaagatcctggaggagaacctgaccgtggactacgacaaggactacctgttcagctag

SEQ ID NO: 259647 - protein, 164 aa, Artificial Sequence
  derived and/or modified sequence
MPRLHDHFWSCSCAHSARRRGPPRASAAGLAAKVGEMINVSVSGPSLLAAHGAPDADPAPRGRSAAMSGPEPGSPYPNTWHHRLLQRSLVLFSVGVVLALVLNLLQIQRNVTLFPEEVIATIFSSAWWVPPCCGTAAGIHPQISSIFVLGSLVYFSQEASRWGT

SEQ ID NO: 259648 - DNA, 372 bp, Artificial Sequence
  derived and/or modified sequence
atgcctcgcctgcacgatcatttctggtcttgctcatgtgctcattccgccaggagacgaggaccgcctagggcaagcgcagctggcttagcagctaaggtcggcgagatgatcaacgtctcagtgagcggaccatcgctcttggctgcccatggggcaccagatgcggatccagccccacgcgggcggagtgccgctatgtcgggaccggagcccggaagcccctatcccaatacatggcatcacaggctcctgcagcgctccttggtgttatttagtgttggggtggtcctggctctggtgctgaacctgctgcaaatccagaggaatgtaacactcttccctgaggaagtaatagcgaccatcttctag

SEQ ID NO: 259649 - DNA, 495 bp, Artificial Sequence
  derived and/or modified sequence
atgccaaggcttcatgatcacttttggtcgtgcagctgtgctcacagcgctcgacgcagaggacccccccgggcgagcgcagcgggcctcgctgcgaaggttggcgagatgatcaatgtttctgttagtggcccttccctcctcgcagctcacggagctcctgatgcagaccccgcaccaaggggccggtcagccgcaatgtcagggcctgagccaggatctccctatcccaacacttggcaccacaggctcttacagcgcagcctggttctcttctctgtgggagtggtgttagcactggtactgaacctccttcagattcagagaaatgtgacgctgtttcctgaggaggtgattgccactattttttccagcgcctggtgggtaccaccttgctgcggcacagccgccggcattcatccacagatatcttccatattcgtattaggcagtctggtgtacttctcccaggaggcatctaggtgggggacatag

SEQ ID NO: 259650 - DNA, 596 bp, Artificial Sequence
  derived and/or modified sequence
atgcgggccccgcggcccgccatataaacccgcgcgcccgccaggcgctgcggccgtcccgggccgtgactcctcctttcccccgccccgcctccgttcggagagccggcgggcgggcgcctctcggccaggtacgcggccggctgggataggggtcgcgggcgggctttggtcgcgcagcagccggtcctccccggaggaagcgcctcttggacgcgtgtgaccgatgcccagattgcacgaccacttctggagctgctcctgtgcgcacagcgcgaggcgccgaggccccccgcgagccagcgccgcggggctggcggccaaggttggggagatgatcaacgtttccgtgtccgggccctccctgctggcggcccacggtgccccggacgctgaccccgcgcccaggggccgcagtgctgcgatgagcggccccgagcccggcagcccctaccccaacacctggcatcatcgcctgttgcagaggagcctcgtgctcttctcggttggggtggtcctagccctggtgctcaacctgctgcagatccagaggaatgtcactctcttccccgaggaggtgatcgccaccatctttt

SEQ ID NO: 259651 - DNA, 1127 bp, Artificial Sequence
  derived and/or modified sequence
gggccgtgactcctcctttcccccgccccgcctccgttcggagagccggcgggcgggcgcctctcggccaggaagcgcctcttggacgcgtgtgaccgatgcccagattgcacgaccacttctggagctgctcctgtgcgcacagcgcgaggcgccgaggccccccgcgagccagcgccgcggggctggcggccaaggttggggagatgatcaacgtttccgtgtccgggccctccctgctggcggcccacggtgccccggacgctgaccccgcgcccaggggccgcagtgctgcgatgagcggccccgagcccggcagcccctaccccaacacctggcatcatcgcctgttgcagaggagcctcgtgctcttctcggttggggtggtcctagccctggtgctcaacctgctgcagatccagaggaatgtcactctcttccccgaggaggtgatcgccaccatcttttcctccgcctggtgggtccctccctgctgcgggacagcagctggtatacatccccagatttcctctatattcgttcttggctcccttgtatatttttctcaggaggcgtcacggtggggaacataggacgacagttagctatgggtgttcctgaaaagccccatagtgattgagtcttcaaaaccaccgattctgagagcaaggaagattttggaagaaaatctgactgtggattatgacaaagattatcttttttcttaagtaatctatttagatcgggctgactgtacaaatgactcctggaaaaaactcttcacctagtctagaatagggaggtggagaatgatgacttaccctgaagtcttcccttgactgcccgcactggcgcctgtctgtgccctggagcattctgcccaggctacgtgggttcaggcaggtggcagcttcccaagtattcgatttcattcatgtgattaaaacaagttgccatatttcaaagccttgaactaagactcaattaccaacccgcagttttgtgtcagtgcccaaaggaggtaggttgatggtgcttaacaaacatgaagtatggtgtaataggaataatatttatccaaaagatttttaaaaatagggctgtgtttaaaaaaaaaaacaaaacaa

SEQ ID NO: 259652 - DNA, 372 bp, Artificial Sequence
  derived and/or modified sequence
atgccccggctgcatgaccacttctggagctgcagctgtgcccacagcgccaggagaagaggccccccccgggccagcgctgctggcctggccgccaaggtgggggagatgatcaacgtgtctgtgtctggccccagcctgctggccgcccatggagccccagatgctgaccctgccccccggggccgctctgctgccatgagcggccctgagcccggcagcccctaccccaacacctggcaccaccggctgctgcagaggagcctggtgctcttctctgtgggcgtggtgctggccctggtgctgaacctgctgcagatccagagaaatgtgaccctcttccctgaggaggtgattgccaccatcttctag

SEQ ID NO: 259653 - DNA, 495 bp, Artificial Sequence
  derived and/or modified sequence
atgccccggctgcatgaccacttctggagctgcagctgtgcccacagcgccaggagaagaggccccccccgggccagcgctgctggcctggccgccaaggtgggggagatgatcaacgtgtctgtgtctggccccagcctgctggccgcccatggagccccagatgctgaccctgccccccggggccgctctgctgccatgagcggccctgagcccggcagcccctaccccaacacctggcaccaccggctgctgcagaggagcctggtgctcttctctgtgggcgtggtgctggccctggtgctgaacctgctgcagatccagagaaatgtgaccctcttccctgaggaggtgattgccaccatcttcagcagcgcctggtgggtgcccccctgctgcggcacagctgctggcatccacccccagatcagcagcatctttgtgctgggcagcctggtgtacttcagccaggaggccagccgctggggcacctag

SEQ ID NO: 259654 - DNA, 372 bp, Artificial Sequence
  derived and/or modified sequence
atgccccggctgcacgaccacttctggagctgcagctgcgcccactctgccagaaggcgcggcccacctagagccagtgctgcaggtcttgcggctaaagtgggcgagatgatcaacgtgtcggtttctggtccctctctgctcgccgcccatggggctccagatgccgatccagcaccgcgcggcagatccgctgccatgagtggcccggagcccgggagcccatacccgaacacctggcatcacaggcttctgcagcgctccctggtgttgttttctgtcggcgttgttctagcgctcgtgcttaatcttctccagattcagagaaatgtgaccctcttcccagaggaggtaattgccaccattttttag

SEQ ID NO: 259655 - DNA, 495 bp, Artificial Sequence
  derived and/or modified sequence
atgccccggctgcacgaccacttctggagctgcagctgcgcccactctgctaggcggcggggcccacctagggcctccgccgcggggttggctgctaaagtgggcgagatgatcaacgttagtgtgagtggtcccagcctgctggcagctcacggcgcgccagatgctgacccagctcctcggggccggtccgcggccatgtccggtcctgaaccgggttccccttacccaaatacatggcaccatagactgctgcagcggagtctggtgctgttttccgtcggagtggtactcgcactggtactcaacctgttgcaaatccaacggaacgtgacactcttccctgaagaagtaattgccactatcttttccagcgcatggtgggtgcccccgtgctgtggaacagcagccggcatccacccgcagatttccagtatcttcgttctcgggagcttggtctatttctcacaagaggcctcccggtggggcacctag

SEQ ID NO: 259656 - DNA, 372 bp, Artificial Sequence
  derived and/or modified sequence
atgccccgtctacatgaccacttttggtcgtgtagctgtgcccacagcgcacgtcggaggggtccacctcgcgcaagcgccgcaggattagctgctaaagtcggtgagatgatcaacgtgtcagtgagcggcccatcactgctcgcagcccacggcgctccggacgccgacccagcacccagggggaggtcggctgctatgagtggccctgagccaggcagcccctaccctaatacttggcatcaccgcctgctccagcggtcactggtcctcttcagtgtaggggtcgtgcttgctctggtattgaatctgcttcagatccagcgtaacgtcaccttgttccctgaggaagtgattgccaccatcttttag

SEQ ID NO: 259657 - DNA, 495 bp, Artificial Sequence
  derived and/or modified sequence
atgccacgcctgcatgatcacttttggtcttgttcatgcgcccattctgccaggcggcgtggacctccacgcgcttcagccgcaggactcgccgcaaaggtcggcgagatgattaacgtgagtgtgagtggaccttcgctcttggccgcacacggggctccggacgctgaccctgctccacggggacgttccgctgccatgagcggacctgagcccggtagtccttatccgaacacttggcaccataggctgctgcagcgtagtctagtcctgttctcggtgggtgtggttttggctctcgttcttaaccttctccaaatccagcggaatgttactttgttcccagaagaagtcattgcaaccattttcagcagcgcctggtgggtaccaccgtgctgtggtacagccgctggcattcacccacagatttcttctatctttgttttaggatccctggtgtactttagccaggaggcaagtaggtggggtacctag

SEQ ID NO: 259658 - DNA, 372 bp, Artificial Sequence
  derived and/or modified sequence
atgcccagactgcacgaccacttctggagctgcagctgcgcccacagcgccagaagaagaggcccccccagagccagcgccgccggcctggccgccaaggtgggcgagatgatcaacgtgagcgtgagcggccccagcctgctggccgcccacggcgcccccgacgccgaccccgcccccagaggcagaagcgccgccatgagcggccccgagcccggcagcccctaccccaacacctggcaccacagactgctgcagagaagcctggtgctgttcagcgtgggcgtggtgctggccctggtgctgaacctgctgcagatccagagaaacgtgaccctgttccccgaggaggtgatcgccaccatcttctag

SEQ ID NO: 259659 - DNA, 495 bp, Artificial Sequence
  derived and/or modified sequence
atgcccagactgcacgaccacttctggagctgcagctgcgcccacagcgccagaagaagaggcccccccagagccagcgccgccggcctggccgccaaggtgggcgagatgatcaacgtgagcgtgagcggccccagcctgctggccgcccacggcgcccccgacgccgaccccgcccccagaggcagaagcgccgccatgagcggccccgagcccggcagcccctaccccaacacctggcaccacagactgctgcagagaagcctggtgctgttcagcgtgggcgtggtgctggccctggtgctgaacctgctgcagatccagagaaacgtgaccctgttccccgaggaggtgatcgccaccatcttcagcagcgcctggtgggtgcccccctgctgcggcaccgccgccggcatccacccccagatcagcagcatcttcgtgctgggcagcctggtgtacttcagccaggaggccagcagatggggcacctag

SEQ ID NO: 259660 - protein, 2171 aa, Artificial Sequence
  derived and/or modified sequence
MDEEEDGAGAEESGQPRSFMRLNDLSGAGGRPGPGSAEKDPGSADSEAEGLPYPALAPVVFFYLSQDSRPRSWCLRTVCNPWFERISMLVILLNCVTLGMFRPCEDIACDSQRCRILQAFDDFIFAFFAVEMVVKMVALGIFGKKCYLGDTWNRLDFFIVIAGMLEYSLDLQNVSFSAVRTVRVLRPLRAINRVPSMRILVTLLLDTLPMLGNVLLLCFFVFFIFGIVGVQLWAGLLRNRCFLPENFSLPLSVDLERYYQTENEDESPFICSQPRENGMRSCRSVPTLRGDGGGGPPCGLDYEAYNSSSNTTCVNWNQYYTNCSAGEHNPFKGAINFDNIGYAWIAIFQVITLEGWVDIMYFVMDAHSFYNFIYFILLIIVGSFFMINLCLVVIATQFSETKQRESQLMREQRVRFLSNASTLASFSEPGSCYEELLKYLVYILRKAARRLAQVSRAAGVRVGLLSSPAPLGGQETQPSSSCSRSHRRLSVHHLVHHHHHHHHHYHLGNGTLRAPRASPEIQDRDANGSRRLMLPPPSTPALSGAPPGGAESVHSFYHADCHLEPVRCQAPPPRSPSEASGRTVGSGKVYPTVHTSPPPETLKEKALVEVAASSGPPTLTSLNIPPGPYSSMHKLLETQSTGACQSSCKISSPCLKADSGACGPDSCPYCARAGAGEVELADREMPDSDSEAVYEFTQDAQHSDLRDPHSRRQRSLGPDAEPSSVLAFWRLICDTFRKIVDSKYFGRGIMIAILVNTLSMGIEYHEQPEELTNALEISNIVFTSLFALEMLLKLLVYGPFGYIKNPYNIFDGVIVVISVWEIVGQQGGGLSVLRTFRLMRVLKLVRFLPALQRQLVVLMKTMDNVATFCMLLMLFIFIFSILGMHLFGCKFASERDGDTLPDRKNFDSLLWAIVTVFQILTQEDWNKVLYNGMASTSSWAALYFIALMTFGNYVLFNLLVAILVEGFQAEGDANKSESEPDFFSPSLDGDGDRKKCLALVSLGEHPELRKSLLPPLIIHTAATPMSLPKSTSTGLGEALGPASRRTSSSGSAEPGAAHEMKSPPSARSSPHSPWSAASSWTSRRSSRNSLGRAPSLKRRSPSGERRSLLSGEGQESQDEEESSEEERASPAGSDHRHRGSLEREAKSSFDLPDTLQVPGLHRTASGRGSASEHQDCNGKSASGRLARALRPDDPPLDGDDADDEGNLSKGERVRAWIRARLPACCLERDSWSAYIFPPQSRFRLLCHRIITHKMFDHVVLVIIFLNCITIAMERPKIDPHSAERIFLTLSNYIFTAVFLAEMTVKVVALGWCFGEQAYLRSSWNVLDGLLVLISVIDILVSMVSDSGTKILGMLRVLRLLRTLRPLRVISRAQGLKLVVETLMSSLKPIGNIVVICCAFFIIFGILGVQLFKGKFFVCQGEDTRNITNKSDCAEASYRWVRHKYNFDNLGQALMSLFVLASKDGWVDIMYDGLDAVGVDQQPIMNHNPWMLLYFISFLLIVAFFVLNMFVGVVVENFHKCRQHQEEEEARRREEKRLRRLEKKRRSKEKQMAEAQCKPYYSDYSRFRLLVHHLCTSHYLDLFITGVIGLNVVTMAMEHYQQPQILDEALKICNYIFTVIFVLESVFKLVAFGFRRFFQDRWNQLDLAIVLLSIMGITLEEIEVNASLPINPTIIRIMRVLRIARVLKLLKMAVGMRALLDTVMQALPQVGNLGLLFMLLFFIFAALGVELFGDLECDETHPCEGLGRHATFRNFGMAFLTLFRVSTGDNWNGIMKDTLRDCDQESTCYNTVISPIYFVSFVLTAQFVLVNVVIAVLMKHLEESNKEAKEEAELEAELELEMKTLSPQPHSPLGSPFLWPGVEGPDSPDSPKPGALHPAAHARSASHFSLEHPTMQPHPTELPGPDLLTVRKSGVSRTHSLPNDSYMCRHGSTAEGPLGHRGWGLPKAQSGSVLSVHSQPADTSYILQLPKDAPHLLQPHSAPTWGTIPKLPPPGRSPLAQRPLRRQAAIRTDSLDVQGLGSREDLLAEEEPPSPRDLKKCYSVEAQSCQRRPTSWLDEQRRHSIAVSCLDSGSQPHLGTDPSNLGGQPLGGPGSRPKKKLSPPSITIDPPESQGPRTPPSPGICLRRRAPSSDSKDPLASGPPDSMAASPSPKKDVLSLSGLSSDPADLDP

SEQ ID NO: 259661 - DNA, 6516 bp, Artificial Sequence
  derived and/or modified sequence
atggacgaggaggaggacggcgccggcgccgaggagagcggccagcccagaagcttcatgagactgaacgacctgagcggcgccggcggcagacccggccccggcagcgccgagaaggaccccggcagcgccgacagcgaggccgagggcctgccctaccccgccctggcccccgtggtgttcttctacctgagccaggacagcagacccagaagctggtgcctgagaaccgtgtgcaacccctggttcgagagaatcagcatgctggtgatcctgctgaactgcgtgaccctgggcatgttcagaccctgcgaggacatcgcctgcgacagccagagatgcagaatcctgcaggccttcgacgacttcatcttcgccttcttcgccgtggagatggtggtgaagatggtggccctgggcatcttcggcaagaagtgctacctgggcgacacctggaacagactggacttcttcatcgtgatcgccggcatgctggagtacagcctggacctgcagaacgtgagcttcagcgccgtgagaaccgtgagagtgctgagacccctgagagccatcaacagagtgcccagcatgagaatcctggtgaccctgctgctggacaccctgcccatgctgggcaacgtgctgctgctgtgcttcttcgtgttcttcatcttcggcatcgtgggcgtgcagctgtgggccggcctgctgagaaacagatgcttcctgcccgagaacttcagcctgcccctgagcgtggacctggagagatactaccagaccgagaacgaggacgagagccccttcatctgcagccagcccagagagaacggcatgagaagctgcagaagcgtgcccaccctgagaggcgacggcggcggcggccccccctgcggcctggactacgaggcctacaacagcagcagcaacaccacctgcgtgaactggaaccagtactacaccaactgcagcgccggcgagcacaaccccttcaagggcgccatcaacttcgacaacatcggctacgcctggatcgccatcttccaggtgatcaccctggagggctgggtggacatcatgtacttcgtgatggacgcccacagcttctacaacttcatctacttcatcctgctgatcatcgtgggcagcttcttcatgatcaacctgtgcctggtggtgatcgccacccagttcagcgagaccaagcagagagagagccagctgatgagagagcagagagtgagattcctgagcaacgccagcaccctggccagcttcagcgagcccggcagctgctacgaggagctgctgaagtacctggtgtacatcctgagaaaggccgccagaagactggcccaggtgagcagagccgccggcgtgagagtgggcctgctgagcagccccgcccccctgggcggccaggagacccagcccagcagcagctgcagcagaagccacagaagactgagcgtgcaccacctggtgcaccaccaccaccaccaccaccaccactaccacctgggcaacggcaccctgagagcccccagagccagccccgagatccaggacagagacgccaacggcagcagaagactgatgctgcccccccccagcacccccgccctgagcggcgccccccccggcggcgccgagagcgtgcacagcttctaccacgccgactgccacctggagcccgtgagatgccaggcccccccccccagaagccccagcgaggccagcggcagaaccgtgggcagcggcaaggtgtaccccaccgtgcacaccagccccccccccgagaccctgaaggagaaggccctggtggaggtggccgccagcagcggcccccccaccctgaccagcctgaacatcccccccggcccctacagcagcatgcacaagctgctggagacccagagcaccggcgcctgccagagcagctgcaagatcagcagcccctgcctgaaggccgacagcggcgcctgcggccccgacagctgcccctactgcgccagagccggcgccggcgaggtggagctggccgacagagagatgcccgacagcgacagcgaggccgtgtacgagttcacccaggacgcccagcacagcgacctgagagacccccacagcagaagacagagaagcctgggccccgacgccgagcccagcagcgtgctggccttctggagactgatctgcgacaccttcagaaagatcgtggacagcaagtacttcggcagaggcatcatgatcgccatcctggtgaacaccctgagcatgggcatcgagtaccacgagcagcccgaggagctgaccaacgccctggagatcagcaacatcgtgttcaccagcctgttcgccctggagatgctgctgaagctgctggtgtacggccccttcggctacatcaagaacccctacaacatcttcgacggcgtgatcgtggtgatcagcgtgtgggagatcgtgggccagcagggcggcggcctgagcgtgctgagaaccttcagactgatgagagtgctgaagctggtgagattcctgcccgccctgcagagacagctggtggtgctgatgaagaccatggacaacgtggccaccttctgcatgctgctgatgctgttcatcttcatcttcagcatcctgggcatgcacctgttcggctgcaagttcgccagcgagagagacggcgacaccctgcccgacagaaagaacttcgacagcctgctgtgggccatcgtgaccgtgttccagatcctgacccaggaggactggaacaaggtgctgtacaacggcatggccagcaccagcagctgggccgccctgtacttcatcgccctgatgaccttcggcaactacgtgctgttcaacctgctggtggccatcctggtggagggcttccaggccgagggcgacgccaacaagagcgagagcgagcccgacttcttcagccccagcctggacggcgacggcgacagaaagaagtgcctggccctggtgagcctgggcgagcaccccgagctgagaaagagcctgctgccccccctgatcatccacaccgccgccacccccatgagcctgcccaagagcaccagcaccggcctgggcgaggccctgggccccgccagcagaagaaccagcagcagcggcagcgccgagcccggcgccgcccacgagatgaagagcccccccagcgccagaagcagcccccacagcccctggagcgccgccagcagctggaccagcagaagaagcagcagaaacagcctgggcagagcccccagcctgaagagaagaagccccagcggcgagagaagaagcctgctgagcggcgagggccaggagagccaggacgaggaggagagcagcgaggaggagagagccagccccgccggcagcgaccacagacacagaggcagcctggagagagaggccaagagcagcttcgacctgcccgacaccctgcaggtgcccggcctgcacagaaccgccagcggcagaggcagcgccagcgagcaccaggactgcaacggcaagagcgccagcggcagactggccagagccctgagacccgacgacccccccctggacggcgacgacgccgacgacgagggcaacctgagcaagggcgagagagtgagagcctggatcagagccagactgcccgcctgctgcctggagagagacagctggagcgcctacatcttccccccccagagcagattcagactgctgtgccacagaatcatcacccacaagatgttcgaccacgtggtgctggtgatcatcttcctgaactgcatcaccatcgccatggagagacccaagatcgacccccacagcgccgagagaatcttcctgaccctgagcaactacatcttcaccgccgtgttcctggccgagatgaccgtgaaggtggtggccctgggctggtgcttcggcgagcaggcctacctgagaagcagctggaacgtgctggacggcctgctggtgctgatcagcgtgatcgacatcctggtgagcatggtgagcgacagcggcaccaagatcctgggcatgctgagagtgctgagactgctgagaaccctgagacccctgagagtgatcagcagagcccagggcctgaagctggtggtggagaccctgatgagcagcctgaagcccatcggcaacatcgtggtgatctgctgcgccttcttcatcatcttcggcatcctgggcgtgcagctgttcaagggcaagttcttcgtgtgccagggcgaggacaccagaaacatcaccaacaagagcgactgcgccgaggccagctacagatgggtgagacacaagtacaacttcgacaacctgggccaggccctgatgagcctgttcgtgctggccagcaaggacggctgggtggacatcatgtacgacggcctggacgccgtgggcgtggaccagcagcccatcatgaaccacaacccctggatgctgctgtacttcatcagcttcctgctgatcgtggccttcttcgtgctgaacatgttcgtgggcgtggtggtggagaacttccacaagtgcagacagcaccaggaggaggaggaggccagaagaagagaggagaagagactgagaagactggagaagaagagaagaagcaaggagaagcagatggccgaggcccagtgcaagccctactacagcgactacagcagattcagactgctggtgcaccacctgtgcaccagccactacctggacctgttcatcaccggcgtgatcggcctgaacgtggtgaccatggccatggagcactaccagcagccccagatcctggacgaggccctgaagatctgcaactacatcttcaccgtgatcttcgtgctggagagcgtgttcaagctggtggccttcggcttcagaagattcttccaggacagatggaaccagctggacctggccatcgtgctgctgagcatcatgggcatcaccctggaggagatcgaggtgaacgccagcctgcccatcaaccccaccatcatcagaatcatgagagtgctgagaatcgccagagtgctgaagctgctgaagatggccgtgggcatgagagccctgctggacaccgtgatgcaggccctgccccaggtgggcaacctgggcctgctgttcatgctgctgttcttcatcttcgccgccctgggcgtggagctgttcggcgacctggagtgcgacgagacccacccctgcgagggcctgggcagacacgccaccttcagaaacttcggcatggccttcctgaccctgttcagagtgagcaccggcgacaactggaacggcatcatgaaggacaccctgagagactgcgaccaggagagcacctgctacaacaccgtgatcagccccatctacttcgtgagcttcgtgctgaccgcccagttcgtgctggtgaacgtggtgatcgccgtgctgatgaagcacctggaggagagcaacaaggaggccaaggaggaggccgagctggaggccgagctggagctggagatgaagaccctgagcccccagccccacagccccctgggcagccccttcctgtggcccggcgtggagggccccgacagccccgacagccccaagcccggcgccctgcaccccgccgcccacgccagaagcgccagccacttcagcctggagcaccccaccatgcagccccaccccaccgagctgcccggccccgacctgctgaccgtgagaaagagcggcgtgagcagaacccacagcctgcccaacgacagctacatgtgcagacacggcagcaccgccgagggccccctgggccacagaggctggggcctgcccaaggcccagagcggcagcgtgctgagcgtgcacagccagcccgccgacaccagctacatcctgcagctgcccaaggacgccccccacctgctgcagccccacagcgcccccacctggggcaccatccccaagctgcccccccccggcagaagccccctggcccagagacccctgagaagacaggccgccatcagaaccgacagcctggacgtgcagggcctgggcagcagagaggacctgctggccgaggaggagccccccagccccagagacctgaagaagtgctacagcgtggaggcccagagctgccagagaagacccaccagctggctggacgagcagagaagacacagcatcgccgtgagctgcctggacagcggcagccagccccacctgggcaccgaccccagcaacctgggcggccagcccctgggcggccccggcagcagacccaagaagaagctgagcccccccagcatcaccatcgacccccccgagagccagggccccagaaccccccccagccccggcatctgcctgagaagaagagcccccagcagcgacagcaaggaccccctggccagcggcccccccgacagcatggccgccagccccagccccaagaaggacgtgctgagcctgagcggcctgagcagcgaccccgccgacctggacccctag

SEQ ID NO: 259662 - DNA, 6516 bp, Artificial Sequence
  derived and/or modified sequence
atggatgaggaggaggatggcgccggcgctgaggagtcgggtcagccaagatcattcatgaggctgaatgacctcagtggagctggggggagacccggacccggtagcgccgagaaggaccctggatctgctgatagtgaggcagaagggcttccttatcccgccctggctcctgtcgtgttcttctatctgtcccaggatagcaggccaagatcctggtgcttaaggaccgtgtgcaatccctggtttgagcggatctccatgctggtgatactcctaaactgcgtcaccttggggatgtttcgaccttgtgaggacatcgcttgtgattcccagcgatgccggatactgcaggcgttcgacgatttcatcttcgctttttttgctgtggaaatggttgtcaagatggtcgctctgggcatctttgggaaaaaatgttaccttggggacacatggaacagactggactttttcatcgtgatcgcagggatgcttgagtacagcctagacctacagaacgtcagcttcagcgcagtgcggacggtgagagtattacgacctttacgtgctattaaccgggtcccgtctatgcgcatcctcgtcaccttgctgctggatacactccctatgctgggaaatgtcctgctgttgtgctttttcgtatttttcattttcgggatcgttggggtacagctctgggccggtctcctcagaaatcgatgtttccttcctgagaactttagtctgccgctcagcgtggatctagaaagatactatcaaacagaaaatgaggacgagtcacctttcatctgttctcagccgcgcgaaaacggaatgcggagctgcagatctgtgcccaccctcagaggagacggcggcggcggaccaccatgtggcctcgattatgaggcttacaacagctccagcaacacaacttgcgttaactggaatcagtactataccaactgttcggctggggaacataacccattcaaaggagcaatcaactttgataacatcggctacgcctggatagctatcttccaagtgataacgctcgaaggttgggtcgatatcatgtatttcgtgatggacgcacacagtttttataactttatctatttcatcctactcatcatcgtggggtctttttttatgatcaacctctgcttagtggtaatcgccacacagtttagcgagactaagcagcgagagagccaactgatgcgcgaacagagggttagattcctgagcaatgcgtcgaccctagcaagcttttccgaacctggcagctgctacgaagagctcctgaaatatctggtttatattttgagaaaggctgccaggagactcgcgcaagtgtcaagagcagctggcgtgcgcgtcggcctgctttctagcccggccccacttgggggtcaagagacccagccgagctccagctgttcgcgcagccaccgccgcctatccgtacaccacctcgtacaccaccaccaccatcatcatcaccattatcatctcggtaacgggaccctccgagcaccccgggctagcccagaaatccaagacagagatgcaaacggttcccggagactcatgctgccccctcctagtacacctgctctgagcggtgcaccccctggtggggccgagtcagtccactcgttctatcacgccgactgtcacctggaaccagtgcgatgtcaggcccctccgcccagaagcccctctgaggcgagtggacggactgtgggctcggggaaagtgtaccccacagtgcacacaagtccacctccagaaaccctcaaggaaaaagcccttgtggaagttgctgcctcctccggtccacccacgctcacttccctgaacattcccccgggtccatatagctcaatgcacaaactgttggagacccagtccactggggcctgccagtcttcttgcaaaatcagcagtccatgcctgaaggcagacagcggcgcgtgtggccctgacagctgtccttattgtgcgcgcgcaggagcaggcgaagtcgagctagcagaccgagaaatgcccgactcggattccgaggccgtgtatgagttcacccaggacgctcagcactccgaccttcgagacccacactccagaaggcagaggagccttggtcctgatgccgagccatccagcgtgctcgccttctggagactgatctgtgacaccttccgaaagattgtggactcaaaatactttggcagggggatcatgatagctatcctcgtaaatactctgtccatgggcatcgagtatcacgagcagcccgaggaattgactaatgccctggagatttctaacattgtattcacttctctcttcgcacttgaaatgctcctgaagcttcttgtttacgggccattcggctatatcaaaaacccttacaatatcttcgatggggtgatcgttgtgatctccgtttgggagattgtcgggcagcagggcggggggttgagtgtgctgagaactttcagattgatgcgggtcctgaagctggtcagattccttccggcgctgcaaagacagctagtcgttctgatgaagacaatggataacgtggccaccttttgcatgctgttgatgctttttatctttatattctcgatcttgggaatgcatctcttcggctgtaaattcgcgagcgaacgggacggagacacactgccagaccggaagaatttcgattcactgttgtgggcaattgtcaccgtgttccagattttgacccaggaggattggaacaaggttctgtataatggcatggcttccacttcctcctgggccgctttatattttattgccctgatgacgttcggaaattatgtgttgttcaatctactggtcgcaattctcgtggagggttttcaggcagagggagacgccaataagtctgaaagtgagccggactttttctcgccaagcttggacggtgatggtgaccgaaagaaatgcttggctctggtgagtctcggcgaacaccccgaattgcggaagagtctactgccccccttgattattcacaccgcagcaaccccaatgtccctgccgaaatcaacttcgactggtctgggcgaggcattgggccccgctagccggcgaacaagctccagcggttctgccgagccaggggcagcccacgaaatgaagtctccaccgtccgcgagatcttctccccactctccctggtcagccgcctcctcctggacatccagacgaagctcacggaactcgctgggacgtgcgccctccctgaaaaggcgcagtccctctggtgagaggcgttcccttctgtctggtgagggccaagaatctcaggacgaagaagagtcttcagaggaggagagagcctcgcccgccggctctgatcataggcataggggctcactggagcgagaggcgaaatcgagcttcgacctgcctgatactctgcaggtgcccgggcttcaccgcactgccagtggacgtgggtccgcgagtgagcaccaggattgtaacgggaagtcagcatctggccgcttggctagagccctccgaccagatgaccctcctctagacggcgatgacgcggacgacgaaggcaatctgtcaaaaggagaaagggtccgagcttggattcgggcgaggctgccagcttgctgtcttgagcgcgacagttggtccgcgtacattttccctccgcagagtagatttagacttctgtgtcatcgtatcattacgcataagatgttcgaccatgtggtactggtcatcatatttctcaattgtattactatcgccatggaacggcctaagatcgatcctcattccgctgaaagaatttttctcacactgtccaactatatttttactgctgttttcctggcagaaatgactgtcaaagtggtcgccttggggtggtgcttcggcgagcaggcctacctgcgaagcagctggaacgtcctggatggcctactggtactgatatctgtgattgatattctggtgtccatggtgagcgattccggaacaaagattctagggatgctccgcgtgcttcgtctgctacggacactcagacctcttcgagtaatctctagggcccagggcctgaaattagtagttgagacgttgatgtcatccctgaagcccatcggcaatatcgtggtgatctgttgcgcattctttataatcttcggcatcctgggggtgcagctgttcaaaggcaagtttttcgtatgtcagggcgaagatacacgcaacattacaaacaagtctgactgtgccgaagccagttacaggtgggtacgccacaaatacaattttgacaatttaggacaagcactgatgtcactgttcgttttagcttctaaagatggatgggtggacattatgtacgatggcctcgatgcggtaggagtcgatcagcagcccataatgaatcacaacccatggatgctgctgtattttatctccttcttgctgattgtagccttttttgtactgaatatgttcgtgggcgtggtcgtagaaaattttcacaaatgtcggcaacatcaggaggaggaagaagctaggcggagggaggagaagcgtttgaggcgactggagaaaaagagaagaagtaaggagaaacagatggccgaagcgcagtgcaaaccatattattcagattattctcgttttcgcctgctggtccatcacctgtgtacatcccattacctggatttgtttataaccggagttatcggactcaatgtggtgacaatggcaatggagcactatcagcagccgcagatcctggacgaggcactgaagatttgtaactacatcttcaccgttatattcgtccttgagtctgttttcaagttagtcgccttcggatttcgcaggtttttccaggatagatggaatcagctggatctggcaatcgtgttgctcagcatcatggggattacacttgaagagatcgaagtgaacgcaagtctgcccataaatcccactattattagaatcatgcgagtcctgcgtatcgcacgggtgctgaagcttctgaagatggcagttgggatgagggcccttttagatacagttatgcaggcactgcctcaggtgggaaatctgggactgctcttcatgctgttgtttttcatattcgccgccctgggggtggaactattcggcgatctggagtgtgatgagacacatccgtgcgaggggctggggcggcacgcgacatttcgcaacttcggcatggcctttctaactctgttcagagtttctactggggacaattggaatggcataatgaaggatacgcttagggactgcgaccaggaatctacctgctacaacaccgttatctcccccatctactttgtttcatttgtgttgactgctcagttcgttcttgtgaacgtggtgattgcagtgctgatgaaacatctcgaagagtccaataaagaggctaaggaagaggccgaacttgaggctgaactggagctggaaatgaaaaccctctccccccagccacattcgcccctggggagtccattcctgtggcccggggtcgagggcccggattcgccagatagccctaagccgggagcgctacatcccgccgcgcatgcaagatcggcgagccacttttctctggagcaccccacgatgcaacctcaccctaccgagctccctggaccggatctactcaccgttcgcaaaagcggcgtgtctagaactcacagccttccaaatgacagctacatgtgcaggcacggaagcaccgccgaaggtcctctgggtcacagggggtgggggctgccgaaggcacaaagcggcagtgtgctgtcagtgcacagtcagcctgccgacaccagctatatcctgcagttgcccaaagacgccccccatctgctgcagcctcactcggctccaacgtggggaactattccaaagctgcctcctcctggccgcagccccctcgcccaaagacctctgagacggcaggcggcaatcaggactgattctctcgacgtgcagggcttagggagcagggaggacctgctggccgaggaagagccaccgagccccagagacttgaaaaagtgctattccgtagaggcacagtcctgtcaacgaaggcctacctcttggctggacgagcagcgcaggcattccattgccgtttcctgcttggactcaggctcgcagccacatctcggaacggacccctctaacctgggcggccagcccttgggcggcccagggtctaggcctaaaaaaaagcttagtcccccttctattacgatcgacccgccagagtcccaaggcccacggacaccccccagccccgggatttgcctgaggcgtcgggcaccctctagcgattcaaaggatcccctcgctagcggccccccagattccatggcggcttccccatcccccaaaaaagacgtgctatctctgagtggtctctcgtccgaccctgcagacctggatccgtag

SEQ ID NO: 259663 - DNA, 6516 bp, Artificial Sequence
  derived and/or modified sequence
atggatgaggaggaggatggagctggagctgaggagagcggccagcccaggagcttcatgaggctgaatgacctgagcggggccggcggccggcccggccctggcagcgctgagaaggaccccggcagcgctgacagcgaggccgagggcctgccctacccagccctggcccctgtggtgttcttctacctgagccaggacagccggcccaggtcctggtgcctgaggacagtgtgcaacccctggtttgagcgcatctccatgctggtgatcctgctgaactgtgtgaccctgggcatgttccggccctgtgaagatattgcctgtgacagccagcgctgccgcatcctgcaggcctttgatgacttcatctttgccttctttgctgtggagatggtggtgaagatggtggccctgggcatctttgggaagaagtgctacctgggggacacctggaaccggctggacttcttcatcgtgattgctggcatgctggagtacagcctggacctgcagaatgtgtccttctctgctgtgaggacagtgcgggtgctgcggcccctgcgggccatcaacagagtgcccagcatgaggatcctggtgaccctgctgctggacaccctgcccatgctgggcaatgtgctgctgctgtgcttctttgtgttcttcatctttggaattgtgggcgtgcagctgtgggccggcctgctgaggaaccgctgcttcctgcctgagaacttcagcctgcccctgtctgtggacctggagcgctactaccagacagaaaatgaagatgagagccccttcatctgcagccagccccgggagaatggcatgaggagctgccgctctgtgcccaccctgcggggagatggcggcggcggccccccctgtggcctggactatgaggcctacaacagcagcagcaacaccacctgtgtgaactggaaccagtactacaccaactgcagcgctggggagcacaaccccttcaagggggccatcaactttgacaacatcggctacgcctggatcgccatcttccaggtgatcaccctggagggctgggtggacatcatgtactttgtgatggatgcccacagcttctacaacttcatctacttcatcctgctgatcatcgtgggcagcttcttcatgatcaacctgtgcctggtggtgattgccacccagttcagcgagaccaagcagcgggagagccagctgatgagggagcagagggtgcgcttcctgagcaatgccagcaccctggccagcttcagcgagcccggcagctgctatgaggagctgctgaagtacctggtgtacatcctgaggaaggccgcccggcggctggcccaggtgtccagagctgctggggtgcgggtgggcctgctgagcagccctgcccccctgggcggccaggagacccagcccagcagcagctgcagccgcagccaccggcggctgtctgtgcaccacctggtgcaccaccaccaccaccaccaccaccactaccacctgggcaatggcaccctgcgggccccccgggccagccctgagatccaggacagagatgccaacggcagccggcggctgatgctgcccccacccagcaccccagccctgagcggggcccctcctggaggagctgagagcgtgcacagcttctaccacgccgactgccacctggagcctgtgcgctgccaggcccccccacccaggagccccagcgaggccagcggccgcacagtgggcagcggcaaggtgtaccccaccgtgcacaccagccccccacctgagaccctgaaggagaaggccctggtggaggtggccgccagcagcggcccccccaccctgaccagcctgaacatccccccaggcccctacagctccatgcacaagctgctggagacccagagcactggagcctgccagagcagctgcaagatcagcagcccctgcctgaaggctgacagcggggcctgtggccctgacagctgcccctactgtgcccgggccggggccggggaggtggagctggccgaccgggagatgccagacagcgacagcgaggccgtgtatgagttcacccaggatgcccagcacagcgacctgcgggacccccacagccggcggcagaggagcctgggcccagatgctgagcccagctctgtgctggccttctggaggctcatctgtgacaccttcaggaagatcgtggacagcaagtacttcggccggggcatcatgattgccatcctggtgaacaccctgtccatgggcatcgagtaccacgagcagcctgaggagctgaccaatgccctggagatcagcaacatcgtgttcaccagcctgtttgccctggagatgctgctgaagctgctggtgtatggccccttcggctacatcaagaacccctacaacatctttgatggagtcatcgtggtgatctctgtgtgggagatcgtgggccagcagggcggcggcctgtctgtgctgcggaccttccggctgatgagggtgctgaagctggtgcgcttcctgcctgccctgcagaggcagctggtggtgctgatgaagaccatggacaacgtggccaccttctgcatgctgctgatgctgttcatcttcatcttcagcatcctgggcatgcacctgtttggctgcaagtttgccagcgagagagatggagacaccctgcctgacaggaagaactttgacagcctgctgtgggccatcgtgacagtgttccagatcctgacccaggaggactggaacaaggtgctgtacaacggcatggccagcaccagctcctgggccgccctgtacttcatcgccctgatgaccttcggcaactacgtgctcttcaacctgctggtggccatcctggtggagggcttccaggccgagggagatgccaacaagtctgagagcgagccagacttcttcagccccagcctggatggagatggagacaggaagaagtgcctggccctggtgtccctgggggagcaccctgagctgaggaagagcctgctgcccccactcatcatccacacagctgccacccccatgagcctgcccaagagcaccagcacaggcctgggggaggccctgggccctgccagcaggaggaccagcagcagcggcagcgctgagcccggggccgcccacgagatgaagagccccccatctgcccggagcagcccccacagcccctggagcgctgccagctcctggaccagcagaagaagcagcaggaacagcctgggccgggcccccagcctgaagaggaggagccccagcggggagaggaggagcctgctgagcggggagggccaggagagccaggatgaggaggagagcagcgaggaggagcgggccagccctgctggcagtgaccaccgccaccggggcagcctggagcgggaggccaagagcagctttgacctgcctgacaccctgcaggtgcccggcctgcacaggacagccagcggccggggcagcgccagcgagcaccaggactgcaatggcaagagcgccagcggccgcctggcccgggccctgcggccagatgacccccccctggatggagatgatgctgatgatgagggcaacctgagcaaaggagagcgggtgcgggcctggatccgggcccggctgcctgcctgctgcctggagcgggacagctggagcgcctacatcttccccccccagagccgcttccggctgctgtgccaccgcatcatcacccacaagatgtttgaccacgtggtgctggtgatcatcttcctgaactgcatcaccatcgccatggagcggcccaagattgacccccacagcgctgagcgcatcttcctgaccctgagcaactacatcttcaccgctgtgttcctggccgagatgacagtgaaggtggtggccctgggctggtgctttggagagcaggcctacctgcggagctcctggaatgtgctggatggcctgctggtgctgatcagcgtcatcgacatcctggtgtccatggtgtctgacagcggcaccaagatcctgggcatgctgcgggtgctgcggctgctgcggaccctgcggcccctgcgggtcatcagccgggcccagggcctgaagctggtggtggagaccctgatgagcagcctgaagcccatcggcaacatcgtggtgatctgctgtgccttcttcatcatcttcggcatcctgggcgtgcagctgttcaagggcaagttctttgtgtgccagggcgaggacaccaggaacatcaccaacaagagtgactgtgccgaggccagctaccgctgggtgcgccacaagtacaactttgacaacctgggccaggccctgatgagcctgtttgtgctggccagcaaggatggctgggtggacatcatgtatgatggcctggatgctgtgggcgtggaccagcagcccatcatgaaccacaacccctggatgctgctgtacttcatctccttcctgctgattgtggccttctttgtgctgaacatgtttgtgggcgtggtggtggagaacttccacaagtgccggcagcaccaggaggaggaggaggccaggagaagagaggagaagaggctgcggcggctggagaagaagaggaggagcaaggagaagcagatggccgaggcccagtgcaagccctactacagcgactacagccgcttccggctgctggtgcaccacctgtgcaccagccactacctggacctcttcatcaccggggtgattggcctgaatgtggtgaccatggccatggagcactaccagcagccccagatcctggatgaggccctgaagatctgcaactacatcttcaccgtcatctttgtgctggagagcgtcttcaagctggtggccttcggcttccgccgcttcttccaggaccgctggaaccagctggacctggccatcgtgctgctgagcatcatgggcatcaccctggaggagattgaggtgaatgccagcctgcccatcaaccccaccatcatccgcatcatgagggtgctgcgcatcgcccgggtgctgaagctgctgaagatggctgtgggcatgagggccctgctggacacagtgatgcaggccctgccccaggtgggcaacctgggcctgctcttcatgctgctcttcttcatctttgctgccctgggcgtggagctgtttggagacctggagtgtgatgagacccacccctgtgagggcctgggcagacatgccaccttcaggaactttggcatggccttcctgaccctcttccgggtgtccactggagacaactggaatggcatcatgaaggacaccctgcgggactgtgaccaggagagcacctgctacaacacagtcatcagccccatctactttgtgtcctttgtgctgacagcccagtttgtgctggtgaatgtggtgattgctgtgctgatgaagcacctggaggagagcaacaaggaggccaaggaggaggccgagctggaggccgagctggagctggagatgaagaccctgagcccccagccccacagccccctgggcagccccttcctgtggccaggagtggagggccctgacagcccagacagccccaagccaggggccctgcaccctgctgcccacgcccggagcgccagccacttcagcctggagcaccccaccatgcagccccaccccacagagctgcccggccctgacctgctgactgtgaggaagagcggcgtgtccaggacccacagcctgcccaatgacagctacatgtgcagacatggcagcacagctgagggccccctgggccaccggggctggggcctgcccaaggcccagagcggctctgtgctgtctgtgcacagccagcctgctgacaccagctacatcctgcagctgcccaaggatgccccccacctgctgcagccccacagcgcccccacctggggcaccatccccaagctgcccccacctggccgcagccccctggcccagaggcccctgcggcggcaggccgccatcagaacagacagcctggatgtgcagggcctgggcagccgggaggacctgctggccgaggaggagccccccagcccccgggacctgaagaagtgctacagcgtggaggcccagagctgccagaggcggcccacctcctggctggatgagcagaggaggcacagcattgctgtgtcctgcctggacagcggcagccagccccacctgggcacagaccccagcaacctgggcggccagcccctgggcggccctggcagccggcccaagaagaagctgagcccccccagcatcaccattgatcctcctgagagccagggccccaggaccccacccagccctggcatctgcctgcggcggcgggcccccagcagtgacagcaaggaccccctggccagcggccccccagacagcatggccgccagccccagccccaagaaggatgtgctgagcctgagcggcctgagcagtgaccctgctgacctggacccctag

SEQ ID NO: 259664 - DNA, 6516 bp, Artificial Sequence
  derived and/or modified sequence
atggacgaggaggaggacggcgccggcgccgaggagagcggccagccccgctccttcatgcgccttaacgatctttccggggcaggtgggcggccgggacccggatcagcagaaaaagacccgggcagtgctgactctgaggctgagggcctcccttatccggcactcgctccagtagtattcttctacctgagtcaggattctcggccccgctcttggtgcctccgcaccgtgtgtaatccatggtttgagcggatctccatgctggtgatcctgcttaactgcgttaccctgggtatgttcaggccatgcgaagatatcgcatgtgactctcaaagatgtaggattctgcaagccttcgatgacttcatctttgcatttttcgctgtggagatggttgtaaaaatggtagccctgggtattttcggaaaaaaatgctacctcggagatacatggaatcgcctggacttttttatcgtcattgccggaatgctggagtattcacttgatctccagaacgttagctttagtgctgtgcgaacagttagggtgctgcgacctctgagagccatcaatcgggtgccgtcaatgagaatcctggtgactcttcttctggacaccttgcctatgctcggaaacgtgctgttactctgctttttcgtcttctttatatttgggattgtgggagtccagctgtgggctggccttctaaggaaccgatgtttcctgcctgagaatttctcactccctcttagtgttgatctggagaggtattaccagacggaaaatgaggatgagtctcctttcatctgttcacagccacgggagaacggtatgcggagctgcaggagcgtgccaacccttcgaggggatggtgggggaggacccccttgcgggctcgactatgaggcctacaacagtagcagcaatactacttgcgtcaactggaaccagtactatactaattgttcggccggtgagcacaacccgttcaagggcgccattaattttgacaacatcggctatgcttggatagcaatattccaggtaataacactggagggctgggtagacatcatgtacttcgtcatggacgcccatagcttttataatttcatttactttatacttctgatcatcgtgggctccttttttatgattaatctctgtctcgtcgtcatcgcaacacagttttcagagacaaagcagcgggagagtcagttaatgagagagcagagagtccggtttcttagcaatgcctctactttggccagcttttccgaacccgggagttgctacgaagagctgttaaaatatttggtatacatcctccgcaaagcggctagaaggctggcacaggtgtctcgcgctgcgggggttcgggtcggcctcctatcctcaccagctcccctggggggccaagaaacacaaccttccagttcctgtagtagatcacaccggagattaagcgtgcatcatttggtacaccaccaccatcaccaccaccaccactatcacttaggtaatggcactttgagagccccaagagccagtcctgagatccaagaccgagacgccaatggatcccgtagactgatgctgcccccgccttcaacccctgcactgtccggcgccccgcccggaggagcagaaagcgtgcacagtttttatcatgccgactgtcatctcgaacctgtgcgctgccaagcacctccaccaagatctcccagcgaggccagtggtaggaccgtgggttctggaaaagtgtacccaacagtgcacacttctccaccacccgagaccctgaaagagaaggcgctggtcgaggttgccgcaagctcaggccctcccactcttacaagccttaatattcctcctggcccctactctagcatgcacaaacttctggagactcaaagtacaggggcctgtcagtcttcctgtaagatcagctcgccctgcttgaaagccgattccggggcctgcggtcctgacagttgtccatactgtgcccgggccggggcaggtgaggtcgaactcgctgacagggagatgcccgattcagacagcgaagctgtgtacgaattcacccaggatgcccagcattctgacctccgggatcctcactcccggcgtcagcggtcattgggccctgacgctgagcctagctctgttctggccttttggcgcctcatctgcgacactttccgtaagatcgtggacagcaagtactttggaagaggtataatgatagctattcttgttaacactctgtccatggggatcgagtatcacgagcagcccgaggagttgaccaacgctctcgagatttccaacatcgtttttacctcactgttcgccctcgaaatgctcttgaaactgctcgtttatgggcctttcgggtatatcaagaacccctacaacatctttgacggggtgatcgtggtgatctccgtttgggaaattgttggacagcaagggggtggattaagtgtgctgcggaccttccgcctcatgcgggtgctaaagcttgtccggtttctgccagcacttcagagacaattagtcgtgctgatgaaaaccatggataatgtggccacattctgcatgctgctgatgttatttatatttatattcagcatcttgggcatgcacctctttggatgcaaattcgcaagcgagcgggatggagacactctccccgatcgtaagaactttgatagtctgttgtgggccattgtgactgtgtttcaaattctgactcaagaggactggaacaaggtgttgtacaatggtatggcatcaacatcttcctgggccgctttatacttcattgcattgatgacttttggcaactacgtgctgttcaatttgcttgttgccatccttgtggaaggattccaagctgagggggatgcgaataaatctgagagcgaacccgatttctttagcccttccctagacggcgacggggatagaaaaaaatgcctcgcactcgttagcttgggcgagcacccagaactgaggaagtccctcctgccacctttaattatccacactgccgcaacacccatgagcctaccgaaaagcacatctacgggcctgggggaagcacttggaccagcgtcacgacggacgagtagtagcgggtcagccgaaccgggggctgctcacgaaatgaagtcgccgcctagcgcaaggagcagcccacacagtccctggtcggctgcttctagctggacttcacggcggtccagtcgaaattcactcggccgagctccttctctcaagaggcgcagcccatccggcgagaggcgtagcttactttccggcgagggacaagaaagccaggacgaagaagagtccagtgaggaggagagagcctcacccgccggatccgaccacaggcaccgcggctccttagaacgcgaggccaagagttccttcgacttgccagacacccttcaggtccctggccttcatcgcactgcttccggtagaggctccgctagcgagcatcaagactgcaacggtaaaagtgcatccggtcgtctggcccgcgcccttcgcccagatgaccccccactcgacggagacgacgcagatgatgaaggaaatctgagcaaaggtgaacgagtgcgggcttggatcagagcacgactacccgcctgttgcctggagagggattcttggagtgcttacatcttcccgcctcagagccggttcagactactttgccaccgcattataacccacaagatgttcgatcacgtagttctagtcattattttcttgaactgtatcactattgcaatggagcgcccaaagatcgacccacactcagccgagaggatctttttaaccctcagtaactacatatttactgctgtatttctcgctgaaatgactgtgaaggtggtcgcactgggctggtgcttcggggagcaggcttatctaagatccagttggaacgtgctcgacggtctgctggttctcatctcagtcattgacattctggtgagtatggtcagtgactcgggaacaaaaatcctggggatgttaagagtgttaaggctactcagaaccttgcggcccctgcgagtcatcagcagagcacagggtctgaaactagttgtggagaccctcatgtcttctctgaaacccatcggtaacatcgtagtgatttgctgcgctttcttcattatatttggaatcctgggcgtccagctctttaaaggtaagttcttcgtatgccagggggaagacacaaggaatatcacaaataagagtgattgcgccgaggccagctacaggtgggtaaggcataagtataacttcgataatctcggccaggcacttatgtcacttttcgttctcgcatcaaaggatggttgggtggacatcatgtatgatggtttggatgccgtgggggtcgaccagcagccaatcatgaatcataatccctggatgctcctttactttatctcttttctgctgatagtagctttcttcgtcctgaatatgttcgtgggcgtggtggtcgaaaactttcataagtgtcgccagcaccaggaagaggaagaggctaggaggcgagaggagaaaaggcttagacggttagagaagaagcggcgctcaaaggagaagcagatggcagaggcccaatgcaagccttattactccgactatagccgctttagactgcttgtgcatcatctttgtacatcccattatctggacctgtttatcaccggagtaattggattaaatgtggtaactatggccatggagcattaccagcagcctcagatccttgacgaggccctaaaaatatgtaactacatttttactgtcatttttgtgctggaatcagtttttaagctggtggcctttgggtttagaagattcttccaagatcggtggaatcagttggatttagcaatcgtgttgttgtctattatggggatcaccttggaagaaattgaggtcaacgcctcactcccaataaaccctacaattattcgcatcatgagagtactccgcatcgcaagagtcctgaagttattgaagatggcagtcggcatgagagcactgctggacactgttatgcaagcgctgccacaggttggtaatctaggattactgttcatgttactattcttcatctttgctgcactaggcgtcgagctgttcggagatctggagtgtgatgaaacacatccttgcgagggccttggacggcacgctacattcaggaactttgggatggcgttcttaacactgtttcgggtaagcaccggcgataattggaatggcataatgaaagacacacttcgggactgtgatcaagaaagtacttgttacaacaccgtgatctccccgatttatttcgtaagtttcgtgctcacggcccagtttgtcttggtgaacgtggtgatagcggttctgatgaagcacctggaggagtcgaacaaagaggccaaggaagaggccgagctggaggctgagttggaattggagatgaagaccctcagcccccagccgcattctccgctcggcagtccatttttgtggcctggcgtagaggggcccgattcgcccgattcacctaaacccggggcattacatccagctgcacatgcccggagtgcttcacactttagcctggagcacccaacaatgcaaccacatcctactgagctgcccggtcctgatctgctgacagtacggaagtcaggggtttcccggactcattcactacccaacgattcctatatgtgccgacatggcagcaccgcagaaggacccctcgggcatagaggatggggcctgccaaaggcccagtccggcagcgtgttgtcagtccactcacagccagctgatacatcttacatcctccagctgcctaaagatgcccctcatctgctacagcctcacagcgcccccacatggggaacaatccctaagttgcctccccccggccggtcacccctggcacagcgcccactgcggagacaggccgcaattcgcactgactcactggacgttcaggggttgggtagtcgggaggatctactggctgaagaggagcccccttccccacgggatctgaagaaatgctacagtgtcgaggcccagtcctgtcagcgtcgtcccactagctggctggatgaacaacgcagacactccatcgcagtaagctgcctagatagcgggtcacagccacacttgggaactgatccgagcaacctaggcggccaaccattgggaggccctggctccaggcctaagaaaaagctgtctccccctagtatcaccatcgatccccccgaaagccaaggtccccgcacacctcccagcccaggaatttgtctacgtcgtcgcgcccccagttcagattctaaagacccgcttgcgtccggccctcccgatagcatggctgcctcgcccagccctaagaaggacgtcctgagtctctccgggctcagctcagacccagcagacctggatccctag

SEQ ID NO: 259665 - DNA, 6515 bp, Artificial Sequence
  derived and/or modified sequence
atggatgaggaagaggatggggctggagccgaggagagcgggcagcctagaagcttcatgcgcctcaatgacctgagtggcgcagggggtagaccaggccctggttcagccgaaaaagatccaggcagcgctgactccgaagccgagggactcccctatcccgctctggcccctgtagtctttttctatttaagccaggacagtcgcccaaggtcctggtgccttagaacagtgtgtaatccttggtttgagcgcatttctatgctggtgattctgctgaattgcgtcacgctggggatgtttcggccttgcgaagacatcgcttgtgatagccagcggtgtagaatacttcaggcattcgacgacttcatctttgctttttttgctgtggagatggtggttaagatggtcgccttgggaatcttcggcaagaaatgttatttgggcgacacatggaataggctggatttcttcattgtgattgctggtatgctagagtattcccttgatctccagaacgtttccttttcagcggttcggactgttagagtgctgcgccctttaagggcgatcaacagggttccctccatgcgcattttagtgaccttactgctggatacattgccaatgctgggcaatgtgctcctgttatgctttttcgttttcttcatctttggaatcgtgggcgttcagttgtgggctggccttttgagaaacaggtgttttctgcccgagaatttctccctgccattatctgtggatctagagcggtactaccagactgagaatgaagacgaatctccctttatatgctctcagccacgggagaatggtatgcggagctgccggtccgtgccaacacttaggggagacggaggaggaggcccaccatgcgggctggactacgaagcctataacagcagcagtaacaccacctgcgtcaactggaatcagtattacacaaattgcagtgcgggagagcataatcccttcaaaggcgcaatcaactttgataatattggctatgcttggattgccatctttcaggtgataacgttggagggctgggtggacattatgtatttcgtcatggatgctcactctttttataattttatctattttatcctgcttattatcgtaggatccttctttatgataaatttatgtttggtagtcatcgctacacagttctcagagacaaagcagagggagtcccagttgatgcgagagcagcgcgttagatttctgtctaatgcctctactctggcatctttttccgagcccggttcctgctatgaggaactgctgaaatacctggtatacatcctgcgaaaggctgctagacgcctcgcgcaggtgtcccgagcagcaggcgtgagagtcggcctgctatcaagtccggctcccctgggaggccaggagacccagccttcttcaagttgtagccgcagccatagacggttgtctgtccaccatctggtacatcaccatcaccatcaccatcaccattaccatctaggtaatgggacgcttcgggcacctagggcctcccctgagattcaggatcgggacgcaaacggctctcgtaggctgatgcttccaccaccttctaccccagccctgtctggcgctccacccggaggggctgagtctgtgcacagcttctatcacgctgattgccacctggaacctgtgcgatgccaggccccaccacccagatctccaagcgaagcctcggggaggacagtcggttccgggaaagtctaccctactgtgcatactagcccaccacctgagacactgaaagaaaaagccctcgtcgaagtggcagccagcagcgggcctcctacattaacgtcattgaatatcccccctgggccttattctagtatgcacaagcttctggaaacccagtctactggcgcatgccagtccagctgtaagattagcagtccatgtctcaaggccgactccggggcatgcggtccggactcttgtccctattgcgcgagggccggagcaggggaggttgagctcgccgaccgcgagatgccagatagcgacagcgaggccgtgtacgagttcacacaggatgcacagcattctgatttacgggatccacacagcagaagacagcgctccctgggacccgacgcagagccttcttccgtcctagccttctggagactcatctgcgacactttccgaaagattgtggacagtaagtactttggcagaggaatcatgatcgccattctcgtcaataccctaagtatgggaattgaatatcacgagcagccagaagagctgacaaacgctcttgagatctcaaacattgtcttcacttctctgttcgctctcgaaatgctgctgaaactgttagtctacggcccatttggatacattaagaatccttataacatcttcgatggagtgattgtggtcatcagcgtttgggaaatcgtgggccaacaggggggtggtctgtccgtgctgcggacctttcgcttaatgagggtgcttaaacttgtccggtttctgcctgctctccaacgacaattggtggtgctgatgaagactatggataatgttgccacattctgcatgttgctcatgctgtttatctttattttctctatcttggggatgcacctgttcggctgcaaatttgccagcgagcgtgatggggacaccttgcccgatcgtaagaatttcgatagtcttctgtgggcgatagtcactgtctttcagatcctgactcaagaagattggaacaaggtactctataatggtatggcaagcacatcttcctgggcagccctgtacttcatagccctgatgacttttggtaactatgtcttgttcaacttattagtggccatcctggtagaaggatttcaagcagaaggagacgccaataaaagcgaatctgagcctgatttcttcagcccatctctggacggtgatggagatcggaagaagtgcctggcgcttgtttccctgggtgaacacccggagctgaggaaatctctcctgcctcctctcataattcacactgccgctacaccaatgagtctccctaagagcactagcacgggcctgggtgaggcactgggcccagcttcccgccgtactagttctagcgggtcagctgagcccggagccgctcatgagatgaagtcaccaccatcagcgcgttcctctcctcattccccgtggagcgccgcttcttcatggacctctagaagaagttccagaaattccctggggagagctcccagcctgaagcgccgtagcccgtccggagagagacgatcacttctgtctggtgagggacaggaatcccaggacgaggaggaatcgtcagaagaggagagagcttcccctgcaggctctgatcatagacatagaggttcattggagcgagaagcaaagagctcgttcgacttgcctgacactctgcaggtgcctggcctgcaccggactgctagcggacgtgggagcgctagtgaacatcaggactgcaacggcaagtcggcttccgggaggctcgccagggctctgcggccagacgatccgcctctggacggtgacgatgccgacgatgaagggaatctgtccaagggcgaacgagtgcgagcttggattagagcaagattgccagcctgctgcctggaacgggactcctggtctgcctacatctttcctcctcagtcccgctttcgtttactctgccatcgcatcattactcataaaatgtttgatcacgtggtgcttgtcatcatcttccttaactgtattacaatcgccatggagcggccaaaaatcgacccccacagtgccgagcgaatcttcttaactctttccaactatattttcaccgctgtgttccttgcagagatgacagtgaaagtcgtggcactgggttggtgcttcggcgaacaagcctacctgaggagctcttggaatgtgctcgatgggctcctggtgctaatatctgtgatagatatccttgtgtccatggtctctgattccgggacgaaaattctaggtatgctgcgcgtattgcggctgctgcgcacactgaggccattaagggtgatatccagggctcaaggtttaaaactagtggtggagactctgatgtccagcctcaaacctataggcaacatcgtggtcatctgttgcgcatttttcattatttttggaattttgggcgtccagctattcaaaggaaaattttttgtgtgtcagggagaagacacccggaatattacaaataaaagtgattgcgcagaggcatcctaccggtgggtgcggcacaaatacaactttgataatctgggacaagcattaatgagtttatttgtcctcgcctcaaaagacggatgggttgacattatgtatgacgggcttgatgcggtcggtgtcgatcagcaacctatcatgaatcataacccttggatgctcctctatttcatcagctttctcctgattgttgcattcttcgtgcttaatatgtttgttggcgtggtggtggagaacttccacaaatgccggcagcaccaggaggaggaagaagcacgaagaagggaggagaaaaggttaagacgactggagaagaaacggaggtccaaggaaaagcagatggctgaagcccaatgtaagccctactacagtgactacagcaggtttaggctactggtgcaccacttatgcacctcacactatctcgatctattcatcactggagttataggactaaacgttgtgaccatggccatggaacattatcagcagcctcagatcctggacgaagcgctgaaaatctgcaactatattttcaccgtcatctttgtgctggagagcgtcttcaaactggtggctttcggctttaggagattcttccaggaccggtggaaccagctcgatctagcgatagtcctgctgagtatcatgggtataacgctggaggagatcgaagtaaatgcttccttgccaattaatcccacaattattaggattatgagggtcctacgtattgccagggtacttaagcttctgaagatggcggttggaatgcgggcactcctggacacggtcatgcaggcactgccacaggtgggtaaccttggcctgctgtttatgcttctgtttttcatctttgcggctctgggcgttgagcttttcggtgatcttgagtgtgatgaaactcatccttgcgaaggcctgggaagacatgccacctttcggaactttggaatggcgtttctcacgctgttccgggtgtccacaggcgacaactggaacggcataatgaaggacactctgcgggattgtgatcaagagtccacatgttataatacagtcatctccccgatttattttgttagtttcgtgttaacagctcagttcgtcctggtgaatgtggtaatagcagtgcttatgaaacatcttgaagaaagcaataaggaagcgaaggaagaggcagaactcgaggccgagctagagctggagatgaaaaccctgtcccctcagcctcattcaccacttgggtccccattcctgtggcctggcgttgaggggccagacagcccagactcccctaagccaggagccttgcatccggctgcacacgcaagatctgcttcacatttctctctcgaacatccgaccatgcaaccacaccccaccgagctgcctgggccagatctgttgacagttcggaagtccggtgtttcccgaacacattccctcccaaatgattcctatatgtgccgccatggatccactgcggaaggtccattaggacaccgcggttggggcttgccaaaggcacagagtgggtcagtgttgagtgtgcatagccagcccgctgatacttcctatatcctccagctcccgaaagatgcaccacatctgctgcagcctcactcggccccaacatggggtaccatccctaaactgcctcctcccggtcgatccccactcgcccagagacccttaaggaggcaagctgcaatacgcaccgattcactggacgtacagggcctgggcagtagagaggatctcctggcggaggaggagccccctagtcccagggacctgaagaaatgttatagtgtcgaagcccaatcatgtcagcgtaggcctacatcctggctggacgagcagcgcaggcactccattgccgtgtcatgcctggactcggggtcccaaccgcatctcggcaccgatcctagcaacctgggcggacagcctctggggggtccaggttcacgcccaaaaaagaagctatctcctccctccattacaatcgatcccccagagtcacagggacctcgtactccccctagcccaggcatctgcctcaggcggagagcgccatccagcgattcgaaggacccgttggccagtggacccccagattcgatggcagccagtcctagccccaagaaggacgtgttaagccttagcgggttaagttcagatcccgcagaccttgacccgta

SEQ ID NO: 259666 - DNA, 7030 bp, Artificial Sequence
  derived and/or modified sequence
atggacgaggaggaggatggagcgggcgccgaggagtcgggacagccccggagcttcatgcggctcaacgacctgtcgggggccgggggccggccggggccggggtcagcagaaaaggacccgggcagcgcggactccgaggcggaggggctgccgtacccggcgctggccccggtggttttcttctacttgagccaggacagccgcccgcggagctggtgtctccgcacggtctgtaacccctggtttgagcgcatcagcatgttggtcatccttctcaactgcgtgaccctgggcatgttccggccatgcgaggacatcgcctgtgactcccagcgctgccggatcctgcaggcctttgatgacttcatctttgccttctttgccgtggagatggtggtgaagatggtggccttgggcatctttgggaaaaagtgttacctgggagacacttggaaccggcttgactttttcatcgtcatcgcagggatgctggagtactcgctggacctgcagaacgtcagcttctcagctgtcaggacagtccgtgtgctgcgaccgctcagggccattaaccgggtgcccagcatgcgcatccttgtcacgttgctgctggatacgctgcccatgctgggcaacgtcctgctgctctgcttcttcgtcttcttcatcttcggcatcgtcggcgtccagctgtgggcagggctgcttcggaaccgatgcttcctacctgagaatttcagcctccccctgagcgtggacctggagcgctattaccagacagagaacgaggatgagagccccttcatctgctcccagccacgcgagaacggcatgcggtcctgcagaagcgtgcccacgctgcgcggggacgggggcggtggcccaccttgcggtctggactatgaggcctacaacagctccagcaacaccacctgtgtcaactggaaccagtactacaccaactgctcagcgggggagcacaaccccttcaagggcgccatcaactttgacaacattggctatgcctggatcgccatcttccaggtcatcacgctggagggctgggtcgacatcatgtactttgtgatggatgctcattccttctacaatttcatctacttcatcctcctcatcatcgtgggctccttcttcatgatcaacctgtgcctggtggtgattgccacgcagttctcagagaccaagcagcgggaaagccagctgatgcgggagcagcgtgtgcggttcctgtccaacgccagcaccctggctagcttctctgagcccggcagctgctatgaggagctgctcaagtacctggtgtacatccttcgtaaggcagcccgcaggctggctcaggtctctcgggcagcaggtgtgcgggttgggctgctcagcagcccagcacccctcgggggccaggagacccagcccagcagcagctgctctcgctcccaccgccgcctatccgtccaccacctggtgcaccaccaccaccaccatcaccaccactaccacctgggcaatgggacgctcagggccccccgggccagcccggagatccaggacagggatgccaatgggtcccgccggctcatgctgccaccaccctcgacgcctgccctctccggggccccccctggtggcgcagagtctgtgcacagcttctaccatgccgactgccacttagagccagtccgctgccaggcgccccctcccaggtccccatctgaggcatccggcaggactgtgggcagcgggaaggtgtatcccaccgtgcacaccagccctccaccggagacgctgaaggagaaggcactagtagaggtggctgccagctctgggcccccaaccctcaccagcctcaacatcccacccgggccctacagctccatgcacaagctgctggagacacagagtacaggtgcctgccaaagctcttgcaagatctccagcccttgcttgaaagcagacagtggagcctgtggtccagacagctgcccctactgtgcccgggccggggcaggggaggtggagctcgccgaccgtgaaatgcctgactcagacagcgaggcagtttatgagttcacacaggatgcccagcacagcgacctccgggacccccacagccggcggcaacggagcctgggcccagatgcagagcccagctctgtgctggccttctggaggctaatctgtgacaccttccgaaagattgtggacagcaagtactttggccggggaatcatgatcgccatcctggtcaacacactcagcatgggcatcgaataccacgagcagcccgaggagcttaccaacgccctagaaatcagcaacatcgtcttcaccagcctctttgccctggagatgctgctgaagctgcttgtgtatggtccctttggctacatcaagaatccctacaacatcttcgatggtgtcattgtggtcatcagcgtgtgggagatcgtgggccagcaggggggcggcctgtcggtgctgcggaccttccgcctgatgcgtgtgctgaagctggtgcgcttcctgccggcgctgcagcggcagctggtggtgctcatgaagaccatggacaacgtggccaccttctgcatgctgcttatgctcttcatcttcatcttcagcatcctgggcatgcatctcttcggctgcaagtttgcctctgagcgggatggggacaccctgccagaccggaagaattttgactccttgctctgggccatcgtcactgtctttcagatcctgacccaggaggactggaacaaagtcctctacaatggtatggcctccacgtcgtcctgggcggccctttatttcattgccctcatgaccttcggcaactacgtgctcttcaatttgctggtcgccattctggtggagggcttccaggcggagggagatgccaacaagtccgaatcagagcccgatttcttctcacccagcctggatggtgatggggacaggaagaagtgcttggccttggtgtccctgggagagcacccggagctgcggaagagcctgctgccgcctctcatcatccacacggccgccacacccatgtcgctgcccaagagcaccagcacgggcctgggcgaggcgctgggccctgcgtcgcgccgcaccagcagcagcgggtcggcagagcctggggcggcccacgagatgaagtcaccgcccagcgcccgcagctctccgcacagcccctggagcgctgcaagcagctggaccagcaggcgctccagccggaacagcctcggccgtgcacccagcctgaagcggagaagcccaagtggagagcggcggtccctgttgtcgggagaaggccaggagagccaggatgaagaggagagctcagaagaggagcgggccagccctgcgggcagtgaccatcgccacagggggtccctggagcgggaggccaagagttcctttgacctgccagacacactgcaggtgccagggctgcatcgcactgccagtggccgagggtctgcttctgagcaccaggactgcaatggcaagtcggcttcagggcgcctggcccgggccctgcggcctgatgaccccccactggatggggatgacgccgatgacgagggcaacctgagcaaaggggaacgggtccgcgcgtggatccgagcccgactccctgcctgctgcctcgagcgagactcctggtcagcctacatcttccctcctcagtccaggttccgcctcctgtgtcaccggatcatcacccacaagatgttcgaccacgtggtccttgtcatcatcttccttaactgcatcaccatcgccatggagcgccccaaaattgacccccacagcgctgaacgcatcttcctgaccctctccaattacatcttcaccgcagtctttctggctgaaatgacagtgaaggtggtggcactgggctggtgcttcggggagcaggcgtacctgcggagcagttggaacgtgctggacgggctgttggtgctcatctccgtcatcgacattctggtgtccatggtctctgacagcggcaccaagatcctgggcatgctgagggtgctgcggctgctgcggaccctgcgcccgctcagggtgatcagccgggcgcaggggctgaagctggtggtggagacgctgatgtcctcactgaaacccatcggcaacattgtagtcatctgctgtgccttcttcatcattttcggcatcttgggggtgcagctcttcaaagggaagtttttcgtgtgccagggcgaggataccaggaacatcaccaataaatcggactgtgccgaggccagttaccggtgggtccggcacaagtacaactttgacaaccttggccaggccctgatgtccctgttcgttttggcctccaaggatggttgggtggacatcatgtacgatgggctggatgctgtgggcgtggaccagcagcccatcatgaaccacaacccctggatgctgctgtacttcatctcgttcctgctcattgtggccttctttgtcctgaacatgtttgtgggtgtggtggtggagaacttccacaagtgtcggcagcaccaggaggaagaggaggcccggcggcgggaggagaagcgcctacgaagactggagaaaaagagaaggagtaaggagaagcagatggctgaagcccagtgcaaaccttactactccgactactcccgcttccggctcctcgtccaccacttgtgcaccagccactacctggacctcttcatcacaggtgtcatcgggctgaacgtggtcaccatggccatggagcactaccagcagccccagattctggatgaggctctgaagatctgcaactacatcttcactgtcatctttgtcttggagtcagttttcaaacttgtggcctttggtttccgtcggttcttccaggacaggtggaaccagctggacctggccattgtgctgctgtccatcatgggcatcacgctggaggaaatcgaggtcaacgcctcgctgcccatcaaccccaccatcatccgcatcatgagggtgctgcgcattgcccgagtgctgaagctgctgaagatggctgtgggcatgcgggcgctgctggacacggtgatgcaggccctgccccaggtggggaacctgggacttctcttcatgttgttgtttttcatctttgcagctctgggcgtggagctctttggagacctggagtgtgacgagacacacccctgtgagggcctgggccgtcatgccacctttcggaactttggcatggccttcctaaccctcttccgagtctccacaggtgacaattggaatggcattatgaaggacaccctccgggactgtgaccaggagtccacctgctacaacacggtcatctcgcctatctactttgtgtccttcgtgctgacggcccagttcgtgctagtcaacgtggtgatcgccgtgctgatgaagcacctggaggagagcaacaaggaggccaaggaggaggccgagctagaggctgagctggagctggagatgaagaccctcagcccccagccccactcgccactgggcagccccttcctctggcctggggtcgagggccccgacagccccgacagccccaagcctggggctctgcacccagcggcccacgcgagatcagcctcccacttttccctggagcaccccacgatgcagccccaccccacggagctgccaggaccagacttactgactgtgcggaagtctggggtcagccgaacgcactctctgcccaatgacagctacatgtgtcggcatgggagcactgccgaggggcccctgggacacaggggctgggggctccccaaagctcagtcaggctccgtcttgtccgttcactcccagccagcagataccagctacatcctgcagcttcccaaagatgcacctcatctgctccagccccacagcgccccaacctggggcaccatccccaaactgcccccaccaggacgctcccctttggctcagaggccactcaggcgccaggcagcaataaggactgactccttggacgttcagggtctgggcagccgggaagacctgctggcagaggaggagcccccatccccacgggacctgaagaagtgctacagcgtggaggcccagagctgccagcgccggcctacgtcctggctggatgagcagaggagacactctatcgccgtcagctgcctggacagcggctcccaaccccacctgggcacagacccctctaaccttgggggccagcctcttggggggcctgggagccggcccaagaaaaaactcagcccgcctagtatcaccatagacccccccgagagccaaggtcctcggaccccgcccagccctggtatctgcctccggaggagggctccgtccagcgactccaaggatcccttggcctctggcccccctgacagcatggctgcctcgccctccccaaagaaagatgtgctgagtctctccggtttatcctctgacccagcagacctggacccctgagtcctgccccactttcccactcacctttctccactgggtgccaagtcctagctcctcctcctgggctatattcctgacaaaagttccatatagacaccaaggaggcggaggcgctcctccctgcctcagtggctctgggtacctgcaagcagaacttccaaagagagttaaaagcagcagccccggcaactctggctccaggcagaaggagaggcccggtgcagctgaggttcccgacaccagaagctgttgggagaaagcaatacgtttgtgcagaatctctatgtatattctattttattaaattaattgaatctagtatatgcgggatgtacgacattttgtgactgaagagacttgtttccttctacttttatgtgtctcagaatatttttgaggcgaaggcgtctgtctcttggctattttaacctaaaataacagtctagttatattccctcttcttgcaaagcacaagctgggaccgcgagcacattgcagccccaacggtggccca

SEQ ID NO: 259667 - protein, 1555 aa, Artificial Sequence
  derived and/or modified sequence
MDEEEDGAGAEESGQPRSFMRLNDLSGAGGRPGPGSAEKDPGSADSEAEGLPYPALAPVVFFYLSQDSRPRSWCLRTVCNPWFERISMLVILLNCVTLGMFRPCEDIACDSQRCRILQAFDDFIFAFFAVEMVVKMVALGIFGKKCYLGDTWNRLDFFIVIAGMLEYSLDLQNVSFSAVRTVRVLRPLRAINRVPSMRILVTLLLDTLPMLGNVLLLCFFVFFIFGIVGVQLWAGLLRNRCFLPENFSLPLSVDLERYYQTENEDESPFICSQPRENGMRSCRSVPTLRGDGGGGPPCGLDYEAYNSSSNTTCVNWNQYYTNCSAGEHNPFKGAINFDNIGYAWIAIFQVITLEGWVDIMYFVMDAHSFYNFIYFILLIIVGSFFMINLCLVVIATQFSETKQRESQLMREQRVRFLSNASTLASFSEPGSCYEELLKYLVYILRKAARRLAQVSRAAGVRVGLLSSPAPLGGQETQPSSSCSRSHRRLSVHHLVHHHHHHHHHYHLGNGTLRAPRASPEIQDRDANGSRRLMLPPPSTPALSGAPPGGAESVHSFYHADCHLEPVRCQAPPPRSPSEASGRTVGSGKVYPTVHTSPPPETLKEKALVEVAASSGPPTLTSLNIPPGPYSSMHKLLETQSTGACQSSCKISSPCLKADSGACGPDSCPYCARAGAGEVELADREMPDSDSEAVYEFTQDAQHSDLRDPHSRRQRSLGPDAEPSSVLAFWRLICDTFRKIVDSKYFGRGIMIAILVNTLSMGIEYHEQPEELTNALEISNIVFTSLFALEMLLKLLVYGPFGYIKNPYNIFDGVIVVISVWEIVGQQGGGLSVLRTFRLMRVLKLVRFLPALQRQLVVLMKTMDNVATFCMLLMLFIFIFSILGMHLFGCKFASERDGDTLPDRKNFDSLLWAIVTVFQILTQEDWNKVLYNGMASTSSWAALYFIALMTFGNYVLFNLLVAILVEGFQAEEISKREDASGQLSCIQLPVDSQGGDANKSESEPDFFSPSLDGDGDRKKCLALVSLGEHPELRKSLLPPLIIHTAATPMSLPKSTSTGLGEALGPASRRTSSSGSAEPGAAHEMKSPPSARSSPHSPWSAASSWTSRRSSRNSLGRAPSLKRRSPSGERRSLLSGEGQESQDEEESSEEERASPAGSDHRHRGSLEREAKSSFDLPDTLQVPGLHRTASGRGSASEHQDCNGKSASGRLARALRPDDPPLDGDDADDEGNLSKGERVRAWIRARLPACCLERDSWSAYIFPPQSRFRLLCHRIITHKMFDHVVLVIIFLNCITIAMERPKIDPHSAERIFLTLSNYIFTAVFLAEMTVKVVALGWCFGEQAYLRSSWNVLDGLLVLISVIDILVSMVSDSGTKILGMLRVLRLLRTLRPLRVISRAQGLKLVVETLMSSLKPIGNIVVICCAFFIIFGILGVQLFKGKFFVCQGEDTRNITNKSDCAEASYRWVRHKYNFDNLGQVSPRLRGGAVVKEAGGGTGPCLVIPADSGGGGLHEEISPSHPLLSNHQHVAKPSPSHSAPKSGPMGSLAVLKDEETEAQRG

SEQ ID NO: 259668 - protein, 2366 aa, Artificial Sequence
  derived and/or modified sequence
MDEEEDGAGAEESGQPRSFMRLNDLSGAGGRPGPGSAEKDPGSADSEAEGLPYPALAPVVFFYLSQDSRPRSWCLRTVCNPWFERISMLVILLNCVTLGMFRPCEDIACDSQRCRILQAFDDFIFAFFAVEMVVKMVALGIFGKKCYLGDTWNRLDFFIVIAGMLEYSLDLQNVSFSAVRTVRVLRPLRAINRVPSMRILVTLLLDTLPMLGNVLLLCFFVFFIFGIVGVQLWAGLLRNRCFLPENFSLPLSVDLERYYQTENEDESPFICSQPRENGMRSCRSVPTLRGDGGGGPPCGLDYEAYNSSSNTTCVNWNQYYTNCSAGEHNPFKGAINFDNIGYAWIAIFQVITLEGWVDIMYFVMDAHSFYNFIYFILLIIVGSFFMINLCLVVIATQFSETKQRESQLMREQRVRFLSNASTLASFSEPGSCYEELLKYLVYILRKAARRLAQVSRAAGVRVGLLSSPAPLGGQETQPSSSCSRSHRRLSVHHLVHHHHHHHHHYHLGNGTLRAPRASPEIQDRDANGSRRLMLPPPSTPALSGAPPGGAESVHSFYHADCHLEPVRCQAPPPRSPSEASGRTVGSGKVYPTVHTSPPPETLKEKALVEVAASSGPPTLTSLNIPPGPYSSMHKLLETQSTGACQSSCKISSPCLKADSGACGPDSCPYCARAGAGEVELADREMPDSDSEAVYEFTQDAQHSDLRDPHSRRQRSLGPDAEPSSVLAFWRLICDTFRKIVDSKYFGRGIMIAILVNTLSMGIEYHEQPEELTNALEISNIVFTSLFALEMLLKLLVYGPFGYIKNPYNIFDGVIVVISVWEIVGQQGGGLSVLRTFRLMRVLKLVRFLPALQRQLVVLMKTMDNVATFCMLLMLFIFIFSILGMHLFGCKFASERDGDTLPDRKNFDSLLWAIVTVFQILTQEDWNKVLYNGMASTSSWAALYFIALMTFGNYVLFNLLVAILVEGFQAEEISKREDASGQLSCIQLPVDSQGGDANKSESEPDFFSPSLDGDGDRKKCLALVSLGEHPELRKSLLPPLIIHTAATPMSLPKSTSTGLGEALGPASRRTSSSGSAEPGAAHEMKSPPSARSSPHSPWSAASSWTSRRSSRNSLGRAPSLKRRSPSGERRSLLSGEGQESQDEEESSEEERASPAGSDHRHRGSLEREAKSSFDLPDTLQVPGLHRTASGRGSASEHQDCNGKSASGRLARALRPDDPPLDGDDADDEGNLSKGERVRAWIRARLPACCLERDSWSAYIFPPQSRFRLLCHRIITHKMFDHVVLVIIFLNCITIAMERPKIDPHSAERIFLTLSNYIFTAVFLAEMTVKVVALGWCFGEQAYLRSSWNVLDGLLVLISVIDILVSMVSDSGTKILGMLRVLRLLRTLRPLRVISRAQGLKLVVETLMSSLKPIGNIVVICCAFFIIFGILGVQLFKGKFFVCQGEDTRNITNKSDCAEASYRWVRHKYNFDNLGQALMSLFVLASKDGWVDIMYDGLDAVGVDQQPIMNHNPWMLLYFISFLLIVAFFVLNMFVGVVVENFHKCRQHQEEEEARRREEKRLRRLEKKRRSKEKQMAEAQCKPYYSDYSRFRLLVHHLCTSHYLDLFITGVIGLNVVTMAMEHYQQPQILDEALKICNYIFTVIFVLESVFKLVAFGFRRFFQDRWNQLDLAIVLLSIMGITLEEIEVNASLPINPTIIRIMRVLRIARVLKLLKMAVGMRALLDTVMQALPQVGNLGLLFMLLFFIFAALGVELFGDLECDETHPCEGLGRHATFRNFGMAFLTLFRVSTGDNWNGIMKDTLRDCDQESTCYNTVISPIYFVSFVLTAQFVLVNVVIAVLMKHLEESNKEAKEEAELEAELELEMKTLSPQPHSPLGSPFLWPGVEGPDSPDSPKPGALHPAAHARSASHFSLEHPTDRQLFDTISLLIQGSLEWELKLMDELAGPGGQPSAFPSAPSLGGSDPQIPLAEMEALSLTSEIVSEPSCSLALTDDSLPDDMHTLLLSALESNMQPHPTELPGPDLLTVRKSGVSRTHSLPNDSYMCRHGSTAEGPLGHRGWGLPKAQSGSVLSVHSQPADTSYILQLPKDAPHLLQPHSAPTWGTIPKLPPPGRSPLAQRPLRRQAAIRTDSLDVQGLGSREDLLAEVSGPSPPLARAYSFWGQSSTQAQQHSRSHSKISKHMTPPAPCPGPEPNWGKGPPETRSSLELDTELSWISGDLLPPGGQEEPPSPRDLKKCYSVEAQSCQRRPTSWLDEQRRHSIAVSCLDSGSQPHLGTDPSNLGGQPLGGPGSRPKKKLSPPSITIDPPESQGPRTPPSPGICLRRRAPSSDSKDPLASGPPDSMAASPSPKKDVLSLSGLSSDPADLDP

SEQ ID NO: 259669 - protein, 1758 aa, Artificial Sequence
  derived and/or modified sequence
MDEEEDGAGAEESGQPRSFMRLNDLSGAGGRPGPGSAEKDPGSADSEAEGLPYPALAPVVFFYLSQDSRPRSWCLRTVCNPWFERISMLVILLNCVTLGMFRPCEDIACDSQRCRILQAFDDFIFAFFAVEMVVKMVALGIFGKKCYLGDTWNRLDFFIVIAGMLEYSLDLQNVSFSAVRTVRVLRPLRAINRVPSMRILVTLLLDTLPMLGNVLLLCFFVFFIFGIVGVQLWAGLLRNRCFLPENFSLPLSVDLERYYQTENEDESPFICSQPRENGMRSCRSVPTLRGDGGGGPPCGLDYEAYNSSSNTTCVNWNQYYTNCSAGEHNPFKGAINFDNIGYAWIAIFQVITLEGWVDIMYFVMDAHSFYNFIYFILLIIVGSFFMINLCLVVIATQFSETKQRESQLMREQRVRFLSNASTLASFSEPGSCYEELLKYLVYILRKAARRLAQVSRAAGVRVGLLSSPAPLGGQETQPSSSCSRSHRRLSVHHLVHHHHHHHHHYHLGNGTLRAPRASPEIQDRDANGSRRLMLPPPSTPALSGAPPGGAESVHSFYHADCHLEPVRCQAPPPRSPSEASGRTVGSGKVYPTVHTSPPPETLKEKALVEVAASSGPPTLTSLNIPPGPYSSMHKLLETQSTGACQSSCKISSPCLKADSGACGPDSCPYCARAGAGEVELADREMPDSDSEAVYEFTQDAQHSDLRDPHSRRQRSLGPDAEPSSVLAFWRLICDTFRKIVDSKYFGRGIMIAILVNTLSMGIEYHEQPEELTNALEISNIVFTSLFALEMLLKLLVYGPFGYIKNPYNIFDGVIVVISVWEIVGQQGGGLSVLRTFRLMRVLKLVRFLPALQRQLVVLMKTMDNVATFCMLLMLFIFIFSILGMHLFGCKFASERDGDTLPDRKNFDSLLWAIVTVFQILTQEDWNKVLYNGMASTSSWAALYFIALMTFGNYVLFNLLVAILVEGFQAEEISKREDASGQLSCIQLPVDSQGGDANKSESEPDFFSPSLDGDGDRKKCLALVSLGEHPELRKSLLPPLIIHTAATPMSLPKSTSTGLGEALGPASRRTSSSGSAEPGAAHEMKSPPSARSSPHSPWSAASSWTSRRSSRNSLGRAPSLKRRSPSGERRSLLSGEGQESQDEEESSEEERASPAGSDHRHRGSLEREAKSSFDLPDTLQVPGLHRTASGRGSASEHQDCNGKSASGRLARALRPDDPPLDGDDADDEGNLSKGERVRAWIRARLPACCLERDSWSAYIFPPQSRFRLLCHRIITHKMFDHVVLVIIFLNCITIAMERPKIDPHSAERIFLTLSNYIFTAVFLAEMTVKVVALGWCFGEQAYLRSSWNVLDGLLVLISVIDILVSMVSDSGTKILGMLRVLRLLRTLRPLRVISRAQGLKLVVETLMSSLKPIGNIVVICCAFFIIFGILGVQLFKGKFFVCQGEDTRNITNKSDCAEASYRWVRHKYNFDNLGQALMSLFVLASKDGWVDIMYDGLDAVGVDQQPIMNHNPWMLLYFISFLLIVAFFVLNMFVGVVVENFHKCRQHQEEEEARRREEKRLRRLEKKRRKAQCKPYYSDYSRFRLLVHHLCTSHYLDLFITGVIGLNVVTMAMEHYQQPQILDEALKICNYIFTVIFVLESVFKLVAFGFRRFFQDRWNQLDLAIVLLSIMGITLEEIEVNASLPINPTIIRIMRVLRIARVLKLLKMAVGMRALLDTVMQALPQLWAWSSLETWSVTRHTPVRAWAVMPPFGTLAWPS

SEQ ID NO: 259670 - DNA, 7101 bp, Artificial Sequence
  derived and/or modified sequence
atggacgaggaggaggacggcgccggcgccgaggagagcggccagcccagaagcttcatgagactgaacgacctgagcggcgccggcggcagacccggccccggcagcgccgagaaggaccccggcagcgccgacagcgaggccgagggcctgccctaccccgccctggcccccgtggtgttcttctacctgagccaggacagcagacccagaagctggtgcctgagaaccgtgtgcaacccctggttcgagagaatcagcatgctggtgatcctgctgaactgcgtgaccctgggcatgttcagaccctgcgaggacatcgcctgcgacagccagagatgcagaatcctgcaggccttcgacgacttcatcttcgccttcttcgccgtggagatggtggtgaagatggtggccctgggcatcttcggcaagaagtgctacctgggcgacacctggaacagactggacttcttcatcgtgatcgccggcatgctggagtacagcctggacctgcagaacgtgagcttcagcgccgtgagaaccgtgagagtgctgagacccctgagagccatcaacagagtgcccagcatgagaatcctggtgaccctgctgctggacaccctgcccatgctgggcaacgtgctgctgctgtgcttcttcgtgttcttcatcttcggcatcgtgggcgtgcagctgtgggccggcctgctgagaaacagatgcttcctgcccgagaacttcagcctgcccctgagcgtggacctggagagatactaccagaccgagaacgaggacgagagccccttcatctgcagccagcccagagagaacggcatgagaagctgcagaagcgtgcccaccctgagaggcgacggcggcggcggccccccctgcggcctggactacgaggcctacaacagcagcagcaacaccacctgcgtgaactggaaccagtactacaccaactgcagcgccggcgagcacaaccccttcaagggcgccatcaacttcgacaacatcggctacgcctggatcgccatcttccaggtgatcaccctggagggctgggtggacatcatgtacttcgtgatggacgcccacagcttctacaacttcatctacttcatcctgctgatcatcgtgggcagcttcttcatgatcaacctgtgcctggtggtgatcgccacccagttcagcgagaccaagcagagagagagccagctgatgagagagcagagagtgagattcctgagcaacgccagcaccctggccagcttcagcgagcccggcagctgctacgaggagctgctgaagtacctggtgtacatcctgagaaaggccgccagaagactggcccaggtgagcagagccgccggcgtgagagtgggcctgctgagcagccccgcccccctgggcggccaggagacccagcccagcagcagctgcagcagaagccacagaagactgagcgtgcaccacctggtgcaccaccaccaccaccaccaccaccactaccacctgggcaacggcaccctgagagcccccagagccagccccgagatccaggacagagacgccaacggcagcagaagactgatgctgcccccccccagcacccccgccctgagcggcgccccccccggcggcgccgagagcgtgcacagcttctaccacgccgactgccacctggagcccgtgagatgccaggcccccccccccagaagccccagcgaggccagcggcagaaccgtgggcagcggcaaggtgtaccccaccgtgcacaccagccccccccccgagaccctgaaggagaaggccctggtggaggtggccgccagcagcggcccccccaccctgaccagcctgaacatcccccccggcccctacagcagcatgcacaagctgctggagacccagagcaccggcgcctgccagagcagctgcaagatcagcagcccctgcctgaaggccgacagcggcgcctgcggccccgacagctgcccctactgcgccagagccggcgccggcgaggtggagctggccgacagagagatgcccgacagcgacagcgaggccgtgtacgagttcacccaggacgcccagcacagcgacctgagagacccccacagcagaagacagagaagcctgggccccgacgccgagcccagcagcgtgctggccttctggagactgatctgcgacaccttcagaaagatcgtggacagcaagtacttcggcagaggcatcatgatcgccatcctggtgaacaccctgagcatgggcatcgagtaccacgagcagcccgaggagctgaccaacgccctggagatcagcaacatcgtgttcaccagcctgttcgccctggagatgctgctgaagctgctggtgtacggccccttcggctacatcaagaacccctacaacatcttcgacggcgtgatcgtggtgatcagcgtgtgggagatcgtgggccagcagggcggcggcctgagcgtgctgagaaccttcagactgatgagagtgctgaagctggtgagattcctgcccgccctgcagagacagctggtggtgctgatgaagaccatggacaacgtggccaccttctgcatgctgctgatgctgttcatcttcatcttcagcatcctgggcatgcacctgttcggctgcaagttcgccagcgagagagacggcgacaccctgcccgacagaaagaacttcgacagcctgctgtgggccatcgtgaccgtgttccagatcctgacccaggaggactggaacaaggtgctgtacaacggcatggccagcaccagcagctgggccgccctgtacttcatcgccctgatgaccttcggcaactacgtgctgttcaacctgctggtggccatcctggtggagggcttccaggccgaggagatcagcaagagagaggacgccagcggccagctgagctgcatccagctgcccgtggacagccagggcggcgacgccaacaagagcgagagcgagcccgacttcttcagccccagcctggacggcgacggcgacagaaagaagtgcctggccctggtgagcctgggcgagcaccccgagctgagaaagagcctgctgccccccctgatcatccacaccgccgccacccccatgagcctgcccaagagcaccagcaccggcctgggcgaggccctgggccccgccagcagaagaaccagcagcagcggcagcgccgagcccggcgccgcccacgagatgaagagcccccccagcgccagaagcagcccccacagcccctggagcgccgccagcagctggaccagcagaagaagcagcagaaacagcctgggcagagcccccagcctgaagagaagaagccccagcggcgagagaagaagcctgctgagcggcgagggccaggagagccaggacgaggaggagagcagcgaggaggagagagccagccccgccggcagcgaccacagacacagaggcagcctggagagagaggccaagagcagcttcgacctgcccgacaccctgcaggtgcccggcctgcacagaaccgccagcggcagaggcagcgccagcgagcaccaggactgcaacggcaagagcgccagcggcagactggccagagccctgagacccgacgacccccccctggacggcgacgacgccgacgacgagggcaacctgagcaagggcgagagagtgagagcctggatcagagccagactgcccgcctgctgcctggagagagacagctggagcgcctacatcttccccccccagagcagattcagactgctgtgccacagaatcatcacccacaagatgttcgaccacgtggtgctggtgatcatcttcctgaactgcatcaccatcgccatggagagacccaagatcgacccccacagcgccgagagaatcttcctgaccctgagcaactacatcttcaccgccgtgttcctggccgagatgaccgtgaaggtggtggccctgggctggtgcttcggcgagcaggcctacctgagaagcagctggaacgtgctggacggcctgctggtgctgatcagcgtgatcgacatcctggtgagcatggtgagcgacagcggcaccaagatcctgggcatgctgagagtgctgagactgctgagaaccctgagacccctgagagtgatcagcagagcccagggcctgaagctggtggtggagaccctgatgagcagcctgaagcccatcggcaacatcgtggtgatctgctgcgccttcttcatcatcttcggcatcctgggcgtgcagctgttcaagggcaagttcttcgtgtgccagggcgaggacaccagaaacatcaccaacaagagcgactgcgccgaggccagctacagatgggtgagacacaagtacaacttcgacaacctgggccaggccctgatgagcctgttcgtgctggccagcaaggacggctgggtggacatcatgtacgacggcctggacgccgtgggcgtggaccagcagcccatcatgaaccacaacccctggatgctgctgtacttcatcagcttcctgctgatcgtggccttcttcgtgctgaacatgttcgtgggcgtggtggtggagaacttccacaagtgcagacagcaccaggaggaggaggaggccagaagaagagaggagaagagactgagaagactggagaagaagagaagaagcaaggagaagcagatggccgaggcccagtgcaagccctactacagcgactacagcagattcagactgctggtgcaccacctgtgcaccagccactacctggacctgttcatcaccggcgtgatcggcctgaacgtggtgaccatggccatggagcactaccagcagccccagatcctggacgaggccctgaagatctgcaactacatcttcaccgtgatcttcgtgctggagagcgtgttcaagctggtggccttcggcttcagaagattcttccaggacagatggaaccagctggacctggccatcgtgctgctgagcatcatgggcatcaccctggaggagatcgaggtgaacgccagcctgcccatcaaccccaccatcatcagaatcatgagagtgctgagaatcgccagagtgctgaagctgctgaagatggccgtgggcatgagagccctgctggacaccgtgatgcaggccctgccccaggtgggcaacctgggcctgctgttcatgctgctgttcttcatcttcgccgccctgggcgtggagctgttcggcgacctggagtgcgacgagacccacccctgcgagggcctgggcagacacgccaccttcagaaacttcggcatggccttcctgaccctgttcagagtgagcaccggcgacaactggaacggcatcatgaaggacaccctgagagactgcgaccaggagagcacctgctacaacaccgtgatcagccccatctacttcgtgagcttcgtgctgaccgcccagttcgtgctggtgaacgtggtgatcgccgtgctgatgaagcacctggaggagagcaacaaggaggccaaggaggaggccgagctggaggccgagctggagctggagatgaagaccctgagcccccagccccacagccccctgggcagccccttcctgtggcccggcgtggagggccccgacagccccgacagccccaagcccggcgccctgcaccccgccgcccacgccagaagcgccagccacttcagcctggagcaccccaccgacagacagctgttcgacaccatcagcctgctgatccagggcagcctggagtgggagctgaagctgatggacgagctggccggccccggcggccagcccagcgccttccccagcgcccccagcctgggcggcagcgacccccagatccccctggccgagatggaggccctgagcctgaccagcgagatcgtgagcgagcccagctgcagcctggccctgaccgacgacagcctgcccgacgacatgcacaccctgctgctgagcgccctggagagcaacatgcagccccaccccaccgagctgcccggccccgacctgctgaccgtgagaaagagcggcgtgagcagaacccacagcctgcccaacgacagctacatgtgcagacacggcagcaccgccgagggccccctgggccacagaggctggggcctgcccaaggcccagagcggcagcgtgctgagcgtgcacagccagcccgccgacaccagctacatcctgcagctgcccaaggacgccccccacctgctgcagccccacagcgcccccacctggggcaccatccccaagctgcccccccccggcagaagccccctggcccagagacccctgagaagacaggccgccatcagaaccgacagcctggacgtgcagggcctgggcagcagagaggacctgctggccgaggtgagcggccccagcccccccctggccagagcctacagcttctggggccagagcagcacccaggcccagcagcacagcagaagccacagcaagatcagcaagcacatgaccccccccgccccctgccccggccccgagcccaactggggcaagggcccccccgagaccagaagcagcctggagctggacaccgagctgagctggatcagcggcgacctgctgccccccggcggccaggaggagccccccagccccagagacctgaagaagtgctacagcgtggaggcccagagctgccagagaagacccaccagctggctggacgagcagagaagacacagcatcgccgtgagctgcctggacagcggcagccagccccacctgggcaccgaccccagcaacctgggcggccagcccctgggcggccccggcagcagacccaagaagaagctgagcccccccagcatcaccatcgacccccccgagagccagggccccagaaccccccccagccccggcatctgcctgagaagaagagcccccagcagcgacagcaaggaccccctggccagcggcccccccgacagcatggccgccagccccagccccaagaaggacgtgctgagcctgagcggcctgagcagcgaccccgccgacctggacccctag

SEQ ID NO: 259671 - DNA, 7101 bp, Artificial Sequence
  derived and/or modified sequence
atggacgaagaagaagatggcgcgggcgccgaagagagtgggcaaccccgctcctttatgaggctcaacgacctgtcaggagcgggaggcagacctggcccaggctctgcagaaaaagatccggggtctgcggacagcgaagcagagggactgccatacccagcacttgcccccgtggtgtttttttatttatcccaggactctcgaccaagatcctggtgtctgcggactgtgtgtaacccgtggttcgagcgaatttccatgcttgtgattctgctgaactgtgtcaccctgggcatgtttaggccgtgtgaagatattgcttgtgattctcagaggtgtcgcatactgcaggcctttgacgatttcatattcgctttctttgcagtggaaatggtggtgaaaatggtcgcactcggcatattcggaaagaagtgctacctgggcgatacctggaatcggctcgacttttttatcgttattgccggcatgctggagtactccttggatctgcagaatgtttctttcagcgctgtcagaaccgtgagggtgctcagaccattaagagcaataaacagagtccctagtatgcggattctcgtaaccctacttctggacactctgccaatgctcggcaacgtcctactgctctgtttttttgtttttttcatcttcggcattgtgggagtccagctttgggccggactgctgagaaataggtgctttctacccgagaacttctcactcccactatcggtggatctggagaggtactatcagactgagaatgaagatgagtctccattcatttgtagccagccacgcgagaatggcatgcgaagttgtagatctgtccccaccctccgaggcgacggcggcggcggacctccatgtgggttagactacgaagcctacaactccagctcgaacacaacctgtgtgaactggaaccaatactatacgaattgttcagcgggtgaacacaacccctttaaaggcgccatcaacttcgataatatcggctatgcgtggatcgccatttttcaggtgattacactggagggttgggtcgacattatgtactttgtcatggacgcgcattctttctacaactttatttattttatcctgctgattattgttggatcctttttcatgattaacctgtgcctcgtggtcatagcaacccagtttagcgagacaaagcagagagagtcgcagctgatgagggagcagagagtgaggtttctatcaaacgcttctacactggctagcttctcggagccaggcagctgctacgaagagttactgaagtatctggtctacattctgagaaaagcggctaggagattggctcaggtgagccgcgctgctggcgtgcgagtcggtctgctgagctcgccggcgcctctgggagggcaggaaacacagcccagtagtagttgctcaaggtcacacagacgcctgtccgtgcaccatctagtccatcatcaccatcaccatcatcatcactaccacctcggaaacggcactctgcgcgctccacgcgcgtcccctgaaattcaggaccgcgacgcgaatgggagccgtcggctgatgctgccacctccaagtacgcccgccctgtcaggggcgccacctggcggggccgagagcgtgcactcattctatcacgccgattgtcatctggagccagtgaggtgtcaagctcccccaccacgctctcccagcgaggcctccggcagaaccgtggggtctgggaaggtctaccctaccgttcatacatctcccccacccgagaccctcaaagagaaggcccttgtggaagttgccgccagttccggaccccctacccttaccagcttgaatatacctccaggtccctacagtagcatgcacaaactgttagaaacacagtcgacaggggcctgtcaaagtagctgtaagatctctagcccttgtcttaaagctgactccggtgcctgtggacctgatagctgcccgtactgtgcccgcgctggggccggtgaggtggaattggccgatcgtgagatgccagatagcgacagtgaggccgtttacgaatttactcaggacgctcagcatagtgatcttagagacccacatagccggcgccaaaggtccctcggtcccgacgctgaaccgtcgtccgtcttggctttttggcgcctaatctgtgacacctttaggaaaattgtagacagcaagtattttggaaggggtatcatgatcgctattttagtgaacactttaagcatgggcatagagtaccacgagcaaccagaagagctaactaatgctttagagatcagcaacattgttttcacctccctgtttgcactagagatgcttctcaagctgctggtgtatggtccctttgggtacatcaaaaacccctacaatatctttgacggcgttatcgtggttatttcagtgtgggagatcgtgggccagcagggcggaggtctttcagtgctccggaccttcagacttatgagggtgcttaaacttgtgcgattccttcctgccctccagcgccagctggtggtccttatgaaaactatggacaacgtggccacattttgtatgctgctgatgctgttcatatttatctttagcatcctcggcatgcacctgtttgggtgcaaatttgcaagcgagagagatggcgacaccctgcctgaccggaagaactttgatagtctattatgggcgatcgtgaccgtgtttcagatcctgacccaggaagattggaataaggtactgtataatggcatggcctctacttccagctgggcagctttatattttatcgccctaatgaccttcgggaattatgtattattcaatctccttgtcgccatcctcgtcgaagggttccaggccgaagaaatttccaagcgggaggacgcatctggccagttgtcctgtatacagctgccggtggacagccagggtggcgacgcaaacaagtctgaatccgagcccgattttttctctccatccttagatggcgatggggacaggaagaaatgcctggccctggtgagcttgggtgagcaccccgagctgcgtaagtccctactgcctccacttattatccacaccgccgctactccaatgtcattgccaaaatcgacttcaacaggcttgggtgaagctcttggccccgcctctcggaggacaagctcctccggctcagcagagccaggcgcggcgcacgagatgaagagtcctccatccgcaagaagctccccacactctccttggtccgccgcctcttcttggacttctcgccggagctctcggaatagcctgggtcgggcgccctctttgaagcgcaggtcacctagtggcgagaggcggagtctcttatccggtgaaggccaggagtcccaggatgaggaggagtcaagtgaagaggagagggcaagtcctgccgggtctgaccaccgccatagggggagtctggaacgagaggccaagtcctcctttgacttgccagatactttgcaggtgcccgggcttcatcggaccgcttccggacgcggaagcgcctctgaacaccaggactgcaatggaaaaagcgcatctggtcggttggcccgtgccctaagacctgacgatcctcctctcgatggcgacgatgccgatgatgaagggaacctcagtaagggcgaaagggtcagagcatggatcagagctaggcttccagcctgttgtcttgaaagagattcatggtccgcttatatctttccccctcaatcacgttttcggctcctgtgccacaggattatcacacacaagatgtttgaccacgtggtgttagtcatcattttcctgaactgcatcacgatagccatggaacgaccaaaaattgatccgcactctgcagaaagaatctttctcaccctgagcaactacatctttacagcggtgttcctggcggaaatgaccgtgaaagtggtggccttaggatggtgcttcggcgaacaggcgtacttacgcagcagctggaacgtgctggatggcctgttagtattaattagcgtgatagacattctagtcagtatggtgagtgactcgggtaccaagatcctggggatgctgcgggtgcttcggctcctgaggacgcttcggcccctgcgagtgatctcacgcgcgcagggacttaaactcgtggtcgagacactcatgagttctcttaaacccattggcaatatcgttgttatttgctgtgccttttttattatctttggcatattgggtgttcagctctttaaaggaaagttcttcgtgtgccaaggggaggacactcgcaacataaccaataagtcagattgcgcagaagcatcataccggtgggtgcggcataagtacaatttcgataatctggggcaggccctcatgtcactctttgtgttagcctccaaagatgggtgggtcgacatcatgtacgacggtctggacgccgtcggcgtggatcaacagccaataatgaatcacaacccatggatgctactgtatttcatttctttcctgctaatcgtcgcattctttgtcctgaatatgtttgttggcgtggttgtagaaaacttccataagtgtcggcagcaccaagaggaggaggaggccaggcggagagaggaaaagcgactgagaagactcgagaaaaagaggagatccaaggagaagcaaatggcggaagcccaatgcaagccgtactacagcgactattctcggttccgactgctggtgcatcatttgtgtacatcccactacctcgatctctttataacaggagtcatcggcttaaacgttgtgactatggccatggaacactaccagcaacctcagatccttgacgaggcccttaaaatatgtaattacatttttactgtcatcttcgtcctggagagtgtatttaagttagtcgcctttggcttcagacggtttttccaggaccgctggaaccaactggacctggccattgtgctgctctctattatgggtatcacactcgaagaaatcgaggttaacgcatccctacccatcaacccaactattatccggataatgagggtactgcggattgcgagagtgctgaagcttttgaagatggccgttggaatgcgggcactcctagatactgtgatgcaggccctgccccaggttggaaatctgggattgctttttatgcttctattcttcattttcgctgcactgggggttgagttgttcggtgatctggagtgcgatgagactcacccttgcgaaggcctggggcgccatgcaaccttccggaactttggtatggcctttttgaccctcttccgagtctctacaggcgataactggaatgggattatgaaagacacattgcgggattgcgatcaggaatcaacatgttataataccgtcatctcacctatatacttcgtttcttttgttctgactgcccagtttgtcctcgtgaatgtcgttatcgccgtgttaatgaagcatctggaggagtccaacaaagaagccaaggaggaagcagaactggaagccgagctcgagctcgagatgaaaactttgtcccctcagccacactccccattaggcagtccgtttttgtggcctggcgttgaaggtcccgacagtcctgattctcccaagcctggggcattgcaccccgccgcacacgccagaagcgccagccacttcagtctggagcaccccaccgaccggcagcttttcgacacaatcagtctgttgatccaaggaagtcttgaatgggaactgaaactaatggatgaactggccgggccaggcggacagccctcagctttccctagtgcaccatctcttggcggcagtgaccctcagatcccgctcgccgaaatggaagccctatccctgactagcgaaatcgttagcgaacctagctgctctctggctcttactgatgactcactccccgacgacatgcatacactgctcctgtctgccctggaatctaatatgcagccccacccaaccgagttgccaggccccgacctcctcacggtacgtaaatccggcgtaagcagaacccactccctgcctaacgattcatacatgtgtcgacacggatctaccgcggagggccccctggggcacagaggttggggactgccgaaagcacaaagtggctccgtactgtccgtccactctcagcctgccgatacatcatatattctccagctccctaaagacgctccccacctcctgcaaccacactctgcaccgacctggggtaccatccctaaacttccgcccccagggaggtcaccactcgcccagcggccattaaggaggcaagcggctatccggactgacagtctggacgtgcaggggctgggaagtagagaggacctgttggccgaggtcagtgggccaagtcctccattggcccgggcctacagtttctggggccagtcaagcacacaggcacagcagcatagcaggagccatagtaaaatctcaaagcacatgactccccctgccccttgtcccggaccagaacccaactggggcaagggcccccctgaaacccggtcttctttggagctcgataccgagcttagttggatttctggggacctgcttcccccgggtggacaggaggagcccccaagccccagggatttgaagaaatgttactccgtggaggcccagtcctgccagcgaagacctacgtcatggctcgacgagcagcgcagacattctattgctgtgagctgtctcgactcaggtagtcaaccccacctgggcacggatccgagcaaccttggaggacagcctctggggggacctggatctaggccaaaaaagaagctgagcccaccttctatcactattgaccctcctgagtcccagggacccaggaccccaccgtctccaggcatttgtctccggaggagggcaccttccagcgacagcaaggacccattagccagtggccctccggattcaatggccgcatctcctagcccgaagaaagatgtcctgtccctgtcgggcctgtcttctgatcctgccgatctggatccttag

SEQ ID NO: 259672 - DNA, 7101 bp, Artificial Sequence
  derived and/or modified sequence
atggatgaggaggaggatggagctggagctgaggagagcggccagcccaggagcttcatgaggctgaatgacctgagcggggccggcggccggcccggccctggcagcgctgagaaggaccccggcagcgctgacagcgaggccgagggcctgccctacccagccctggcccctgtggtgttcttctacctgagccaggacagccggcccaggtcctggtgcctgaggacagtgtgcaacccctggtttgagcgcatctccatgctggtgatcctgctgaactgtgtgaccctgggcatgttccggccctgtgaagatattgcctgtgacagccagcgctgccgcatcctgcaggcctttgatgacttcatctttgccttctttgctgtggagatggtggtgaagatggtggccctgggcatctttgggaagaagtgctacctgggggacacctggaaccggctggacttcttcatcgtgattgctggcatgctggagtacagcctggacctgcagaatgtgtccttctctgctgtgaggacagtgcgggtgctgcggcccctgcgggccatcaacagagtgcccagcatgaggatcctggtgaccctgctgctggacaccctgcccatgctgggcaatgtgctgctgctgtgcttctttgtgttcttcatctttggaattgtgggcgtgcagctgtgggccggcctgctgaggaaccgctgcttcctgcctgagaacttcagcctgcccctgtctgtggacctggagcgctactaccagacagaaaatgaagatgagagccccttcatctgcagccagccccgggagaatggcatgaggagctgccgctctgtgcccaccctgcggggagatggcggcggcggccccccctgtggcctggactatgaggcctacaacagcagcagcaacaccacctgtgtgaactggaaccagtactacaccaactgcagcgctggggagcacaaccccttcaagggggccatcaactttgacaacatcggctacgcctggatcgccatcttccaggtgatcaccctggagggctgggtggacatcatgtactttgtgatggatgcccacagcttctacaacttcatctacttcatcctgctgatcatcgtgggcagcttcttcatgatcaacctgtgcctggtggtgattgccacccagttcagcgagaccaagcagcgggagagccagctgatgagggagcagagggtgcgcttcctgagcaatgccagcaccctggccagcttcagcgagcccggcagctgctatgaggagctgctgaagtacctggtgtacatcctgaggaaggccgcccggcggctggcccaggtgtccagagctgctggggtgcgggtgggcctgctgagcagccctgcccccctgggcggccaggagacccagcccagcagcagctgcagccgcagccaccggcggctgtctgtgcaccacctggtgcaccaccaccaccaccaccaccaccactaccacctgggcaatggcaccctgcgggccccccgggccagccctgagatccaggacagagatgccaacggcagccggcggctgatgctgcccccacccagcaccccagccctgagcggggcccctcctggaggagctgagagcgtgcacagcttctaccacgccgactgccacctggagcctgtgcgctgccaggcccccccacccaggagccccagcgaggccagcggccgcacagtgggcagcggcaaggtgtaccccaccgtgcacaccagccccccacctgagaccctgaaggagaaggccctggtggaggtggccgccagcagcggcccccccaccctgaccagcctgaacatccccccaggcccctacagctccatgcacaagctgctggagacccagagcactggagcctgccagagcagctgcaagatcagcagcccctgcctgaaggctgacagcggggcctgtggccctgacagctgcccctactgtgcccgggccggggccggggaggtggagctggccgaccgggagatgccagacagcgacagcgaggccgtgtatgagttcacccaggatgcccagcacagcgacctgcgggacccccacagccggcggcagaggagcctgggcccagatgctgagcccagctctgtgctggccttctggaggctcatctgtgacaccttcaggaagatcgtggacagcaagtacttcggccggggcatcatgattgccatcctggtgaacaccctgtccatgggcatcgagtaccacgagcagcctgaggagctgaccaatgccctggagatcagcaacatcgtgttcaccagcctgtttgccctggagatgctgctgaagctgctggtgtatggccccttcggctacatcaagaacccctacaacatctttgatggagtcatcgtggtgatctctgtgtgggagatcgtgggccagcagggcggcggcctgtctgtgctgcggaccttccggctgatgagggtgctgaagctggtgcgcttcctgcctgccctgcagaggcagctggtggtgctgatgaagaccatggacaacgtggccaccttctgcatgctgctgatgctgttcatcttcatcttcagcatcctgggcatgcacctgtttggctgcaagtttgccagcgagagagatggagacaccctgcctgacaggaagaactttgacagcctgctgtgggccatcgtgacagtgttccagatcctgacccaggaggactggaacaaggtgctgtacaacggcatggccagcaccagctcctgggccgccctgtacttcatcgccctgatgaccttcggcaactacgtgctcttcaacctgctggtggccatcctggtggagggcttccaggccgaggagatcagcaagcgggaggatgccagcggccagctgagctgcatccagctgcctgtggacagccagggcggagatgccaacaagtctgagagcgagccagacttcttcagccccagcctggatggagatggagacaggaagaagtgcctggccctggtgtccctgggggagcaccctgagctgaggaagagcctgctgcccccactcatcatccacacagctgccacccccatgagcctgcccaagagcaccagcacaggcctgggggaggccctgggccctgccagcaggaggaccagcagcagcggcagcgctgagcctggagctgcccacgagatgaagagcccccccagcgcccggagcagcccccacagcccctggagcgctgccagctcctggaccagccgccgcagcagcaggaacagcctgggccgggcccccagcctgaagagaagaagccccagcggggagcggcgcagcctgctgtctggagagggccaggagagccaggatgaggaggagagcagcgaggaggagcgggccagccctgctggcagtgaccaccgccaccggggcagcctggagcgggaggccaagagcagctttgacctgcctgacaccctgcaggtgcccggcctgcacaggacagccagcggccggggcagcgccagcgagcaccaggactgcaatggcaagagcgccagcggccgcctggcccgggccctgcggccagatgatcctcccctggatggagatgatgctgatgatgagggcaacctgagcaagggggagcgggtgcgggcctggatccgggcccggctgcctgcctgctgcctggagcgggacagctggagcgcctacatcttccccccccagagccgcttccggctgctgtgccaccgcatcatcacccacaagatgtttgaccacgtggtgctggtgatcatcttcctgaactgcatcaccatcgccatggagcggcccaagattgacccccacagcgctgagcgcatcttcctgaccctgagcaactacatcttcaccgctgtgttcctggccgagatgacagtgaaggtggtggccctgggctggtgcttcggggagcaggcctacctgcggagctcctggaatgtgctggatggcctgctggtgctgatctctgtgattgacatcctggtgtccatggtgtctgattctggcaccaagatcctgggcatgctgcgggtgctgcggctgctgcggaccctgcggcccctgcgggtcatcagccgggcccagggcctgaagctggtggtggagaccctgatgagcagcctgaagcccatcggcaacatcgtggtgatctgctgtgccttcttcatcatcttcggcatcctgggcgtgcagctgttcaagggcaagttctttgtgtgccagggcgaggacaccaggaacatcaccaacaagagtgactgtgccgaggccagctaccgctgggtgcgccacaagtacaactttgacaacctgggccaggccctgatgagcctgtttgtgctggccagcaaggatggctgggtggacatcatgtatgatggcctggatgctgtgggcgtggaccagcagcccatcatgaaccacaacccctggatgctgctgtacttcatctccttcctgctgattgtggccttctttgtgctgaacatgtttgtgggcgtggtggtggagaacttccacaagtgccggcagcaccaggaggaggaggaggcccggcggcgggaggagaagaggctgcggcggctggagaagaagagaagaagcaaggagaagcagatggccgaggcccagtgcaagccctactacagcgactacagccgcttccggctgctggtgcaccacctgtgcaccagccactacctggacctcttcatcactggagtcatcggcctgaatgtggtgaccatggccatggagcactaccagcagccccagatcctggatgaggccctgaagatctgcaactacatcttcaccgtcatctttgtgctggagagcgtcttcaagctggtggccttcggcttccgccgcttcttccaggaccgctggaaccagctggacctggccatcgtgctgctgagcatcatgggcatcaccctggaggagattgaggtgaatgccagcctgcccatcaaccccaccatcatccgcatcatgagggtgctgagaattgcccgggtgctgaagctgctgaagatggctgtgggcatgagggccctgctggacacagtgatgcaggccctgccccaggtgggcaacctgggcctgctcttcatgctgctcttcttcatctttgctgccctgggcgtggagctgtttggagacctggagtgtgatgagacccacccctgtgagggcctgggcagacatgccaccttcaggaactttggcatggccttcctgaccctcttccgggtgtccactggagacaactggaatggcatcatgaaggacaccctgcgggactgtgaccaggagagcacctgctacaacacagtcatcagccccatctactttgtgtcctttgtgctgacagcccagtttgtgctggtgaatgtggtgattgctgtgctgatgaagcacctggaggagagcaacaaggaggccaaggaggaggccgagctggaggccgagctggagctggagatgaagaccctgagcccccagccccacagccccctgggcagccccttcctgtggccaggagtggagggccctgacagcccagacagccccaagccaggggccctgcaccctgctgcccacgcccggagcgccagccacttcagcctggagcaccccacagaccggcagctgtttgacaccatcagcctgctgatccagggcagcctggagtgggagctgaagctgatggatgagctggccggccctgggggccagcccagcgccttccccagcgcccccagcctgggcggcagtgacccccagatccccctggccgagatggaggccctgagcctgaccagcgagatcgtgtctgagcccagctgcagcctggccctgacagatgacagcctgcctgatgacatgcacaccctgctgctgagcgccctggagagcaacatgcagccccaccccacagagctgcccggccctgacctgctgactgtgaggaagagcggcgtgtccaggacccacagcctgcccaatgacagctacatgtgcagacatggcagcacagctgagggccccctgggccaccggggctggggcctgcccaaggcccagagcggctctgtgctgtctgtgcacagccagcctgctgacaccagctacatcctgcagctgcccaaggatgccccccacctgctgcagccccacagcgcccccacctggggcaccatccccaagctgcccccacctggccgcagccccctggcccagaggcccctgcggcggcaggccgccatcagaacagacagcctggatgtgcagggcctgggcagccgggaggacctgctggccgaggtgtctggccccagcccccccctggcccgggcctacagcttctggggccagagcagcacccaggcccagcagcacagccgcagccacagcaagatcagcaagcacatgaccccaccagccccctgccccggccctgagcccaactggggcaaaggacctcctgagaccaggagcagcctggagctggacacagagctgtcctggatcagcggggacctgctgcccccaggcggccaggaggagccccccagcccccgggacctgaagaagtgctacagcgtggaggcccagagctgccagaggcggcccacctcctggctggatgagcagaggaggcacagcattgctgtgtcctgcctggacagcggcagccagccccacctgggcacagaccccagcaacctgggcggccagcccctgggcggccctggcagccggcccaagaagaagctgagccccccatccatcaccatcgaccccccagagagccagggccccaggaccccacccagccctggcatctgcctgcggcggcgggcccccagcagtgacagcaaggaccccctggccagcggccccccagacagcatggccgccagccccagccccaagaaggatgtgctgagcctgagcggcctgagcagtgaccctgctgacctggacccctag

SEQ ID NO: 259673 - DNA, 7101 bp, Artificial Sequence
  derived and/or modified sequence
atggacgaggaggaggacggcgccggcgccgaggagagcggccagccgcgatcgtttatgcggttgaacgacctgtccggagccggtggaaggcctggtcccggcagtgccgagaaagatcccgggtctgccgattctgaggctgagggtcttccttatccagccctcgcaccggtggtctttttttatctcagccaagactccaggcctaggagttggtgtctgcgcacggtttgcaatccttggttcgagaggatatccatgctcgtgatattgctcaattgcgtgacgctcgggatgtttcgtccatgtgaagacattgcatgcgacagccagagatgccggatcttgcaagcgtttgatgacttcatcttcgccttctttgccgtagaaatggttgtgaagatggtagccctgggaatctttggtaagaagtgttacttgggagatacatggaaccgcctagattttttcatagtcattgcaggtatgttggaatactccctggatttacagaacgtgtcattctccgcggtcaggaccgtacgggtgcttcgaccactgcgggctatcaatagagttcccagtatgcgtatattagtgaccttgctgttagatacattgccaatgctgggaaacgtactcctgctgtgcttctttgtgttcttcatcttcgggatagtcggggtccagctctgggcaggccttctcagaaatcggtgttttctacccgagaatttttcattaccgctttctgtcgacttggagagatattaccaaaccgaaaacgaggatgaatcgccattcatatgctcacaacctcgagaaaacggcatgaggtcctgtagatctgtgccaaccctgcggggggatggaggaggtggtccgccctgcggcctggattatgaagcttacaactcaagctctaataccacatgcgtgaactggaaccagtattatacaaattgctcagcaggcgaacataatccctttaagggtgccattaactttgataacatcggttatgcttggatcgccattttccaggtaattacattagagggatgggttgatatcatgtattttgtaatggacgctcacagcttctacaactttatttacttcattctgctcataatcgtaggcagtttctttatgattaatttatgtctggtggtgattgcaacacagtttagcgagactaaacagcgcgagtcccagctgatgcgcgagcagcgcgtccgattcctgagcaacgcctccaccctcgcttctttctcggaacccggctcttgctacgaggaactcttaaaatacctggtgtacatccttcggaaagcagctcgccggttggcacaagtgtcccgggctgctggggtcagggtcggcctcctgtcatctccggcccccctcggaggtcaggaaacacagccaagttcttcttgttctcgatcccacaggaggctctctgtgcaccatcttgtacatcatcatcatcaccaccaccaccattatcacttagggaacggcacactccgagcccctcgagcctctccagaaatccaggacagggatgccaatggcagtcggcggcttatgctgccaccaccaagcacccccgctctcagcggtgccccccctggtggtgctgagtctgtgcacagcttctaccacgccgactgccacctcgaacctgtccggtgccaggcgccaccaccaagatctccatctgaagcatctggtcgaaccgtcggcagtggtaaggtgtaccctactgtgcatactagtcctccacctgagacactcaaagagaaagcccttgtggaggtcgccgcttcttcaggcccacctactctcaccagcctgaatatccctccaggtccctattcctccatgcacaagctcctcgagacccaatcgacaggggcctgtcaatctagctgcaagatttcaagcccgtgtctgaaggccgattctggcgcttgcgggcccgacagttgtccctactgtgccagagccggtgctggtgaggtggaactggcggatagagaaatgccagatagcgattctgaagccgtatacgaattcactcaggatgcccagcactcagacctgcgagatccgcattcacggcggcagagatccctcggacccgacgccgagccttcatccgtgctggccttctggcgtctgatctgcgatactttcaggaaaatcgtcgatagcaaatattttggcagaggcattatgattgctatcctggttaacaccctctctatgggtatcgaatatcatgaacaaccagaggaactcaccaatgccctggaaatctcaaacatagtctttacatccctgtttgcccttgaaatgctgctgaagctccttgtgtatggaccttttggatatatcaaaaacccctacaacattttcgatggggtgattgttgtaatctcggtgtgggagatcgtcggccaacagggcgggggtctcagcgtgcttaggacatttaggctaatgcgggtcttgaagctcgtgcgcttcctcccagcacttcaaaggcagctggttgtgctcatgaagactatggataatgtggctacattctgcatgctgctgatgttgttcatttttattttctcaattcttgggatgcaccttttcgggtgcaaattcgcaagtgagcgggatggggacacgctacctgacagaaaaaatttcgatagccttttatgggcaatcgtaactgtgtttcaaattttaactcaggaagattggaataaggtcttgtataatggaatggctagtacaagcagctgggccgctctgtatttcatcgctctaatgactttcggcaactacgttctgtttaacctactcgtggccattttggtcgagggattccaggctgaagaaatctcaaaacgagaggacgccagcggacagctgagttgcatccagcttcccgtagactcccagggtggggacgccaacaaatcagaaagcgagcctgacttctttagcccatcactggatggcgacggcgacaggaaaaagtgtttagcactcgtgtctttaggcgaacatcccgagttaaggaaatccctgctgccacctctcattatccacaccgctgctaccccaatgagcctgcccaagtccacgagtacgggattgggggaagccctcggcccagcaagccgccgcacttcaagttccggttctgcagagccaggcgcagcacatgagatgaagagccccccgagcgccaggagctcccctcacagtccttggagcgcagcatcatcttggacctcgcggagatcttctcgtaattcactgggtcgtgccccttccctgaaaaggcgttcaccttccggggagcgtcgtagcttgctgagtggggagggacaagagtcacaagatgaggaggagtcatccgaagaggaaagggcttctccggcaggatctgaccacaggcataggggatcattagagagggaggccaaatccagctttgatctaccagacaccttgcaagtgcccggcttgcacaggaccgcctctggacgaggctctgcctccgagcaccaggattgtaacggaaagtctgcgagcggacggctggcgcgggccctgcggcctgacgacccaccattagacggcgacgacgctgatgacgagggtaatcttagtaaaggcgaacgggttagggcctggatccgggcccggctgcctgcatgttgcctagagagagacagctggtcagcctacatatttccccctcagtctcggtttcgactgttatgccacaggattattacccataagatgttcgatcacgttgtgctcgtgattatcttcctgaactgcatcactatcgcgatggaacgtcctaaaatcgacccgcacagcgcagagcggatcttcctgacattgagcaactatatatttacagctgtttttctcgcggaaatgacagtaaaggtagtggccttaggatggtgctttggagagcaagcttacttaagatcaagctggaacgtgctcgacggcctcctggtgctgatcagcgtgattgacatcctcgtcagtatggtttccgacagtgggacaaagattctgggcatgctgcgggttcttcggctgctgcgaactctccgcccattgcgcgtcataagccgagcacaaggactgaaactggtcgttgagacattaatgtctagtctcaagcccatcgggaacatcgtggtgatatgctgtgctttctttataattttcggcatactcggcgtccaactctttaaaggcaaatttttcgtctgccagggcgaggacacacggaacatcactaacaagtctgactgcgctgaggcatcatacaggtgggtcagacacaagtacaattttgataatctgggacaggcgctgatgagccttttcgtcctcgcctctaaggatggatgggtagacattatgtacgatggtctagacgccgtcggcgtggatcaacaaccaatcatgaatcacaacccctggatgctgctttacttcatatctttcctgctgatcgtagcctttttcgtgctcaacatgttcgtgggcgtggtggtggagaacttccataagtgcagacagcaccaggaggaggaggaagcccgacggcgcgaagagaagcgcctccggaggctcgaaaagaagagacgcagtaaagaaaagcagatggctgaagcacagtgtaaaccctactattccgactatagtcgcttcaggttgttagtgcatcacctatgtacctcccattacttggaccttttcattaccggcgtaatcggcctgaatgtggtgacaatggccatggagcactaccagcagccgcagattttagatgaagcccttaaaatctgcaactatatttttacagtgattttcgtgcttgaatctgtttttaagctggtggcatttggttttcgtagattttttcaggatcgatggaaccagctggacctggcaattgtgttactgtcaatcatggggatcaccctggaggagatagaagtgaatgcctctctccccatcaatcccactatcatccgtatcatgcgtgtccttcgaatagcccgcgtcctgaagctgctaaagatggcagtaggaatgagggccctgctggacaccgtcatgcaggccttgcctcaagttggtaacttggggctgctgttcatgctgttgtttttcatcttcgcggctttgggcgttgagctgttcggggacctggaatgtgatgagacacacccctgcgaaggcctcggccggcacgcgacatttcggaattttgggatggcctttctgacgctctttcgagtgtctacaggcgacaattggaatggtataatgaaggatactttgcgggactgcgaccaagaatcgacctgttataacactgtcataagcccaatctactttgtgtcttttgtattgaccgcacagttcgtgttggtgaatgttgtgatcgccgtgctgatgaagcacctggaagagtcaaacaaggaagcaaaagaggaagcagaactggaagctgagctcgagttggagatgaaaaccctgtctccccagcctcattctcccctgggaagtcccttcctctggcccggcgtcgaggggccggactcccccgacagccccaagcccggcgctttgcatcccgccgcccatgctcggagtgcttcccacttctctttagaacatcctaccgacagacagctgtttgatacaatatcattgctgatccaaggctccctggagtgggagctgaagctgatggatgagctggcaggtcctgggggacagccaagtgcattcccgagcgcccccagtctgggaggaagtgaccctcagatacccctggccgaaatggaggccctgtctctgaccagtgagatagttagcgaacctagttgctctctggctctgacggacgatagcctgccagacgatatgcacaccctactcttatctgccctggagtctaacatgcagccgcacccaactgagctgcccggccccgatctcctgacagtgcgtaagagtggcgtttcacgcacccatagtctgcctaacgactcctatatgtgtcgccacggatccacggccgaaggtcctctgggtcacagaggttggggtttgccaaaggcgcagtccggtagcgtgctgtctgttcactcccagccagcggatacgtcatacattttacagctgcccaaggacgcaccccacttactccagccacacagcgcccccacctggggaacgattccaaagctgcctccccctggaagaagcccgctggctcagcgcccactcaggcgccaagcagcgattcgcaccgattccttggatgtgcaagggctcggatcccgcgaggacctgctggctgaggtctccggacctagtccaccgcttgcccgggcttacagtttttgggggcagtcctcaacacaggcccagcaacacagtaggtctcacagtaaaatttcgaagcacatgaccccccccgccccttgtcccggccctgaacccaactggggcaaagggcccccggagacccgatcctctctagaactcgacactgagctctcttggatcagcggagacctgctaccacccggcggacaggaggagccccctagcccacgtgacctgaagaaatgttatagcgtagaggctcagagctgccagcggcgccccaccagctggctggatgagcaacgtcgccattccatagccgtgagttgcttggattccggcagtcagccccaccttggcaccgatccatccaaccttggtggacagccgctaggaggacccgggagccgtccaaaaaagaagctatcacccccaagtattacgatcgaccctccagaatcccaggggcccaggacaccacccagcccgggaatctgcctgcggcggcgcgccccttcctccgactccaaagatcccttggcttctggaccaccagatagcatggcagcttccccctcgcctaagaaagacgtgttgtccctgtccggcctgtcctctgatcccgccgacctcgacccttag

SEQ ID NO: 259674 - DNA, 7100 bp, Artificial Sequence
  derived and/or modified sequence
atggacgaggaagaagacggggcaggcgcagaggagtcaggacaaccacggtcctttatgaggctgaacgatctatcaggcgcagggggtagaccgggaccaggcagtgctgagaaggatccaggaagtgccgattcagaagcagaggggctgccttaccctgccttggcccctgtcgtgttcttttatctctcacaggactctagacctcgctcgtggtgcctccggacagtgtgtaacccatggtttgagagaatcagcatgctggtgatccttctaaactgtgtcacgttgggcatgttccgtccctgcgaggacatagcctgtgacagccagagatgcaggatacttcaagccttcgacgattttatcttcgcatttttcgcagttgagatggtggtcaagatggtagcactgggcattttcggtaaaaaatgttatctgggcgatacatggaaccggctggactttttcattgtgattgccggaatgctagaatacagcctcgatttgcaaaacgtgagcttcagcgcagtgcggactgtgagggttctgcggccattgcgtgcaatcaaccgagtaccttctatgaggatattggtgaccttgttactcgacacactacctatgctagggaacgtcctcttgttgtgctttttcgtattcttcatctttggtatagtaggggtgcagttatgggccggtctcttgagaaatcgctgcttcctgccagagaactttagcttgccattgtccgtcgatctcgagcgttactatcagaccgagaacgaggatgagagccctttcatttgtagtcagcctcgtgagaatggcatgcggtcatgcaggtcagtcccaaccctacgcggtgacggtggaggcggacccccttgcggactcgactacgaggcgtataacagctcaagcaatactacgtgtgtgaactggaaccagtattacaccaattgctcagccggagagcacaatccttttaagggtgccataaactttgataacatcggatacgcctggatcgctatcttccaagtcatcacactggaagggtgggtggacatcatgtattttgtgatggacgcccactctttctacaacttcatctacttcattctgttaatcattgtgggctcattcttcatgatcaatctgtgtctggtggtgatagctactcaattcagtgaaaccaaacagagagagtcccagctcatgcgggagcaaagggtcaggtttctgtctaacgccagtaccctggcctccttctcagagcccggtagctgttacgaagagctgctgaaatatttagtttacatcttgcgcaaggcagctaggcgactcgcccaggttagtcgtgccgcaggtgtgcgcgtgggcctgcttagcagccccgcaccgctggggggacaggaaacgcaaccatcctcttcgtgtagcaggagccaccggagactatccgtccaccatctagtgcatcatcaccaccatcatcatcatcattaccacctgggtaacgggaccctgagggcaccaagagcttcccccgagatacaggaccgagacgcgaatggaagccgtagattgatgttacctcctccttctacccccgctctttcaggggcacccccaggaggtgccgagagcgtccattcattctaccatgccgattgtcatttagaaccggtccgctgccaggcccctccgcctcggtcaccaagcgaggcgtcaggaaggaccgtggggagtggaaaagtttaccccacagtgcacaccagccctccccctgagacactcaaagaaaaagctctggttgaagtagccgcatcctccgggcctcccaccttgacttctctgaacattccacctgggccttactcatcaatgcacaaacttctcgagacccagagcactggggcatgtcaaagttcttgcaaaattagcagtccttgccttaaagcagactcaggcgcttgtgggccagatagttgcccctattgtgccagggccggagctggagaagtagaactggcggatagggagatgcccgattccgattcagaggccgtttacgaatttactcaagacgctcaacacagcgatctccgggacccacactcccgcagacagagatccctgggtcctgacgcagagccaagctccgtgctagctttctggcgccttatttgtgacaccttcaggaagatcgtggattctaaatactttgggagaggcatcatgatagccatactggtgaacacactgtctatgggcattgagtaccacgaacagcctgaagagctaacaaatgcactggaaattagcaatatcgtgtttacctcactctttgcattagaaatgttactgaagctgcttgtatatggtccctttggatacatcaaaaacccctacaacatcttcgacggagtgatcgtggtgatcagtgtgtgggaaatagtaggacagcagggtgggggactgtccgtacttcgcacgtttcgactaatgcgcgtcctcaaactggtgaggttcctcccagcactgcagagacaactggttgtcctgatgaaaacaatggacaacgtagctactttttgcatgctgcttatgttgtttatctttatattttcaatacttggtatgcatttattcgggtgcaaatttgcatctgagagggacggggacactctgcctgacagaaagaacttcgatagcctgctgtgggccattgtgaccgtctttcagattctgacccaagaggattggaataaggtgttatacaacggaatggcctctacgtcaagctgggccgctctgtattttatcgcgctcatgaccttcggaaactatgtattatttaatcttctggtggcgatcctcgtggaagggtttcaggccgaggaaatctctaagcgcgaggatgccagcgggcagctgagctgtatacaactgccagttgactcacaggggggagatgcaaacaagagcgaatccgagccagacttctttagcccttccttagatggcgacggagatcgaaagaaatgtctggcactggtgagccttggcgaacatccggagctgagaaagtcactcctgccgccactcatcatccatacagcagctacccctatgtctctgccaaaatctaccagcactggcctcggggaggcgctcggccctgcgtcccggcgaactagctcctcaggttctgcggaaccaggagctgcccatgaaatgaagagccccccttctgcccgtagcagtccccatagcccctggtcagcagcgtcttcctggacaagtaggaggagctctcggaactcactgggcagagcccctagcttaaaacgccgttcgccatccggagaaagaaggagtctgctgtctggagaggggcaggagtctcaggatgaggaagagtcatccgaagaggagagagccagccctgcagggtctgaccaccgtcatagggggagcctcgagcgggaagctaaaagctctttcgatctccctgacactttacaggttcccggacttcacagaaccgcttcggggcgtggcagtgcttccgagcatcaggattgtaacggaaagagcgcaagtggcaggcttgcgagagctctgcgtcccgatgacccaccgctggatggcgacgacgccgatgacgaaggaaacctctccaagggagagcgagtcagagcatggatacgagcacgtctccccgcatgctgcctggagcgggacagttggtctgcatacattttccctccacagagcaggttccgcctattgtgccaccgaattattacacacaagatgtttgatcacgtcgtcctcgtgattatcttcctgaactgcatcacgatcgccatggagcgacccaaaattgatccacacagcgccgagcggatatttctgaccctgagcaattatatatttacagccgtgttccttgcggaaatgaccgttaaagtggtcgcgctcggatggtgcttcggcgagcaggcttaccttcgatcttcttggaatgtactggatggcttgctagtcctaattagcgtcattgacattctcgtgtcaatggtgagcgactcagggacaaagatactaggaatgctgcgcgtgctccgattgctcaggacactgcggcctctgagggtcatcagtagagctcaggggctgaagctggtggttgagacccttatgagcagtctcaaaccgataggaaatatcgtcgtgatctgctgtgcctttttcatcatttttgggattctaggcgtgcaactcttcaagggcaagttttttgtctgtcagggtgaggatactcgcaatatcaccaataagtccgactgcgcagaggcttcctaccggtgggtgcgacataagtacaatttcgataacttgggccaggctcttatgagcctgttcgtcttggcttcaaaggacggctgggtggatatcatgtacgacggcttagacgccgtgggagtggaccaacagcccatcatgaatcacaatccgtggatgcttctgtactttatttcctttctcttgatcgtggcgttcttcgtgcttaatatgtttgtcggggtcgtggtcgagaacttccacaaatgtagacagcaccaggaggaggaggaggccagacggagggaggagaaacggctgagacggctcgaaaaaaaacggagatctaaggagaaacagatggctgaggcccagtgcaagccctactactcagattatagtaggttcaggctcctggtccatcacttatgcaccagtcattatttggacttattcatcactggggtgattggactgaacgtggtgactatggcgatggaacactatcagcagcctcagatactcgacgaagccttaaaaatctgtaattacattttcacagttatctttgttctcgagtcagtgtttaaattggtcgcttttggcttcaggagattctttcaagatcggtggaaccagcttgaccttgctatcgtgctgctctcaatcatggggataacattggaggaaatagaggtgaatgctagcctgcctattaatccaactatcattcgtattatgcgcgtgctgcggatcgcaagagttcttaaactcctgaaaatggctgtggggatgcgcgcattacttgatactgtgatgcaagctctcccacaggtggggaacttgggcctgctctttatgctgctcttttttatcttcgcagccctcggtgtggaactgtttggggatctggagtgcgatgaaacacatccatgtgaaggcctcggaagacatgcaacttttcgcaatttcggtatggcattcctgactttgtttagagtgtctacaggagacaactggaatgggataatgaaagacactttaagagactgcgatcaggagtccacttgctataacactgtgatatcaccgatttactttgtttcattcgtgcttaccgcgcagtttgtactcgtgaacgtggtgatagccgtgctgatgaaacaccttgaggaatcaaataaggaagctaaagaagaggccgagctcgaggccgagctggagttggagatgaaaactctgagccctcagcctcactctccgctgggatctccctttctttggccgggagtggagggccctgactctcctgattcccccaaacctggggcactccatcccgcagctcacgccagaagcgcctctcacttcagcctggagcacccaacggacaggcagctgttcgacaccatctctctcctgatccaagggtcactcgagtgggaactgaaattaatggacgaactcgctggcccagggggacagccctctgcatttccctcagccccttcactcggcggaagtgatccacagataccgcttgcggagatggaggcattaagcttgacatccgaaatcgtgagcgagccaagctgttctctcgcgttaacagatgatagcctgcccgacgatatgcacactctcttgcttagcgccctagaatccaatatgcaaccccatcctaccgaactgcctgggccagacttgttaactgtacgcaaaagcggcgtcagccggacacactcgttgccaaacgacagctatatgtgccgacacggcagcactgcagagggccctctgggccatcggggatggggactgccgaaggctcagtctgggagtgtactgtctgttcacagccagccggctgatacaagttacattctgcagctcccaaaggatgccccacacctgctgcagccacatagtgctcccacatggggcacgatccccaaactccctcctcctggccgatcgccgttggcacaacggccactccgccgacaggcagccatcagaacggattccctggacgtgcaggggctgggaagtagggaggacctcttggctgaggtctctggcccatctcctcctctggctagggcttattcattctggggtcagtcctctacgcaggcccagcagcactccaggagccactcgaaaatctctaaacatatgacacctccagcaccatgcccaggccctgaacccaactggggaaaggggccacccgagactagatccagtctcgaattagacaccgagctcagttggatctcaggcgacctgttaccccctgggggacaggaagaacctccttctccaagggacttgaagaagtgctactccgtggaggcccagagttgtcaacgcagacccacaagctggctggatgaacagcgacgacatagcatagccgtcagttgcctggatagcggaagccagccccacctcggaactgatccctctaatctgggcggacaacctctgggtggacccggatctaggccgaaaaaaaaactgagtcccccaagcatcaccatcgatcccccagagagccaaggtccgagaaccccaccaagccccggaatttgcctgagacgccgagcaccttcctccgacagtaaagaccctctggcgtccggccctcctgactccatggccgcaagtccatctccaaaaaaggacgtgttgtctctgtctggcctaagcagcgaccccgctgaccttgaccctta

SEQ ID NO: 259675 - DNA, 7116 bp, Artificial Sequence
  derived and/or modified sequence
atggacgaggaggaggatggagcgggcgccgaggagtcgggacagccccggagcttcatgcggctcaacgacctgtcgggggccgggggccggccggggccggggtcagcagaaaaggacccgggcagcgcggactccgaggcggaggggctgccgtacccggcgctggccccggtggttttcttctacttgagccaggacagccgcccgcggagctggtgtctccgcacggtctgtaacccctggtttgagcgcatcagcatgttggtcatccttctcaactgcgtgaccctgggcatgttccggccatgcgaggacatcgcctgtgactcccagcgctgccggatcctgcaggcctttgatgacttcatctttgccttctttgccgtggagatggtggtgaagatggtggccttgggcatctttgggaaaaagtgttacctgggagacacttggaaccggcttgactttttcatcgtcatcgcagggatgctggagtactcgctggacctgcagaacgtcagcttctcagctgtcaggacagtccgtgtgctgcgaccgctcagggccattaaccgggtgcccagcatgcgcatccttgtcacgttgctgctggatacgctgcccatgctgggcaacgtcctgctgctctgcttcttcgtcttcttcatcttcggcatcgtcggcgtccagctgtgggcagggctgcttcggaaccgatgcttcctacctgagaatttcagcctccccctgagcgtggacctggagcgctattaccagacagagaacgaggatgagagccccttcatctgctcccagccacgcgagaacggcatgcggtcctgcagaagcgtgcccacgctgcgcggggacgggggcggtggcccaccttgcggtctggactatgaggcctacaacagctccagcaacaccacctgtgtcaactggaaccagtactacaccaactgctcagcgggggagcacaaccccttcaagggcgccatcaactttgacaacattggctatgcctggatcgccatcttccaggtcatcacgctggagggctgggtcgacatcatgtactttgtgatggatgctcattccttctacaatttcatctacttcatcctcctcatcatcgtgggctccttcttcatgatcaacctgtgcctggtggtgattgccacgcagttctcagagaccaagcagcgggaaagccagctgatgcgggagcagcgtgtgcggttcctgtccaacgccagcaccctggctagcttctctgagcccggcagctgctatgaggagctgctcaagtacctggtgtacatccttcgtaaggcagcccgcaggctggctcaggtctctcgggcagcaggtgtgcgggttgggctgctcagcagcccagcacccctcgggggccaggagacccagcccagcagcagctgctctcgctcccaccgccgcctatccgtccaccacctggtgcaccaccaccaccaccatcaccaccactaccacctgggcaatgggacgctcagggccccccgggccagcccggagatccaggacagggatgccaatgggtcccgccggctcatgctgccaccaccctcgacgcctgccctctccggggccccccctggtggcgcagagtctgtgcacagcttctaccatgccgactgccacttagagccagtccgctgccaggcgccccctcccaggtccccatctgaggcatccggcaggactgtgggcagcgggaaggtgtatcccaccgtgcacaccagccctccaccggagacgctgaaggagaaggcactagtagaggtggctgccagctctgggcccccaaccctcaccagcctcaacatcccacccgggccctacagctccatgcacaagctgctggagacacagagtacaggtgcctgccaaagctcttgcaagatctccagcccttgcttgaaagcagacagtggagcctgtggtccagacagctgcccctactgtgcccgggccggggcaggggaggtggagctcgccgaccgtgaaatgcctgactcagacagcgaggcagtttatgagttcacacaggatgcccagcacagcgacctccgggacccccacagccggcggcaacggagcctgggcccagatgcagagcccagctctgtgctggccttctggaggctaatctgtgacaccttccgaaagattgtggacagcaagtactttggccggggaatcatgatcgccatcctggtcaacacactcagcatgggcatcgaataccacgagcagcccgaggagcttaccaacgccctagaaatcagcaacatcgtcttcaccagcctctttgccctggagatgctgctgaagctgcttgtgtatggtccctttggctacatcaagaatccctacaacatcttcgatggtgtcattgtggtcatcagcgtgtgggagatcgtgggccagcaggggggcggcctgtcggtgctgcggaccttccgcctgatgcgtgtgctgaagctggtgcgcttcctgccggcgctgcagcggcagctggtggtgctcatgaagaccatggacaacgtggccaccttctgcatgctgcttatgctcttcatcttcatcttcagcatcctgggcatgcatctcttcggctgcaagtttgcctctgagcgggatggggacaccctgccagaccggaagaattttgactccttgctctgggccatcgtcactgtctttcagatcctgacccaggaggactggaacaaagtcctctacaatggtatggcctccacgtcgtcctgggcggccctttatttcattgccctcatgaccttcggcaactacgtgctcttcaatttgctggtcgccattctggtggagggcttccaggcggaggaaatcagcaaacgggaagatgcgagtggacagttaagctgtattcagctgcctgtcgactcccaggggggagatgccaacaagtccgaatcagagcccgatttcttctcacccagcctggatggtgatggggacaggaagaagtgcttggccttggtgtccctgggagagcacccggagctgcggaagagcctgctgccgcctctcatcatccacacggccgccacacccatgtcgctgcccaagagcaccagcacgggcctgggcgaggcgctgggccctgcgtcgcgccgcaccagcagcagcgggtcggcagagcctggggcggcccacgagatgaagtcaccgcccagcgcccgcagctctccgcacagcccctggagcgctgcaagcagctggaccagcaggcgctccagccggaacagcctcggccgtgcacccagcctgaagcggagaagcccaagtggagagcggcggtccctgttgtcgggagaaggccaggagagccaggatgaagaggagagctcagaagaggagcgggccagccctgcgggcagtgaccatcgccacagggggtccctggagcgggaggccaagagttcctttgacctgccagacacactgcaggtgccagggctgcatcgcactgccagtggccgagggtctgcttctgagcaccaggactgcaatggcaagtcggcttcagggcgcctggcccgggccctgcggcctgatgaccccccactggatggggatgacgccgatgacgagggcaacctgagcaaaggggaacgggtccgcgcgtggatccgagcccgactccctgcctgctgcctcgagcgagactcctggtcagcctacatcttccctcctcagtccaggttccgcctcctgtgtcaccggatcatcacccacaagatgttcgaccacgtggtccttgtcatcatcttccttaactgcatcaccatcgccatggagcgccccaaaattgacccccacagcgctgaacgcatcttcctgaccctctccaattacatcttcaccgcagtctttctggctgaaatgacagtgaaggtggtggcactgggctggtgcttcggggagcaggcgtacctgcggagcagttggaacgtgctggacgggctgttggtgctcatctccgtcatcgacattctggtgtccatggtctctgacagcggcaccaagatcctgggcatgctgagggtgctgcggctgctgcggaccctgcgcccgctcagggtgatcagccgggcgcaggggctgaagctggtggtggagacgctgatgtcctcactgaaacccatcggcaacattgtagtcatctgctgtgccttcttcatcattttcggcatcttgggggtgcagctcttcaaagggaagtttttcgtgtgccagggcgaggataccaggaacatcaccaataaatcggactgtgccgaggccagttaccggtgggtccggcacaagtacaactttgacaaccttggccaggccctgatgtccctgttcgttttggcctccaaggatggttgggtggacatcatgtacgatgggctggatgctgtgggcgtggaccagcagcccatcatgaaccacaacccctggatgctgctgtacttcatctcgttcctgctcattgtggccttctttgtcctgaacatgtttgtgggtgtggtggtggagaacttccacaagtgtcggcagcaccaggaggaagaggaggcccggcggcgggaggagaagcgcctacgaagactggagaaaaagagaaggagtaaggagaagcagatggctgaagcccagtgcaaaccttactactccgactactcccgcttccggctcctcgtccaccacttgtgcaccagccactacctggacctcttcatcacaggtgtcatcgggctgaacgtggtcaccatggccatggagcactaccagcagccccagattctggatgaggctctgaagatctgcaactacatcttcactgtcatctttgtcttggagtcagttttcaaacttgtggcctttggtttccgtcggttcttccaggacaggtggaaccagctggacctggccattgtgctgctgtccatcatgggcatcacgctggaggaaatcgaggtcaacgcctcgctgcccatcaaccccaccatcatccgcatcatgagggtgctgcgcattgcccgagtgctgaagctgctgaagatggctgtgggcatgcgggcgctgctggacacggtgatgcaggccctgccccaggtggggaacctgggacttctcttcatgttgttgtttttcatctttgcagctctgggcgtggagctctttggagacctggagtgtgacgagacacacccctgtgagggcctgggccgtcatgccacctttcggaactttggcatggccttcctaaccctcttccgagtctccacaggtgacaattggaatggcattatgaaggacaccctccgggactgtgaccaggagtccacctgctacaacacggtcatctcgcctatctactttgtgtccttcgtgctgacggcccagttcgtgctagtcaacgtggtgatcgccgtgctgatgaagcacctggaggagagcaacaaggaggccaaggaggaggccgagctagaggctgagctggagctggagatgaagaccctcagcccccagccccactcgccactgggcagccccttcctctggcctggggtcgagggccccgacagccccgacagccccaagcctggggctctgcacccagcggcccacgcgagatcagcctcccacttttccctggagcaccccacggacaggcagctgtttgacaccatatccctgctgatccagggctccctggagtgggagctgaagctgatggacgagctggcaggcccagggggccagccctctgccttcccttctgcccccagcctgggaggctccgacccacagatccctctagctgagatggaggctctgtctctgacgtcagagattgtgtctgaaccgtcctgctctctagctctgacggatgactctttgcctgatgacatgcacacactcttacttagtgccctggagagcaatatgcagccccaccccacggagctgccaggaccagacttactgactgtgcggaagtctggggtcagccgaacgcactctctgcccaatgacagctacatgtgtcggcatgggagcactgccgaggggcccctgggacacaggggctgggggctccccaaagctcagtcaggctccgtcttgtccgttcactcccagccagcagataccagctacatcctgcagcttcccaaagatgcacctcatctgctccagccccacagcgccccaacctggggcaccatccccaaactgcccccaccaggacgctcccctttggctcagaggccactcaggcgccaggcagcaataaggactgactccttggacgttcagggtctgggcagccgggaagacctgctggcagaggtgagtgggccctccccgcccctggcccgggcctactctttctggggccagtcaagtacccaggcacagcagcactcccgcagccacagcaagatctccaagcacatgaccccgccagccccttgcccaggcccagaacccaactggggcaagggccctccagagaccagaagcagcttagagttggacacggagctgagctggatttcaggagacctcctgccccctggcggccaggaggagcccccatccccacgggacctgaagaagtgctacagcgtggaggcccagagctgccagcgccggcctacgtcctggctggatgagcagaggagacactctatcgccgtcagctgcctggacagcggctcccaaccccacctgggcacagacccctctaaccttgggggccagcctcttggggggcctgggagccggcccaagaaaaaactcagcccgcctagtatcaccatagacccccccgagagccaaggtcctcggaccccgcccagccctggtatctgcctccggaggagggctccgtccagcgactccaaggatcccttggcctctggcccccctgacagcatggctgcctcgccctccccaaagaaagatgtgctgagtctctccggtttatcctctgacccagcagacctggacccctgagtcctgccccacttt

SEQ ID NO: 259676 - protein, 2273 aa, Artificial Sequence
  derived and/or modified sequence
MDEEEDGAGAEESGQPRSFMRLNDLSGAGGRPGPGSAEKDPGSADSEAEGLPYPALAPVVFFYLSQDSRPRSWCLRTVCNPWFERISMLVILLNCVTLGMFRPCEDIACDSQRCRILQAFDDFIFAFFAVEMVVKMVALGIFGKKCYLGDTWNRLDFFIVIAGMLEYSLDLQNVSFSAVRTVRVLRPLRAINRVPSMRILVTLLLDTLPMLGNVLLLCFFVFFIFGIVGVQLWAGLLRNRCFLPENFSLPLSVDLERYYQTENEDESPFICSQPRENGMRSCRSVPTLRGDGGGGPPCGLDYEAYNSSSNTTCVNWNQYYTNCSAGEHNPFKGAINFDNIGYAWIAIFQVITLEGWVDIMYFVMDAHSFYNFIYFILLIIVGSFFMINLCLVVIATQFSETKQRESQLMREQRVRFLSNASTLASFSEPGSCYEELLKYLVYILRKAARRLAQVSRAAGVRVGLLSSPAPLGGQETQPSSSCSRSHRRLSVHHLVHHHHHHHHHYHLGNGTLRAPRASPEIQDRDANGSRRLMLPPPSTPALSGAPPGGAESVHSFYHADCHLEPVRCQAPPPRSPSEASGRTVGSGKVYPTVHTSPPPETLKEKALVEVAASSGPPTLTSLNIPPGPYSSMHKLLETQSTGACQSSCKISSPCLKADSGACGPDSCPYCARAGAGEVELADREMPDSDSEAVYEFTQDAQHSDLRDPHSRRQRSLGPDAEPSSVLAFWRLICDTFRKIVDSKYFGRGIMIAILVNTLSMGIEYHEQPEELTNALEISNIVFTSLFALEMLLKLLVYGPFGYIKNPYNIFDGVIVVISVWEIVGQQGGGLSVLRTFRLMRVLKLVRFLPALQRQLVVLMKTMDNVATFCMLLMLFIFIFSILGMHLFGCKFASERDGDTLPDRKNFDSLLWAIVTVFQILTQEDWNKVLYNGMASTSSWAALYFIALMTFGNYVLFNLLVAILVEGFQAEEISKREDASGQLSCIQLPVDSQGGDANKSESEPDFFSPSLDGDGDRKKCLALVSLGEHPELRKSLLPPLIIHTAATPMSLPKSTSTGLGEALGPASRRTSSSGSAEPGAAHEMKSPPSARSSPHSPWSAASSWTSRRSSRNSLGRAPSLKRRSPSGERRSLLSGEGQESQDEEESSEEERASPAGSDHRHRGSLEREAKSSFDLPDTLQVPGLHRTASGRGSASEHQDCNGKSASGRLARALRPDDPPLDGDDADDEGNLSKGERVRAWIRARLPACCLERDSWSAYIFPPQSRFRLLCHRIITHKMFDHVVLVIIFLNCITIAMERPKIDPHSAERIFLTLSNYIFTAVFLAEMTVKVVALGWCFGEQAYLRSSWNVLDGLLVLISVIDILVSMVSDSGTKILGMLRVLRLLRTLRPLRVISRAQGLKLVVETLMSSLKPIGNIVVICCAFFIIFGILGVQLFKGKFFVCQGEDTRNITNKSDCAEASYRWVRHKYNFDNLGQALMSLFVLASKDGWVDIMYDGLDAVGVDQQPIMNHNPWMLLYFISFLLIVAFFVLNMFVGVVVENFHKCRQHQEEEEARRREEKRLRRLEKKRRSKEKQMAEAQCKPYYSDYSRFRLLVHHLCTSHYLDLFITGVIGLNVVTMAMEHYQQPQILDEALKICNYIFTVIFVLESVFKLVAFGFRRFFQDRWNQLDLAIVLLSIMGITLEEIEVNASLPINPTIIRIMRVLRIARVLKLLKMAVGMRALLDTVMQALPQVGNLGLLFMLLFFIFAALGVELFGDLECDETHPCEGLGRHATFRNFGMAFLTLFRVSTGDNWNGIMKDTLRDCDQESTCYNTVISPIYFVSFVLTAQFVLVNVVIAVLMKHLEESNKEAKEEAELEAELELEMKTLSPQPHSPLGSPFLWPGVEGPDSPDSPKPGALHPAAHARSASHFSLEHPTMQPHPTELPGPDLLTVRKSGVSRTHSLPNDSYMCRHGSTAEGPLGHRGWGLPKAQSGSVLSVHSQPADTSYILQLPKDAPHLLQPHSAPTWGTIPKLPPPGRSPLAQRPLRRQAAIRTDSLDVQGLGSREDLLAEVSGPSPPLARAYSFWGQSSTQAQQHSRSHSKISKHMTPPAPCPGPEPNWGKGPPETRSSLELDTELSWISGDLLPPGGQEEPPSPRDLKKCYSVEAQSCQRRPTSWLDEQRRHSIAVSCLDSGSQPHLGTDPSNLGGQPLGGPGSRPKKKLSPPSITIDPPESQGPRTPPSPGICLRRRAPSSDSKDPLASGPPDSMAASPSPKKDVLSLSGLSSDPADLDP

SEQ ID NO: 259677 - DNA, 5298 bp, Artificial Sequence
  derived and/or modified sequence
atggacgaggaggaggacggcgccggcgccgaggagagcggccagcccagaagcttcatgagactgaacgacctgagcggcgccggcggcagacccggccccggcagcgccgagaaggaccccggcagcgccgacagcgaggccgagggcctgccctaccccgccctggcccccgtggtgttcttctacctgagccaggacagcagacccagaagctggtgcctgagaaccgtgtgcaacccctggttcgagagaatcagcatgctggtgatcctgctgaactgcgtgaccctgggcatgttcagaccctgcgaggacatcgcctgcgacagccagagatgcagaatcctgcaggccttcgacgacttcatcttcgccttcttcgccgtggagatggtggtgaagatggtggccctgggcatcttcggcaagaagtgctacctgggcgacacctggaacagactggacttcttcatcgtgatcgccggcatgctggagtacagcctggacctgcagaacgtgagcttcagcgccgtgagaaccgtgagagtgctgagacccctgagagccatcaacagagtgcccagcatgagaatcctggtgaccctgctgctggacaccctgcccatgctgggcaacgtgctgctgctgtgcttcttcgtgttcttcatcttcggcatcgtgggcgtgcagctgtgggccggcctgctgagaaacagatgcttcctgcccgagaacttcagcctgcccctgagcgtggacctggagagatactaccagaccgagaacgaggacgagagccccttcatctgcagccagcccagagagaacggcatgagaagctgcagaagcgtgcccaccctgagaggcgacggcggcggcggccccccctgcggcctggactacgaggcctacaacagcagcagcaacaccacctgcgtgaactggaaccagtactacaccaactgcagcgccggcgagcacaaccccttcaagggcgccatcaacttcgacaacatcggctacgcctggatcgccatcttccaggtgatcaccctggagggctgggtggacatcatgtacttcgtgatggacgcccacagcttctacaacttcatctacttcatcctgctgatcatcgtgggcagcttcttcatgatcaacctgtgcctggtggtgatcgccacccagttcagcgagaccaagcagagagagagccagctgatgagagagcagagagtgagattcctgagcaacgccagcaccctggccagcttcagcgagcccggcagctgctacgaggagctgctgaagtacctggtgtacatcctgagaaaggccgccagaagactggcccaggtgagcagagccgccggcgtgagagtgggcctgctgagcagccccgcccccctgggcggccaggagacccagcccagcagcagctgcagcagaagccacagaagactgagcgtgcaccacctggtgcaccaccaccaccaccaccaccaccactaccacctgggcaacggcaccctgagagcccccagagccagccccgagatccaggacagagacgccaacggcagcagaagactgatgctgcccccccccagcacccccgccctgagcggcgccccccccggcggcgccgagagcgtgcacagcttctaccacgccgactgccacctggagcccgtgagatgccaggcccccccccccagaagccccagcgaggccagcggcagaaccgtgggcagcggcaaggtgtaccccaccgtgcacaccagccccccccccgagaccctgaaggagaaggccctggtggaggtggccgccagcagcggcccccccaccctgaccagcctgaacatcccccccggcccctacagcagcatgcacaagctgctggagacccagagcaccggcgcctgccagagcagctgcaagatcagcagcccctgcctgaaggccgacagcggcgcctgcggccccgacagctgcccctactgcgccagagccggcgccggcgaggtggagctggccgacagagagatgcccgacagcgacagcgaggccgtgtacgagttcacccaggacgcccagcacagcgacctgagagacccccacagcagaagacagagaagcctgggccccgacgccgagcccagcagcgtgctggccttctggagactgatctgcgacaccttcagaaagatcgtggacagcaagtacttcggcagaggcatcatgatcgccatcctggtgaacaccctgagcatgggcatcgagtaccacgagcagcccgaggagctgaccaacgccctggagatcagcaacatcgtgttcaccagcctgttcgccctggagatgctgctgaagctgctggtgtacggccccttcggctacatcaagaacccctacaacatcttcgacggcgtgatcgtggtgatcagcgtgtgggagatcgtgggccagcagggcggcggcctgagcgtgctgagaaccttcagactgatgagagtgctgaagctggtgagattcctgcccgccctgcagagacagctggtggtgctgatgaagaccatggacaacgtggccaccttctgcatgctgctgatgctgttcatcttcatcttcagcatcctgggcatgcacctgttcggctgcaagttcgccagcgagagagacggcgacaccctgcccgacagaaagaacttcgacagcctgctgtgggccatcgtgaccgtgttccagatcctgacccaggaggactggaacaaggtgctgtacaacggcatggccagcaccagcagctgggccgccctgtacttcatcgccctgatgaccttcggcaactacgtgctgttcaacctgctggtggccatcctggtggagggcttccaggccgaggagatcagcaagagagaggacgccagcggccagctgagctgcatccagctgcccgtggacagccagggcggcgacgccaacaagagcgagagcgagcccgacttcttcagccccagcctggacggcgacggcgacagaaagaagtgcctggccctggtgagcctgggcgagcaccccgagctgagaaagagcctgctgccccccctgatcatccacaccgccgccacccccatgagcctgcccaagagcaccagcaccggcctgggcgaggccctgggccccgccagcagaagaaccagcagcagcggcagcgccgagcccggcgccgcccacgagatgaagagcccccccagcgccagaagcagcccccacagcccctggagcgccgccagcagctggaccagcagaagaagcagcagaaacagcctgggcagagcccccagcctgaagagaagaagccccagcggcgagagaagaagcctgctgagcggcgagggccaggagagccaggacgaggaggagagcagcgaggaggagagagccagccccgccggcagcgaccacagacacagaggcagcctggagagagaggccaagagcagcttcgacctgcccgacaccctgcaggtgcccggcctgcacagaaccgccagcggcagaggcagcgccagcgagcaccaggactgcaacggcaagagcgccagcggcagactggccagagccctgagacccgacgacccccccctggacggcgacgacgccgacgacgagggcaacctgagcaagggcgagagagtgagagcctggatcagagccagactgcccgcctgctgcctggagagagacagctggagcgcctacatcttccccccccagagcagattcagactgctgtgccacagaatcatcacccacaagatgttcgaccacgtggtgctggtgatcatcttcctgaactgcatcaccatcgccatggagagacccaagatcgacccccacagcgccgagagaatcttcctgaccctgagcaactacatcttcaccgccgtgttcctggccgagatgaccgtgaaggtggtggccctgggctggtgcttcggcgagcaggcctacctgagaagcagctggaacgtgctggacggcctgctggtgctgatcagcgtgatcgacatcctggtgagcatggtgagcgacagcggcaccaagatcctgggcatgctgagagtgctgagactgctgagaaccctgagacccctgagagtgatcagcagagcccagggcctgaagctggtggtggagaccctgatgagcagcctgaagcccatcggcaacatcgtggtgatctgctgcgccttcttcatcatcttcggcatcctgggcgtgcagctgttcaagggcaagttcttcgtgtgccagggcgaggacaccagaaacatcaccaacaagagcgactgcgccgaggccagctacagatgggtgagacacaagtacaacttcgacaacctgggccaggccctgatgagcctgttcgtgctggccagcaaggacggctgggtggacatcatgtacgacggcctggacgccgtgggcgtggaccagcagcccatcatgaaccacaacccctggatgctgctgtacttcatcagcttcctgctgatcgtggccttcttcgtgctgaacatgttcgtgggcgtggtggtggagaacttccacaagtgcagacagcaccaggaggaggaggaggccagaagaagagaggagaagagactgagaagactggagaagaagagaagaagcaaggagaagcagatggccgaggcccagtgcaagccctactacagcgactacagcagattcagactgctggtgcaccacctgtgcaccagccactacctggacctgttcatcaccggcgtgatcggcctgaacgtggtgaccatggccatggagcactaccagcagccccagatcctggacgaggccctgaagatctgcaactacatcttcaccgtgatcttcgtgctggagagcgtgttcaagctggtggccttcggcttcagaagattcttccaggacagatggaaccagctggacctggccatcgtgctgctgagcatcatgggcatcaccctggaggagatcgaggtgaacgccagcctgcccatcaaccccaccatcatcagaatcatgagagtgctgagaatcgccagagtgctgaagctgctgaagatggccgtgggcatgagagccctgctggacaccgtgatgcaggccctgccccagctgtgggcctggagcagcctggagacctggagcgtgaccagacacacccccgtgagagcctgggccgtgatgccccccttcggcaccctggcctggcccagctag

SEQ ID NO: 259678 - DNA, 6822 bp, Artificial Sequence
  derived and/or modified sequence
atggacgaggaggaggacggcgccggcgccgaggagagcggccagcccagaagcttcatgagactgaacgacctgagcggcgccggcggcagacccggccccggcagcgccgagaaggaccccggcagcgccgacagcgaggccgagggcctgccctaccccgccctggcccccgtggtgttcttctacctgagccaggacagcagacccagaagctggtgcctgagaaccgtgtgcaacccctggttcgagagaatcagcatgctggtgatcctgctgaactgcgtgaccctgggcatgttcagaccctgcgaggacatcgcctgcgacagccagagatgcagaatcctgcaggccttcgacgacttcatcttcgccttcttcgccgtggagatggtggtgaagatggtggccctgggcatcttcggcaagaagtgctacctgggcgacacctggaacagactggacttcttcatcgtgatcgccggcatgctggagtacagcctggacctgcagaacgtgagcttcagcgccgtgagaaccgtgagagtgctgagacccctgagagccatcaacagagtgcccagcatgagaatcctggtgaccctgctgctggacaccctgcccatgctgggcaacgtgctgctgctgtgcttcttcgtgttcttcatcttcggcatcgtgggcgtgcagctgtgggccggcctgctgagaaacagatgcttcctgcccgagaacttcagcctgcccctgagcgtggacctggagagatactaccagaccgagaacgaggacgagagccccttcatctgcagccagcccagagagaacggcatgagaagctgcagaagcgtgcccaccctgagaggcgacggcggcggcggccccccctgcggcctggactacgaggcctacaacagcagcagcaacaccacctgcgtgaactggaaccagtactacaccaactgcagcgccggcgagcacaaccccttcaagggcgccatcaacttcgacaacatcggctacgcctggatcgccatcttccaggtgatcaccctggagggctgggtggacatcatgtacttcgtgatggacgcccacagcttctacaacttcatctacttcatcctgctgatcatcgtgggcagcttcttcatgatcaacctgtgcctggtggtgatcgccacccagttcagcgagaccaagcagagagagagccagctgatgagagagcagagagtgagattcctgagcaacgccagcaccctggccagcttcagcgagcccggcagctgctacgaggagctgctgaagtacctggtgtacatcctgagaaaggccgccagaagactggcccaggtgagcagagccgccggcgtgagagtgggcctgctgagcagccccgcccccctgggcggccaggagacccagcccagcagcagctgcagcagaagccacagaagactgagcgtgcaccacctggtgcaccaccaccaccaccaccaccaccactaccacctgggcaacggcaccctgagagcccccagagccagccccgagatccaggacagagacgccaacggcagcagaagactgatgctgcccccccccagcacccccgccctgagcggcgccccccccggcggcgccgagagcgtgcacagcttctaccacgccgactgccacctggagcccgtgagatgccaggcccccccccccagaagccccagcgaggccagcggcagaaccgtgggcagcggcaaggtgtaccccaccgtgcacaccagccccccccccgagaccctgaaggagaaggccctggtggaggtggccgccagcagcggcccccccaccctgaccagcctgaacatcccccccggcccctacagcagcatgcacaagctgctggagacccagagcaccggcgcctgccagagcagctgcaagatcagcagcccctgcctgaaggccgacagcggcgcctgcggccccgacagctgcccctactgcgccagagccggcgccggcgaggtggagctggccgacagagagatgcccgacagcgacagcgaggccgtgtacgagttcacccaggacgcccagcacagcgacctgagagacccccacagcagaagacagagaagcctgggccccgacgccgagcccagcagcgtgctggccttctggagactgatctgcgacaccttcagaaagatcgtggacagcaagtacttcggcagaggcatcatgatcgccatcctggtgaacaccctgagcatgggcatcgagtaccacgagcagcccgaggagctgaccaacgccctggagatcagcaacatcgtgttcaccagcctgttcgccctggagatgctgctgaagctgctggtgtacggccccttcggctacatcaagaacccctacaacatcttcgacggcgtgatcgtggtgatcagcgtgtgggagatcgtgggccagcagggcggcggcctgagcgtgctgagaaccttcagactgatgagagtgctgaagctggtgagattcctgcccgccctgcagagacagctggtggtgctgatgaagaccatggacaacgtggccaccttctgcatgctgctgatgctgttcatcttcatcttcagcatcctgggcatgcacctgttcggctgcaagttcgccagcgagagagacggcgacaccctgcccgacagaaagaacttcgacagcctgctgtgggccatcgtgaccgtgttccagatcctgacccaggaggactggaacaaggtgctgtacaacggcatggccagcaccagcagctgggccgccctgtacttcatcgccctgatgaccttcggcaactacgtgctgttcaacctgctggtggccatcctggtggagggcttccaggccgaggagatcagcaagagagaggacgccagcggccagctgagctgcatccagctgcccgtggacagccagggcggcgacgccaacaagagcgagagcgagcccgacttcttcagccccagcctggacggcgacggcgacagaaagaagtgcctggccctggtgagcctgggcgagcaccccgagctgagaaagagcctgctgccccccctgatcatccacaccgccgccacccccatgagcctgcccaagagcaccagcaccggcctgggcgaggccctgggccccgccagcagaagaaccagcagcagcggcagcgccgagcccggcgccgcccacgagatgaagagcccccccagcgccagaagcagcccccacagcccctggagcgccgccagcagctggaccagcagaagaagcagcagaaacagcctgggcagagcccccagcctgaagagaagaagccccagcggcgagagaagaagcctgctgagcggcgagggccaggagagccaggacgaggaggagagcagcgaggaggagagagccagccccgccggcagcgaccacagacacagaggcagcctggagagagaggccaagagcagcttcgacctgcccgacaccctgcaggtgcccggcctgcacagaaccgccagcggcagaggcagcgccagcgagcaccaggactgcaacggcaagagcgccagcggcagactggccagagccctgagacccgacgacccccccctggacggcgacgacgccgacgacgagggcaacctgagcaagggcgagagagtgagagcctggatcagagccagactgcccgcctgctgcctggagagagacagctggagcgcctacatcttccccccccagagcagattcagactgctgtgccacagaatcatcacccacaagatgttcgaccacgtggtgctggtgatcatcttcctgaactgcatcaccatcgccatggagagacccaagatcgacccccacagcgccgagagaatcttcctgaccctgagcaactacatcttcaccgccgtgttcctggccgagatgaccgtgaaggtggtggccctgggctggtgcttcggcgagcaggcctacctgagaagcagctggaacgtgctggacggcctgctggtgctgatcagcgtgatcgacatcctggtgagcatggtgagcgacagcggcaccaagatcctgggcatgctgagagtgctgagactgctgagaaccctgagacccctgagagtgatcagcagagcccagggcctgaagctggtggtggagaccctgatgagcagcctgaagcccatcggcaacatcgtggtgatctgctgcgccttcttcatcatcttcggcatcctgggcgtgcagctgttcaagggcaagttcttcgtgtgccagggcgaggacaccagaaacatcaccaacaagagcgactgcgccgaggccagctacagatgggtgagacacaagtacaacttcgacaacctgggccaggccctgatgagcctgttcgtgctggccagcaaggacggctgggtggacatcatgtacgacggcctggacgccgtgggcgtggaccagcagcccatcatgaaccacaacccctggatgctgctgtacttcatcagcttcctgctgatcgtggccttcttcgtgctgaacatgttcgtgggcgtggtggtggagaacttccacaagtgcagacagcaccaggaggaggaggaggccagaagaagagaggagaagagactgagaagactggagaagaagagaagaagcaaggagaagcagatggccgaggcccagtgcaagccctactacagcgactacagcagattcagactgctggtgcaccacctgtgcaccagccactacctggacctgttcatcaccggcgtgatcggcctgaacgtggtgaccatggccatggagcactaccagcagccccagatcctggacgaggccctgaagatctgcaactacatcttcaccgtgatcttcgtgctggagagcgtgttcaagctggtggccttcggcttcagaagattcttccaggacagatggaaccagctggacctggccatcgtgctgctgagcatcatgggcatcaccctggaggagatcgaggtgaacgccagcctgcccatcaaccccaccatcatcagaatcatgagagtgctgagaatcgccagagtgctgaagctgctgaagatggccgtgggcatgagagccctgctggacaccgtgatgcaggccctgccccaggtgggcaacctgggcctgctgttcatgctgctgttcttcatcttcgccgccctgggcgtggagctgttcggcgacctggagtgcgacgagacccacccctgcgagggcctgggcagacacgccaccttcagaaacttcggcatggccttcctgaccctgttcagagtgagcaccggcgacaactggaacggcatcatgaaggacaccctgagagactgcgaccaggagagcacctgctacaacaccgtgatcagccccatctacttcgtgagcttcgtgctgaccgcccagttcgtgctggtgaacgtggtgatcgccgtgctgatgaagcacctggaggagagcaacaaggaggccaaggaggaggccgagctggaggccgagctggagctggagatgaagaccctgagcccccagccccacagccccctgggcagccccttcctgtggcccggcgtggagggccccgacagccccgacagccccaagcccggcgccctgcaccccgccgcccacgccagaagcgccagccacttcagcctggagcaccccaccatgcagccccaccccaccgagctgcccggccccgacctgctgaccgtgagaaagagcggcgtgagcagaacccacagcctgcccaacgacagctacatgtgcagacacggcagcaccgccgagggccccctgggccacagaggctggggcctgcccaaggcccagagcggcagcgtgctgagcgtgcacagccagcccgccgacaccagctacatcctgcagctgcccaaggacgccccccacctgctgcagccccacagcgcccccacctggggcaccatccccaagctgcccccccccggcagaagccccctggcccagagacccctgagaagacaggccgccatcagaaccgacagcctggacgtgcagggcctgggcagcagagaggacctgctggccgaggtgagcggccccagcccccccctggccagagcctacagcttctggggccagagcagcacccaggcccagcagcacagcagaagccacagcaagatcagcaagcacatgaccccccccgccccctgccccggccccgagcccaactggggcaagggcccccccgagaccagaagcagcctggagctggacaccgagctgagctggatcagcggcgacctgctgccccccggcggccaggaggagccccccagccccagagacctgaagaagtgctacagcgtggaggcccagagctgccagagaagacccaccagctggctggacgagcagagaagacacagcatcgccgtgagctgcctggacagcggcagccagccccacctgggcaccgaccccagcaacctgggcggccagcccctgggcggccccggcagcagacccaagaagaagctgagcccccccagcatcaccatcgacccccccgagagccagggccccagaaccccccccagccccggcatctgcctgagaagaagagcccccagcagcgacagcaaggaccccctggccagcggcccccccgacagcatggccgccagccccagccccaagaaggacgtgctgagcctgagcggcctgagcagcgaccccgccgacctggacccctag

SEQ ID NO: 259679 - DNA, 5298 bp, Artificial Sequence
  derived and/or modified sequence
atggatgaggaggaagacggcgcaggcgccgaggagtctggtcagccacgttcatttatgcggttaaatgatctatctggcgctgggggcagacctggcccaggatcggcagagaaggaccccggtagtgctgacagcgaggcggaaggactaccataccctgctctcgctcctgttgttttcttttacctgagtcaggactctcggcctcgatcttggtgtctccgaactgtgtgtaacccctggttcgaacgaatctccatgctggttatactgttgaactgtgttacactgggtatgttcagaccctgtgaggacatcgcctgcgactcgcagcgctgcagaatcctgcaggcgtttgatgacttcattttcgcttttttcgccgtggagatggtggttaagatggtggccttgggaattttcgggaagaaatgttatctaggagacacatggaacaggctggacttcttcatcgttatcgcgggcatgctggagtattccctcgatctgcagaacgtatctttcagcgcagtgagaaccgtgagagtactgcgccctttgcgggcgattaatcgggtaccgtccatgcgcatcctcgtcacattgttacttgatacactgccaatgcttggcaatgtgctcctgctttgcttttttgtcttctttatttttgggatcgtgggggtgcagttgtgggcgggccttctgaggaatagatgctttctacccgagaacttcagcttgccactatctgtggatctggaacgctactaccaaacagagaatgaggacgaatccccatttatatgctcacaacctcgagagaatgggatgcgatcttgtcggtccgtgcccaccttgaggggtgacggcgggggtggccccccatgtgggctcgactatgaggcctataattcttcatccaataccacttgcgtaaattggaatcagtactataccaattgcagtgctggggagcacaaccccttcaagggagcaatcaacttcgacaacataggctatgcctggatcgctatctttcaggtcataaccctcgaaggatgggtggatataatgtatttcgtcatggacgcccatagcttctacaactttatctacttcatccttctgatcatcgtgggatcgttctttatgataaatctatgtctcgtggtgatagccactcagttcagcgagaccaagcaacgagaaagccagctcatgagggagcagagggtcaggttcctgtcaaacgcctcaactctcgcctcttttagcgagccggggtcctgttacgaagaactcctgaaatatttagtctacattctccggaaagctgctcgacgcctggcccaagtgagcagagcggcgggagttcgtgtgggactgctgtcctcacctgccccgctgggaggccaagagactcagcccagctcttcttgctcacggtcccacagaagactttcagtgcaccacctggtccatcaccaccaccatcaccaccaccattatcatctcggcaatggtaccctgcgggcccccagagcaagcccagaaattcaggatcgagacgctaacggaagtagaagactgatgctgcctcctccatccaccccagcattatccggcgccccccccggaggagcagagagcgtgcatagtttttatcatgccgattgccacctggagcctgtgaggtgtcaagccccccctccaagatcccccagtgaggcttcagggcggactgtgggtagtggcaaagtatacccgacggtgcacactagccccccacctgaaactttaaaggagaaggcgctggtggaggtcgctgcctcatctggccccccaaccctgaccagcctcaatataccaccaggaccatatagcagtatgcacaagcttcttgagacacagtctaccggtgcctgtcagtcgtcctgcaagatcagcagcccgtgcttaaaagcagactcaggagcatgtggccccgattcctgtccctattgtgccagagccggggccggtgaggtggagctggcagaccgagagatgccagactcagattccgaggccgtgtatgagttcacccaggatgcacagcatagcgatctgcgggatccccactctcgccgccagagatcccttggcccagacgccgagccttcttcggtcttggctttctggcggctcatttgtgatacttttcgcaagatcgttgacagcaagtatttcggccgcggaatcatgatcgctatcctggtgaataccctgtccatggggattgagtaccatgaacaacccgaggagctcacaaacgcccttgaaataagcaacatcgtttttacctccttatttgcactggagatgctgctgaaattgctggtctatggccccttcggatacattaaaaacccttataacatattcgatggtgtgatcgttgtcatctccgtgtgggagattgtgggacaacagggaggtggacttagcgtactgcgcacctttcgattgatgagggtgttgaaactggtgaggtttctgccagctctccagagacagctggtggtgttaatgaaaaccatggataatgtcgcaactttctgcatgctgctgatgctcttcatttttatcttttccatcctgggcatgcacctttttggatgcaaattcgcatccgaacgtgatggggatacacttcctgatagaaaaaacttcgactccttactgtgggcaattgtgacagttttccagatacttacacaagaagattggaacaaagtactgtataacgggatggcaagtacatcctcctgggccgctctctactttatagcccttatgaccttcggaaactatgttctgtttaatctgctggttgccatcctcgtggagggatttcaggccgaggagatttcaaagagagaggacgcctctggccagcttagttgcattcagctgccagtggactctcaggggggagatgccaataaatcagagtccgagcccgacttcttttccccaagccttgatggcgacggggataggaaaaagtgtctggcgctggtaagcctgggagagcatcccgagctccggaagtccctgctgccgcctctcatcatccacaccgccgctaccccgatgagcctccccaaaagtacttcaactggactgggggaagccttggggcctgctagcaggagaacctccagttccggatctgctgagccaggcgctgctcacgagatgaagagcccgccctctgctaggtcatcccctcactccccctggagcgccgctagcagttggacgagtcgccggtcatccaggaactctctcggaagggcaccatcactcaagcgtcggtcaccttctggggagcgaaggtcactgttgtcaggtgaaggacaggaaagccaggatgaagaggagagctccgaggaggagagggcctcaccagccgggtccgaccaccgtcatagagggtcactggagagggaggcaaaatcaagctttgatctccctgacacacttcaggtgcctggcttgcaccgcacggcatctggaagggggtccgcctccgagcatcaggactgtaacgggaaatccgcgagcggccgactcgctagagccctgcggccagacgacccaccccttgacggtgatgacgctgacgacgaagggaacttatctaaaggggagcgggttagagcctggatcagggcacgcctgccagcatgctgtctcgagagagattcctggtcagcctacatctttcccccacagagccgctttaggctactgtgccacaggataataacccacaagatgtttgaccacgtcgtcttggtaataatattcctgaactgcatcaccattgccatggagagaccaaaaatcgatcctcatagtgccgagcggatcttcctcactctctctaattatatatttacagctgtgttcttagcagagatgactgtgaaggtcgtggctctgggatggtgcttcggcgagcaggcgtatctgaggtcttcatggaacgtcctcgacggcctcctggttctgatatcggtcattgacattctggtgagtatggtcagtgattcaggcacaaaaattctgggcatgttacgcgtgctgcgacttctccgaacactgaggcctctgagagtgatttctcgcgcacagggcctgaagctggtcgtagaaaccctgatgagctccttaaagccaattgggaatatcgtcgtgatctgctgtgcatttttcatcattttcggaattctgggggtacagcttttcaaggggaaatttttcgtctgccagggcgaagacacacggaacataacaaacaaaagtgattgtgcggaggcgagttatcgttgggtcaggcataagtataacttcgacaacttggggcaggcgttgatgtcgttattcgtgctcgcttccaaggacggatgggtagatattatgtacgatgggctggatgccgtcggggtggatcagcaacccattatgaatcacaacccatggatgctgctgtactttatatcattccttctcatagtagccttttttgtgctgaacatgtttgtaggggtggttgtggaaaacttccacaagtgccgccagcatcaggaggaagaagaggcccgaagacgagaggagaagcggctgcgccgtttggaaaaaaagcgacggagcaaagagaaacagatggccgaagcccaatgcaagccgtattattcagattactcgagatttcgcctgctcgtgcaccacctgtgcacttctcattatctcgacctgtttatcactggggtgatagggctcaacgtcgtcaccatggcgatggagcactaccagcagccacagatactcgacgaagcattgaagatctgtaattacatcttcaccgtgatctttgtcctagagtcagtttttaagctcgtcgctttcggctttagacggttctttcaggatagatggaatcaattagatctggctattgttctcctgagcattatgggcataacactagaggaaatagaagtcaacgcttctctgcccattaaccccaccataatcagaatcatgcgtgtgctgcgaattgcaagggtgttaaaactgctcaagatggccgtcggaatgagagccttgttggataccgtgatgcaggcactcccccagctgtgggcctggagcagcctggagacttggtccgtcacaagacacactcccgtccgggcctgggctgtcatgccaccctttggtactctggcttggccttcttag

SEQ ID NO: 259680 - DNA, 6822 bp, Artificial Sequence
  derived and/or modified sequence
atggatgaggaggaggacggggcgggcgctgaggaatcaggacagcctcgcagttttatgcgactcaacgatttgtccggagccggcggacgtcctggtcctgggtctgctgagaaagaccccgggtccgccgactctgaggctgaaggacttccgtacccagctctagcgcccgtggtcttcttttacttgagtcaggacagtcgtcccagatcctggtgtctgagaactgtgtgcaacccctggttcgagaggatctcaatgttagtaattctgctcaattgcgtaactctgggtatgttcagaccttgtgaggacatagcatgtgacagccagagatgccgcatcctgcaggcctttgatgacttcatcttcgcgttttttgccgtggagatggtagtgaagatggtggcactgggaatttttggcaagaagtgttatctgggcgacacttggaacaggctggatttctttatagtaattgcgggcatgctcgagtatagtctggacctgcagaatgtatcattctccgctgtgaggacagtgcgggtgttgaggcccctgagagccatcaacagggtccctagcatgagaatcctggtaacattgctgttggacactctgccaatgttaggcaacgtgctgctcctttgctttttcgtgtttttcattttcgggatcgtgggcgtgcagctgtgggccggactgctgagaaaccgctgcttcctcccggaaaacttttcgctgcccctcagtgtcgacctcgagagatactaccagactgagaacgaggacgagagcccattcatttgttcgcaacccagagagaacgggatgcggagctgcagaagtgtgccaacccttagaggcgatgggggagggggccctccatgcggactcgactacgaagcctacaactcctcttctaacaccacttgtgttaattggaaccagtattatactaactgtagcgccggggaacacaaccccttcaaaggggctatcaattttgacaatattggttatgcctggattgccatattccaggtgataacattggagggatgggtggatatcatgtatttcgttatggatgcacacagtttctacaatttcatctacttcattctgctcatcatcgttggctcattcttcatgatcaatctttgtttagtggtgatcgccacacaattttccgaaaccaagcagcgcgaatctcagttgatgcgggagcagcgggttagattcctcagcaacgcctctaccctggcgtcgttctcggagcctggatcatgctatgaggagctcctcaagtatctggtttatattttaagaaaggccgctagacgcctggcgcaggtaagtcgtgcggcgggcgtccgtgtagggctcctctcatcacccgctcctctaggaggccaggagacgcaacccagttcttcatgctctcgcagccatcgcagactatctgtgcatcacctagtgcatcatcaccatcatcatcaccaccattatcacctggggaacgggactctgcgagctccccgagcgtcccctgagattcaagatagagacgctaatgggtcaaggcgcctcatgctgccgcccccatccacgcccgctctcagcggcgcgccacctggtggagctgaaagtgtgcacagcttctaccatgccgactgccacttggaacctgtgcgctgtcaggccccccccccacggtccccgtctgaagccagtggccgcaccgtcggctccggaaaggtgtacccaacagtgcatacctccccacctcctgagacactgaaggagaaggctctcgtagaggtggcagcctccagtggcccaccaacactcacatctctgaacattccaccagggccttacagcagcatgcacaaactgttggagacgcaatctactggagcatgccagtcatcttgcaaaatctctagcccatgtctgaaggcagatagtggggcttgcggaccagattcctgcccttactgcgctagagccggtgcgggggaggtggaactggctgacagggaaatgcctgattctgacagcgaagctgtctatgaatttacccaggatgcgcaacacagtgatctacgggacccacacagccggagacagcgctcattaggcccagacgctgagccttcctccgtcctggcattctggcgactaatctgcgatacatttcgaaaaatcgtggactcaaaatacttcggtagaggaatcatgatagccatcctggtaaacacactgtcaatggggatcgagtatcatgaacaacctgaagaattaaccaacgctctagagatatcaaacatcgtgttcacgtcactgtttgctttggagatgttgttaaagctactggtttatgggccctttggctatatcaaaaacccttacaatatctttgatggtgtgattgtggttatcagtgtgtgggagatcgttggacagcagggggggggcctctccgttctaagaacattccggttaatgcgcgtattaaaactcgtccgcttcttgcctgcattacagcgccagctcgtggtcctgatgaaaaccatggacaatgtggccacattctgcatgctgctgatgctctttattttcatcttcagcattctcggcatgcatctgttcgggtgtaagtttgctagtgagcgagacggagataccctgccagatagaaagaacttcgactcgctgctctgggcaatcgtcacagtgttccagatacttacacaggaggactggaacaaagttctgtataatggaatggccagtacgagctcatgggcggccctttacttcatcgctttgatgacctttggcaactacgtgctattcaatctcctagtagctatcctcgtggaaggttttcaagcggaagaaattagcaagcgcgaagacgcctccggacagctgagttgcattcagttgccagtggactctcagggaggggatgccaacaagagcgaatctgagcctgacttcttctccccctccctggatggtgacggcgaccgcaaaaaatgcctggccctcgtgtctctgggtgagcaccccgagctcaggaagtcactgctccccccattgatcatacataccgcagccacccccatgtctctgcctaaatcaacatctactggcctaggcgaggcacttggcccagcctctaggaggaccagctcatccggctcggctgagcctggcgccgctcacgaaatgaagtctccccccagcgccaggtcgagtccccatagtccttggtcagcagcctcctcctggacgtcccgcagatcttccaggaactcattaggtcgcgcgccctctttgaaacggaggagcccttcaggcgaacggaggtcactcctgagcggggaggggcaggagtctcaagacgaggaggagagcagcgaagaagagcgggcctcgcccgccgggtccgatcatcgccaccggggaagcctggagcgggaggccaagtcttccttcgatctccctgacacgctgcaggtgccaggcctccatagaaccgcctctggcagaggtagtgctagtgaacatcaagattgcaatgggaaaagcgcttcaggccgtcttgctcgggccttgcgccctgacgatccaccactagacggggatgatgcagacgacgaaggcaacctatccaagggcgaacgtgtgcgcgcctggatcagggcgaggctgccagcttgctgccttgagagggatagttggagcgcctatatatttccgccacagagccggtttaggctgttatgccatcgcatcattactcacaagatgttcgatcacgtggtgctggtcatcattttccttaattgtatcacaattgccatggagcgacctaaaatcgaccctcatagcgctgagcggatcttcctaaccttgtcgaattatatattcactgcagtgtttttagccgagatgacagtgaaagtcgtggccctggggtggtgctttggcgagcaagcctacctgaggtcttcctggaacgtgttggacggtcttctggtactcatctcagtcattgacattcttgtgtcgatggtgtccgatagtggaacaaagatcctgggcatgctgagggtgttgcgcctcttacggaccctgcgcccactgagagtgatcagccgagcccaggggctcaagctggtggtggaaacccttatgtcctcgttgaagcccatcgggaatattgtagtcatttgctgtgctttcttcattatcttcggcattctgggcgtgcagctgttcaagggtaaattctttgtgtgtcagggcgaggacactcgtaacatcacgaacaaaagtgactgcgcagaagccagttaccgctgggtgcgccacaaatacaacttcgataaccttggtcaggctctgatgagcctgttcgttctggcatctaaggacggatgggtggacattatgtacgatggactcgatgccgtcggggtggatcaacagccaattatgaatcacaacccttggatgctactctacttcattagttttcttctaatcgtcgctttctttgtgctcaacatgtttgttggagtggtcgtagagaactttcataaatgcagacagcaccaggaagaggaggaagcacgccgccgagaggagaagaggctcaggcgtctggaaaaaaagagacgctcaaaggagaaacagatggccgaagcccaatgcaagccctactactccgactatagtcgtttccgcctgctggtccatcacctgtgtacctcacactacttggaccttttcatcaccggcgtcattgggctgaatgtggtcaccatggctatggaacactaccagcagcctcagattctagacgaggccctgaagatatgtaactacatcttcaccgtgatattcgtgctcgagagcgtctttaaactggtggcctttggatttcgccgctttttccaggatagatggaaccagctggatctcgcaattgtattgctttcaatcatgggaatcacccttgaggagatcgaagtgaatgcgtcactccctatcaatcccaccatcatacgcataatgagggtgctgaggatcgctagagtgctgaaactcctgaaaatggcagtcggaatgcgggcgctgcttgacaccgtaatgcaagccctccctcaggttggaaaccttggccttctgtttatgctgctgtttttcatctttgctgcattaggtgtcgagctatttggggacctcgagtgtgacgagacccatccctgcgagggactgggccgacacgctacatttcgcaatttcgggatggctttccttacattattcagagtgtcgacaggagataactggaacggaattatgaaagatacattgagagattgcgatcaagaatccacatgctacaacacagtcatcagccctatttacttcgttagttttgtgctgaccgcgcagtttgtgctcgtgaatgtggtcatcgccgtgctgatgaagcacctggaagaatctaataaagaagcaaaggaggaagccgaactggaggccgagttggaactggagatgaaaacactctctccccaacctcattcccctcttggctccccatttctctggcctggtgtggaggggcccgactccccggatagtccaaaaccgggtgccctgcatcccgcagcccatgccaggtcagctagccatttctcgcttgagcatcctaccatgcaaccccatcctacagaactcccagggcctgacctgctgactgtcaggaaatctggcgtgtcacggacacactctctccctaatgattcgtatatgtgccgccacggatctactgccgagggcccgctgggacaccgagggtggggcctccctaaagcgcagtccggcagcgtactctctgtccatagccagcctgctgatacttcatatatcctgcaactgcccaaggacgcccctcacctactgcagccgcatagtgctccgacttggggaacgatcccaaagttaccccccccaggacgatcaccacttgctcaacgtccactgagacgccaggccgccattcgaactgacagtttagatgtgcaaggcctggggtctagagaggacctattggctgaagtgtcaggtcccagccctcccctcgccagggcctattcgttttggggccagtcttccacccaggctcaacaacactccaggagccatagtaaaatttctaaacacatgacgccaccggcgccttgtccgggcccagaacctaattggggcaaggggccaccggaaacgaggtcctctttggagctggataccgaactgagctggatcagtggtgacctgcttccgcccgggggccaggaggagcccccttccccgcgggatctcaaaaaatgttattccgttgaggctcagagctgccaaaggagacccacctcctggctggatgagcagaggcggcactcaattgccgtcagttgcttagacagtgggtcccagcctcatctcgggacggatcctagcaatctgggcggccagcccctaggtggaccgggatctcggcctaaaaaaaagctatcgcctcctagcattacgatcgaccccccagagtcacagggccccaggactccaccatcccccggaatttgcctaagaagaagggcaccgagcagcgactccaaagatcccctggcatccggaccacccgatagcatggctgcgtctccaagccccaagaaagatgttctctcactgtccggcctgagcagtgaccccgcggacttggatccctag

SEQ ID NO: 259681 - DNA, 5298 bp, Artificial Sequence
  derived and/or modified sequence
atggatgaggaggaggatggagctggagctgaggagagcggccagcccaggagcttcatgaggctgaatgacctgagcggggccggcggccggcccggccctggcagcgctgagaaggaccccggcagcgctgacagcgaggccgagggcctgccctacccagccctggcccctgtggtgttcttctacctgagccaggacagccggcccaggtcctggtgcctgaggacagtgtgcaacccctggtttgagcgcatctccatgctggtgatcctgctgaactgtgtgaccctgggcatgttccggccctgtgaagatattgcctgtgacagccagcgctgccgcatcctgcaggcctttgatgacttcatctttgccttctttgctgtggagatggtggtgaagatggtggccctgggcatctttgggaagaagtgctacctgggggacacctggaaccggctggacttcttcatcgtgattgctggcatgctggagtacagcctggacctgcagaatgtgtccttctctgctgtgaggacagtgcgggtgctgcggcccctgcgggccatcaacagagtgcccagcatgaggatcctggtgaccctgctgctggacaccctgcccatgctgggcaatgtgctgctgctgtgcttctttgtgttcttcatctttggaattgtgggcgtgcagctgtgggccggcctgctgaggaaccgctgcttcctgcctgagaacttcagcctgcccctgtctgtggacctggagcgctactaccagacagaaaatgaagatgagagccccttcatctgcagccagccccgggagaatggcatgaggagctgccgctctgtgcccaccctgcggggagatggcggcggcggccccccctgtggcctggactatgaggcctacaacagcagcagcaacaccacctgtgtgaactggaaccagtactacaccaactgcagcgctggggagcacaaccccttcaagggggccatcaactttgacaacatcggctacgcctggatcgccatcttccaggtgatcaccctggagggctgggtggacatcatgtactttgtgatggatgcccacagcttctacaacttcatctacttcatcctgctgatcatcgtgggcagcttcttcatgatcaacctgtgcctggtggtgattgccacccagttcagcgagaccaagcagcgggagagccagctgatgagggagcagagggtgcgcttcctgagcaatgccagcaccctggccagcttcagcgagcccggcagctgctatgaggagctgctgaagtacctggtgtacatcctgaggaaggccgcccggcggctggcccaggtgtccagagctgctggggtgcgggtgggcctgctgagcagccctgcccccctgggcggccaggagacccagcccagcagcagctgcagccgcagccaccggcggctgtctgtgcaccacctggtgcaccaccaccaccaccaccaccaccactaccacctgggcaatggcaccctgcgggccccccgggccagccctgagatccaggacagagatgccaacggcagccggcggctgatgctgcccccacccagcaccccagccctgagcggggcccctcctggaggagctgagagcgtgcacagcttctaccacgccgactgccacctggagcctgtgcgctgccaggcccccccacccaggagccccagcgaggccagcggccgcacagtgggcagcggcaaggtgtaccccaccgtgcacaccagccccccacctgagaccctgaaggagaaggccctggtggaggtggccgccagcagcggcccccccaccctgaccagcctgaacatccccccaggcccctacagctccatgcacaagctgctggagacccagagcactggagcctgccagagcagctgcaagatcagcagcccctgcctgaaggctgacagcggggcctgtggccctgacagctgcccctactgtgcccgggccggggccggggaggtggagctggccgaccgggagatgccagacagcgacagcgaggccgtgtatgagttcacccaggatgcccagcacagcgacctgcgggacccccacagccggcggcagaggagcctgggcccagatgctgagcccagctctgtgctggccttctggaggctcatctgtgacaccttcaggaagatcgtggacagcaagtacttcggccggggcatcatgattgccatcctggtgaacaccctgtccatgggcatcgagtaccacgagcagcctgaggagctgaccaatgccctggagatcagcaacatcgtgttcaccagcctgtttgccctggagatgctgctgaagctgctggtgtatggccccttcggctacatcaagaacccctacaacatctttgatggagtcatcgtggtgatctctgtgtgggagatcgtgggccagcagggcggcggcctgtctgtgctgcggaccttccggctgatgagggtgctgaagctggtgcgcttcctgcctgccctgcagaggcagctggtggtgctgatgaagaccatggacaacgtggccaccttctgcatgctgctgatgctgttcatcttcatcttcagcatcctgggcatgcacctgtttggctgcaagtttgccagcgagagagatggagacaccctgcctgacaggaagaactttgacagcctgctgtgggccatcgtgacagtgttccagatcctgacccaggaggactggaacaaggtgctgtacaacggcatggccagcaccagctcctgggccgccctgtacttcatcgccctgatgaccttcggcaactacgtgctcttcaacctgctggtggccatcctggtggagggcttccaggccgaggagatcagcaagcgggaggatgccagcggccagctgagctgcatccagctgcctgtggacagccagggcggagatgccaacaagtctgagagcgagccagacttcttcagccccagcctggatggagatggagacaggaagaagtgcctggccctggtgtccctgggggagcaccctgagctgaggaagagcctgctgcccccactcatcatccacacagctgccacccccatgagcctgcccaagagcaccagcacaggcctgggggaggccctgggccctgccagcaggaggaccagcagcagcggcagcgctgagcctggagctgcccacgagatgaagagcccccccagcgcccggagcagcccccacagcccctggagcgctgccagctcctggaccagccgccgcagcagcaggaacagcctgggccgggcccccagcctgaagagaagaagccccagcggggagcggcgcagcctgctgtctggagagggccaggagagccaggatgaggaggagagcagcgaggaggagcgggccagccctgctggcagtgaccaccgccaccggggcagcctggagcgggaggccaagagcagctttgacctgcctgacaccctgcaggtgcccggcctgcacaggacagccagcggccggggcagcgccagcgagcaccaggactgcaatggcaagagcgccagcggccgcctggcccgggccctgcggccagatgatcctcccctggatggagatgatgctgatgatgagggcaacctgagcaagggggagcgggtgcgggcctggatccgggcccggctgcctgcctgctgcctggagcgggacagctggagcgcctacatcttccccccccagagccgcttccggctgctgtgccaccgcatcatcacccacaagatgtttgaccacgtggtgctggtgatcatcttcctgaactgcatcaccatcgccatggagcggcccaagattgacccccacagcgctgagcgcatcttcctgaccctgagcaactacatcttcaccgctgtgttcctggccgagatgacagtgaaggtggtggccctgggctggtgcttcggggagcaggcctacctgcggagctcctggaatgtgctggatggcctgctggtgctgatctctgtgattgacatcctggtgtccatggtgtctgattctggcaccaagatcctgggcatgctgcgggtgctgcggctgctgcggaccctgcggcccctgcgggtcatcagccgggcccagggcctgaagctggtggtggagaccctgatgagcagcctgaagcccatcggcaacatcgtggtgatctgctgtgccttcttcatcatcttcggcatcctgggcgtgcagctgttcaagggcaagttctttgtgtgccagggcgaggacaccaggaacatcaccaacaagagtgactgtgccgaggccagctaccgctgggtgcgccacaagtacaactttgacaacctgggccaggccctgatgagcctgtttgtgctggccagcaaggatggctgggtggacatcatgtatgatggcctggatgctgtgggcgtggaccagcagcccatcatgaaccacaacccctggatgctgctgtacttcatctccttcctgctgattgtggccttctttgtgctgaacatgtttgtgggcgtggtggtggagaacttccacaagtgccggcagcaccaggaggaggaggaggcccggcggcgggaggagaagaggctgcggcggctggagaagaagagaagaagcaaggagaagcagatggccgaggcccagtgcaagccctactacagcgactacagccgcttccggctgctggtgcaccacctgtgcaccagccactacctggacctcttcatcactggagtcatcggcctgaatgtggtgaccatggccatggagcactaccagcagccccagatcctggatgaggccctgaagatctgcaactacatcttcaccgtcatctttgtgctggagagcgtcttcaagctggtggccttcggcttccgccgcttcttccaggaccgctggaaccagctggacctggccatcgtgctgctgagcatcatgggcatcaccctggaggagattgaggtgaatgccagcctgcccatcaaccccaccatcatccgcatcatgagggtgctgagaattgcccgggtgctgaagctgctgaagatggctgtgggcatgagggccctgctggacacagtgatgcaggccctgccccagctgtgggcctggagcagcctggagacctggagcgtgaccaggcacacccctgtgcgggcctgggccgtgatgccacccttcggcaccctggcctggcccagctag

SEQ ID NO: 259682 - DNA, 6822 bp, Artificial Sequence
  derived and/or modified sequence
atggatgaggaggaggatggagctggagctgaggagagcggccagcccaggagcttcatgaggctgaatgacctgagcggggccggcggccggcccggccctggcagcgctgagaaggaccccggcagcgctgacagcgaggccgagggcctgccctacccagccctggcccctgtggtgttcttctacctgagccaggacagccggcccaggtcctggtgcctgaggacagtgtgcaacccctggtttgagcgcatctccatgctggtgatcctgctgaactgtgtgaccctgggcatgttccggccctgtgaagatattgcctgtgacagccagcgctgccgcatcctgcaggcctttgatgacttcatctttgccttctttgctgtggagatggtggtgaagatggtggccctgggcatctttgggaagaagtgctacctgggggacacctggaaccggctggacttcttcatcgtgattgctggcatgctggagtacagcctggacctgcagaatgtgtccttctctgctgtgaggacagtgcgggtgctgcggcccctgcgggccatcaacagagtgcccagcatgaggatcctggtgaccctgctgctggacaccctgcccatgctgggcaatgtgctgctgctgtgcttctttgtgttcttcatctttggaattgtgggcgtgcagctgtgggccggcctgctgaggaaccgctgcttcctgcctgagaacttcagcctgcccctgtctgtggacctggagcgctactaccagacagaaaatgaagatgagagccccttcatctgcagccagccccgggagaatggcatgaggagctgccgctctgtgcccaccctgcggggagatggcggcggcggccccccctgtggcctggactatgaggcctacaacagcagcagcaacaccacctgtgtgaactggaaccagtactacaccaactgcagcgctggggagcacaaccccttcaagggggccatcaactttgacaacatcggctacgcctggatcgccatcttccaggtgatcaccctggagggctgggtggacatcatgtactttgtgatggatgcccacagcttctacaacttcatctacttcatcctgctgatcatcgtgggcagcttcttcatgatcaacctgtgcctggtggtgattgccacccagttcagcgagaccaagcagcgggagagccagctgatgagggagcagagggtgcgcttcctgagcaatgccagcaccctggccagcttcagcgagcccggcagctgctatgaggagctgctgaagtacctggtgtacatcctgaggaaggccgcccggcggctggcccaggtgtccagagctgctggggtgcgggtgggcctgctgagcagccctgcccccctgggcggccaggagacccagcccagcagcagctgcagccgcagccaccggcggctgtctgtgcaccacctggtgcaccaccaccaccaccaccaccaccactaccacctgggcaatggcaccctgcgggccccccgggccagccctgagatccaggacagagatgccaacggcagccggcggctgatgctgcccccacccagcaccccagccctgagcggggcccctcctggaggagctgagagcgtgcacagcttctaccacgccgactgccacctggagcctgtgcgctgccaggcccccccacccaggagccccagcgaggccagcggccgcacagtgggcagcggcaaggtgtaccccaccgtgcacaccagccccccacctgagaccctgaaggagaaggccctggtggaggtggccgccagcagcggcccccccaccctgaccagcctgaacatccccccaggcccctacagctccatgcacaagctgctggagacccagagcactggagcctgccagagcagctgcaagatcagcagcccctgcctgaaggctgacagcggggcctgtggccctgacagctgcccctactgtgcccgggccggggccggggaggtggagctggccgaccgggagatgccagacagcgacagcgaggccgtgtatgagttcacccaggatgcccagcacagcgacctgcgggacccccacagccggcggcagaggagcctgggcccagatgctgagcccagctctgtgctggccttctggaggctcatctgtgacaccttcaggaagatcgtggacagcaagtacttcggccggggcatcatgattgccatcctggtgaacaccctgtccatgggcatcgagtaccacgagcagcctgaggagctgaccaatgccctggagatcagcaacatcgtgttcaccagcctgtttgccctggagatgctgctgaagctgctggtgtatggccccttcggctacatcaagaacccctacaacatctttgatggagtcatcgtggtgatctctgtgtgggagatcgtgggccagcagggcggcggcctgtctgtgctgcggaccttccggctgatgagggtgctgaagctggtgcgcttcctgcctgccctgcagaggcagctggtggtgctgatgaagaccatggacaacgtggccaccttctgcatgctgctgatgctgttcatcttcatcttcagcatcctgggcatgcacctgtttggctgcaagtttgccagcgagagagatggagacaccctgcctgacaggaagaactttgacagcctgctgtgggccatcgtgacagtgttccagatcctgacccaggaggactggaacaaggtgctgtacaacggcatggccagcaccagctcctgggccgccctgtacttcatcgccctgatgaccttcggcaactacgtgctcttcaacctgctggtggccatcctggtggagggcttccaggccgaggagatcagcaagcgggaggatgccagcggccagctgagctgcatccagctgcctgtggacagccagggcggagatgccaacaagtctgagagcgagccagacttcttcagccccagcctggatggagatggagacaggaagaagtgcctggccctggtgtccctgggggagcaccctgagctgaggaagagcctgctgcccccactcatcatccacacagctgccacccccatgagcctgcccaagagcaccagcacaggcctgggggaggccctgggccctgccagcaggaggaccagcagcagcggcagcgctgagcctggagctgcccacgagatgaagagcccccccagcgcccggagcagcccccacagcccctggagcgctgccagctcctggaccagccgccgcagcagcaggaacagcctgggccgggcccccagcctgaagagaagaagccccagcggggagcggcgcagcctgctgtctggagagggccaggagagccaggatgaggaggagagcagcgaggaggagcgggccagccctgctggcagtgaccaccgccaccggggcagcctggagcgggaggccaagagcagctttgacctgcctgacaccctgcaggtgcccggcctgcacaggacagccagcggccggggcagcgccagcgagcaccaggactgcaatggcaagagcgccagcggccgcctggcccgggccctgcggccagatgatcctcccctggatggagatgatgctgatgatgagggcaacctgagcaagggggagcgggtgcgggcctggatccgggcccggctgcctgcctgctgcctggagcgggacagctggagcgcctacatcttccccccccagagccgcttccggctgctgtgccaccgcatcatcacccacaagatgtttgaccacgtggtgctggtgatcatcttcctgaactgcatcaccatcgccatggagcggcccaagattgacccccacagcgctgagcgcatcttcctgaccctgagcaactacatcttcaccgctgtgttcctggccgagatgacagtgaaggtggtggccctgggctggtgcttcggggagcaggcctacctgcggagctcctggaatgtgctggatggcctgctggtgctgatctctgtgattgacatcctggtgtccatggtgtctgattctggcaccaagatcctgggcatgctgcgggtgctgcggctgctgcggaccctgcggcccctgcgggtcatcagccgggcccagggcctgaagctggtggtggagaccctgatgagcagcctgaagcccatcggcaacatcgtggtgatctgctgtgccttcttcatcatcttcggcatcctgggcgtgcagctgttcaagggcaagttctttgtgtgccagggcgaggacaccaggaacatcaccaacaagagtgactgtgccgaggccagctaccgctgggtgcgccacaagtacaactttgacaacctgggccaggccctgatgagcctgtttgtgctggccagcaaggatggctgggtggacatcatgtatgatggcctggatgctgtgggcgtggaccagcagcccatcatgaaccacaacccctggatgctgctgtacttcatctccttcctgctgattgtggccttctttgtgctgaacatgtttgtgggcgtggtggtggagaacttccacaagtgccggcagcaccaggaggaggaggaggcccggcggcgggaggagaagaggctgcggcggctggagaagaagagaagaagcaaggagaagcagatggccgaggcccagtgcaagccctactacagcgactacagccgcttccggctgctggtgcaccacctgtgcaccagccactacctggacctcttcatcactggagtcatcggcctgaatgtggtgaccatggccatggagcactaccagcagccccagatcctggatgaggccctgaagatctgcaactacatcttcaccgtcatctttgtgctggagagcgtcttcaagctggtggccttcggcttccgccgcttcttccaggaccgctggaaccagctggacctggccatcgtgctgctgagcatcatgggcatcaccctggaggagattgaggtgaatgccagcctgcccatcaaccccaccatcatccgcatcatgagggtgctgagaattgcccgggtgctgaagctgctgaagatggctgtgggcatgagggccctgctggacacagtgatgcaggccctgccccaggtgggcaacctgggcctgctcttcatgctgctcttcttcatctttgctgccctgggcgtggagctgtttggagacctggagtgtgatgagacccacccctgtgagggcctgggcagacatgccaccttcaggaactttggcatggccttcctgaccctcttccgggtgtccactggagacaactggaatggcatcatgaaggacaccctgcgggactgtgaccaggagagcacctgctacaacacagtcatcagccccatctactttgtgtcctttgtgctgacagcccagtttgtgctggtgaatgtggtgattgctgtgctgatgaagcacctggaggagagcaacaaggaggccaaggaggaggccgagctggaggccgagctggagctggagatgaagaccctgagcccccagccccacagccccctgggcagccccttcctgtggccaggagtggagggccctgacagcccagacagccccaagccaggggccctgcaccctgctgcccacgcccggagcgccagccacttcagcctggagcaccccaccatgcagccccaccccacagagctgcccggccctgacctgctgactgtgaggaagtctggagtgtccaggacccacagcctgcccaatgacagctacatgtgccgccacggcagcacagctgagggccccctgggccaccggggctggggcctgcccaaggcccagagcggctctgtgctgtctgtgcacagccagcctgctgacaccagctacatcctgcagctgcccaaggatgccccccacctgctgcagccccacagcgcccccacctggggcaccatccccaagctgcccccacctggccgcagccccctggcccagaggcccctgcggcggcaggccgccatcagaacagacagcctggatgtgcagggcctgggcagccgggaggacctgctggccgaggtgtctggccccagcccccccctggcccgggcctacagcttctggggccagagcagcacccaggcccagcagcacagccgcagccacagcaagatcagcaagcacatgaccccaccagccccctgccccggccctgagcccaactggggcaagggccccccagagaccaggagcagcctggagctggacacagagctgtcctggatcagcggggacctgctgcccccaggcggccaggaggagccccccagcccccgggacctgaagaagtgctacagcgtggaggcccagagctgccagaggcggcccacctcctggctggatgagcagaggaggcacagcattgctgtgtcctgcctggacagcggcagccagccccacctgggcacagaccccagcaacctgggcggccagcccctgggcggccctggcagccggcccaagaagaagctgagcccccccagcatcaccattgatcctcctgagagccagggccccaggaccccacccagccctggcatctgcctgcggcggcgggcccccagcagtgacagcaaggaccccctggccagcggccccccagacagcatggccgccagccccagccccaagaaggatgtgctgagcctgagcggcctgagcagtgaccctgctgacctggacccctag

SEQ ID NO: 259683 - DNA, 5298 bp, Artificial Sequence
  derived and/or modified sequence
atggacgaggaggaggacggcgccggcgccgaggagagcggccagcctcgcagcttcatgagactgaatgatctatctggtgctggcgggcgtcccggacccggatccgccgaaaaagaccccggcagcgccgacagcgaagcggagggtctgccctatcctgctctcgcaccggtcgttttcttctatctttcgcaggatagtcggccccggagctggtgtctccgcaccgtttgcaatccgtggtttgaacgcatctctatgctcgtgatcctgctgaattgtgttaccctgggcatgttccgcccctgtgaagatattgcatgcgactcccaaagatgccggattttacaggctttcgacgactttatcttcgcgttctttgccgtggaaatggtggtcaaaatggttgccctgggaattttcggaaaaaagtgctacttgggagacacatggaatcgactggattttttcattgttatagcagggatgctggagtatagcctagatcttcagaatgtgtcttttagcgcagtgaggaccgtgcgggtgctgcgccccttgcgagccatcaatagagttcccagtatgcggatcctggttacattgctgctcgacacactgcccatgctcggcaacgtcctcctcctatgtttcttcgtgttctttatttttgggattgtaggcgtgcaactctgggccgggctcttaaggaatcggtgttttctgccagaaaactttagcttgcccctgtccgttgacctggaaaggtactatcagaccgagaacgaggacgagtcgccattcatctgctctcagccccgggagaacgggatgcgcagctgtagatccgtacccactctgcgtggcgatggaggagggggccccccgtgcgggctggactacgaggcatataatagcagtagcaacacgacctgcgtcaattggaaccaatattacaccaattgctctgctggggagcacaatccatttaaaggcgctatcaactttgacaatatcggctatgcctggattgcaattttccaagtgattaccctcgaagggtgggttgatatcatgtatttcgtgatggacgctcacagcttttacaattttatctacttcatactacttattattgtaggcagctttttcatgataaatctatgcctcgtggtgatcgcaacacaatttagcgagacgaaacagagggaatctcaactgatgagggagcagagggtgcggtttctgagcaacgcaagtacgctcgcaagcttcagcgaaccgggtagctgttacgaggagttgctgaagtacctcgtatacatacttcgtaaagccgctcgaaggctcgcccaggtgagtcgagcggccggggtgcgtgtgggcttactgagtagcccagcgccgctcggcgggcaagaaacccagcccagcagctcctgttccaggtcgcaccgtaggctcagcgtccaccatctggtgcatcaccatcatcatcatcatcaccactatcacctgggaaacggcaccctgcgggctcccagagcgagccctgagattcaggaccgcgacgcaaacgggtccaggcgtctaatgctgccacccccctctacaccagctctgtcgggagcaccacctggtggtgcggagtccgtgcattccttctaccacgccgactgtcacctggaacccgtccggtgtcaggcccctcctccccgctcacctagtgaggcgtcgggacgaacggttggctctgggaaagtgtatcccacagtgcacaccagccctccccctgagactctcaaagagaaagcccttgttgaggtggccgctagtagcggcccccctacacttacttctctgaatattcctccgggcccctacagtagcatgcacaagctgttggagacacagtctaccggggcctgtcagagttcttgtaagatctccagcccttgtttgaaggctgactcaggagcttgcggtccagacagttgcccctattgtgccagggcaggggccggtgaagtcgaactggccgaccgcgagatgcccgacagcgattccgaggccgtgtacgagttcacccaggatgcacagcattcagatctccgagacccacattctcgcaggcagcgctcgctggggccagatgctgagccctctagtgttctggccttctggagactaatttgcgacactttccgaaagatcgttgactctaaatactttggcaggggtattatgattgctattctggtcaataccttgagtatggggattgaataccatgagcagcccgaggaattaaccaatgcccttgagatctccaacatcgtatttacaagcctctttgcacttgagatgctgctcaagctccttgtctatggaccctttggctatattaagaatccctataacatcttcgatggcgtcatagtggtaatctccgtgtgggagattgtgggacagcagggcggcggactgagtgtactgagaactttcagactcatgcgggttctgaaattggttcgatttctgcccgcactgcagcgccagctcgtagtccttatgaagactatggacaacgtggcgactttctgtatgcttctgatgctttttatctttatcttttctatcttgggaatgcatctgttcggctgcaagttcgccagtgaaagagatggcgacactcttcccgatagaaaaaacttcgattcactgctgtgggccatagtcaccgtgtttcagatccttacacaggaggactggaataaagtcctctataacggtatggcctccacaagtagctgggctgccctctacttcatagccctgatgacgtttggtaactacgtgttgttcaatctgcttgtggcgatcctggtcgaagggttccaggcagaagagattagtaagcgtgaggatgcttcaggccaactcagttgtatccagttgccagtggactcccagggcggagacgccaataagagtgagtctgagcccgattttttcagcccatccctagatggagacggtgacagaaaaaagtgtttggctcttgtgtcccttggcgagcacccagagctgaggaagtccctgcttccaccattaatcattcataccgccgcaactcccatgtccttgcctaaatccactagcaccggactaggggaagcactgggcccagccagtagacggacaagcagttctgggagtgctgagcctggagccgctcacgagatgaaatccccgccctctgcaagatctagtcctcacagtccctggtccgcagcaagtagttggaccagccggcgtagctcccggaactcactcggccgggccccttccctcaagaggcgtagtccctccggcgagcgccggagtcttctctcaggggaaggccaggagtctcaggatgaggaggagagcagtgaggaagaaagggccagccccgccggttccgaccacagacaccgaggctcattggagagagaagctaagagctcattcgatctcccagatacactgcaggtaccaggcctacacaggactgctagcggcagagggagtgcttctgagcaccaagactgcaacgggaagagtgcttccggaaggctagccagggccctgagacctgatgacccccctctggatggggatgacgccgacgatgagggaaacctctcaaaaggtgaacgagtccgggcctggataagggcccggctgcctgcctgttgcttagagcgggactcgtggagcgcgtacatcttcccgccacaaagcagatttagactgctgtgtcatcgcattatcactcataaaatgtttgaccatgtcgtgcttgtgattatcttcttgaattgtatcactatcgccatggaacggcctaaaatcgaccctcactctgccgaaagaatctttttaacgctgtctaattacatattcacggcggtttttttggctgaaatgacagtgaaagtggtggctctgggctggtgtttcggcgaacaagcatatctgcgcagttcttggaacgtactggatgggctgctggtgctcatctctgtgatagacatcctggtgagcatggtctctgacagtggtactaagattctggggatgctccgcgtcctcaggctcctgcggacccttagaccactgcgtgttatttccagagctcaaggtctgaagcttgtggtggagaccctcatgtcctctctcaagcctattggaaacatcgtagtgatttgctgcgccttctttattatcttcggaatcctgggggtgcagttatttaagggaaaattcttcgtttgccagggtgaggacacacgtaacattaccaataagtcggattgcgctgaggcgtcttatagatgggtgcggcataagtacaactttgacaatttggggcaggcgcttatgtccctgttcgtcctggcatcgaaagatgggtgggtagacattatgtacgatgggctggatgccgttggggtagaccagcagccaatcatgaaccacaatccgtggatgctgctgtacttcatctccttcctgctcatcgtcgcgttctttgtgctcaacatgttcgtgggcgtggtagtcgagaatttccataagtgtagacaacaccaggaagaagaagaagcccggcgtagggaggagaagcggctgcgacggctggaaaagaagcggagatctaaggagaaacagatggccgaagcgcagtgcaagccatactattccgactattccagatttcggctcctggtccatcacctgtgcacctcccactatctggatctgttcatcaccggagttatcgggctgaacgtggtcaccatggctatggagcactatcagcagccacaaatactcgacgaggccctcaagatctgcaattatatatttactgtgatttttgtactggagagcgtcttcaagctagtcgcgtttgggttcaggagattcttccaggacagatggaatcagctggatcttgctatcgtgttgctgagtattatgggcattaccctggaggagatcgaggtaaatgcctccctgcccattaatcctaccatcattaggattatgagagtcctacgtattgccagagtgctgaaattgttgaaaatggccgtgggcatgagagctttactcgatactgtcatgcaagcactcccacaactttgggcttggagttcactggaaacttggtctgttacccggcacacccctgtgcgggcgtgggctgtgatgcctccattcggaacactggcctggccctcttag

SEQ ID NO: 259684 - DNA, 6822 bp, Artificial Sequence
  derived and/or modified sequence
atggacgaggaggaggacggcgccggcgccgaggagagcggccagccaaggagcttcatgcggctaaatgacctgagcggtgcgggcggacgccccggcccaggcagcgcagagaaggacccggggtcagccgattccgaggcagaggggctgccctacccagcgctggctccagtggtgtttttttacctctcccaggatagtagacctcggagctggtgtctgcgaacagtttgtaacccctggtttgaacggatttctatgttggttatcctcctcaattgtgtgacattaggcatgtttcggccatgtgaggatatcgcctgcgacagccagcggtgtcgcattttgcaagcattcgatgacttcattttcgccttcttcgcagtggaaatggtcgtgaaaatggtggctctgggtatcttcgggaagaagtgctatctgggagatacttggaaccggctagattttttcatcgtgattgctggcatgttagaatatagcctagacctgcagaacgtctccttttccgccgtgaggaccgtgcgcgtgctgcggcccttaagagctatcaacagggtcccttcaatgcggattctcgtcacactgctgctggacactcttccaatgctgggaaatgttctgctgctgtgcttcttcgtattctttatcttcggaatcgtaggcgtgcaactgtgggcgggtctactgagaaaccgatgcttcttacccgaaaatttctccctaccactgagtgtggacctggaacggtactatcagacagagaacgaagacgagtcccccttcatctgttcacaaccccgagagaacgggatgaggagctgtcggagcgtgcctacactgaggggggacggggggggaggacctccgtgcgggttggattatgaggcctataactcttcctctaataccacatgtgtgaattggaaccagtactataccaactgtagcgccggtgagcataacccctttaagggagcgataaacttcgacaacatcggctatgcatggatcgccatttttcaggtgatcacactggaaggatgggtggacataatgtattttgtgatggatgcacactctttttacaatttcatctatttcatactgctgatcatcgtgggatccttcttcatgatcaatctgtgtctcgtggtcattgctacccaattttctgagaccaagcagagagagtcgcagttgatgcgtgaacagcgagttagattcttgtctaatgcctctactctagcctctttctccgaacccggaagctgttacgaggagctcctgaaataccttgtgtacattcttagaaaggccgcaaggagactggctcaagttagccgagccgccggggtcagggtgggcctactcagcagccctgcccccttgggcggtcaggagacccagccctccagctcatgcagcagatcgcataggaggctgtctgtccatcatttggtgcatcatcatcaccaccaccaccaccactaccaccttgggaacggaactctcagggctcctcgggcctcccctgagatccaggatagggacgcgaatggcagcagacgcctgatgctgccgcccccatctactccggccttgtctggcgcgccaccaggtggcgcagagtccgtccattctttttaccatgccgactgtcacctagaacctgtcaggtgccaggctcccccacctagaagcccctctgaggcatctgggaggaccgtaggttctgggaaagtgtatccaacggtgcacactagcccacccccagaaacattaaaggaaaaagccctcgttgaggtggcggcctcctctggacctcccacccttacaagcttgaatattcctcccgggccttactctagcatgcataaactgctcgaaactcagagcactggcgcgtgccagtccagctgtaaaatctccagcccttgcctgaaagcggactccggagcatgtgggccggactcctgtccatattgtgcgcgagctggggcgggagaagttgagctggctgaccgcgagatgccggactccgacagcgaggccgtctacgaattcacgcaagacgcgcaacattccgacttgcgagatccacattcccgccggcagagatccttaggtcccgatgccgagcctagctctgtcttagctttttggaggctcatctgcgacacatttaggaagattgtagactctaaatacttcggtcggggtatcatgattgccatactggtcaatacgctcagtatgggaatcgaataccacgaacagccagaggagctgaccaatgcattagagatatccaacatagtttttacttcattattcgctctggagatgctgctcaaattgttggtctacggaccatttggctacataaagaatccctacaacatctttgatggcgttattgttgtgattagcgtatgggaaattgtgggacagcaaggcggcgggctgtctgtcctacggacatttaggctgatgcgggtgctcaaactggtaaggttcctccccgctctgcagagacagctagtagtcttaatgaagacaatggacaacgtggcaactttttgcatgttgctgatgttgtttatctttatcttctcaatactcgggatgcacctgtttggatgcaaattcgcatccgagagagacggagacaccctgccagaccgaaaaaactttgattcactgctgtgggcgatcgtgaccgtattccagattctgacacaagaggactggaataaagtgttgtacaatgggatggcctcaacaagtagctgggccgcactctattttatcgctctgatgactttcggtaattacgtcctttttaatttactggtggccatcctggtggagggttttcaggctgaggagatcagcaagcgagaggatgcctccggccagctcagctgtatacagctccctgtcgactcccagggaggtgatgcaaacaaaagcgagagcgagccagattttttcagcccaagcctggacggtgacggcgataggaagaagtgtctggcgctggtcagcctaggggaacatccagagctccggaagtctctcctgcctccattaattattcacaccgctgccacaccaatgtcgctacccaagtcaacatcgactgggctcggggaggccctcgggcctgcctcacgtagaaccagctcatccggctctgcagagcctggcgctgcacacgagatgaaaagcccccccagcgcccggtcaagcccccacagcccttggtcagcagcaagctcttggacaagccgccgttcatccaggaacagccttggccgggctccaagcctgaagcgccggtcaccgagcggtgaaaggcggtcgttgttgtcaggtgaaggacaagagtctcaggatgaggaggagagtagcgaggaagagcgggccagtccggcagggagtgatcacaggcatcgggggagcctcgaaagggaagcaaagtcctcatttgatctcccagatacccttcaggtcccggggttgcatagaaccgcttcaggaaggggcagcgccagcgagcaccaagactgtaatggtaagtcagcttcggggcggctagcccgcgcattaagacctgatgatcccccccttgatggggatgatgcagatgacgaggggaacctgtctaagggggagagggtgcgggcatggatacgagctaggctccccgcctgttgcttagaaagggactcctggtcagcatatatcttcccaccacagtcccggtttcgcctcctctgtcatagaatcataacacacaaaatgtttgatcacgtagtattagtcattattttcctcaactgtatcactattgccatggaaaggccgaaaatagacccccacagtgctgaacgtattttcctcactctgagtaactacatctttacagcagtctttctggcagaaatgactgtaaaagtcgtggccctaggatggtgctttggtgaacaggcctacttacgctcctcttggaacgttctggacgggctgctcgtgctgatctccgtgatcgatattcttgtgtctatggttagtgactctggcactaaaatcctggggatgttgagagtgcttcgcctgcttcgcacccttcggcccctacgggttatctccagagcccagggattgaagcttgtggtggagaccctcatgtcaagtctgaagcccatcggcaatatcgtggtgatttgttgtgcgttttttattatctttggtattctcggtgtgcagttgtttaaagggaaattttttgtttgtcagggcgaggacactcgaaatatcacaaacaaaagcgactgtgcggaagcctcatatagatgggtgaggcacaagtataattttgacaacctggggcaggcacttatgtctttgtttgtgttggccagcaaagacggatgggtggatattatgtacgatggcctggatgcagtgggcgtggaccagcagccgattatgaaccacaatccatggatgttgctttatttcatctcgtttctcttgatcgtcgcctttttcgtgctgaacatgtttgtaggagtcgtcgtggagaattttcataaatgccggcagcatcaagaagaagaggaggcgaggaggagggaggaaaagcgcttgcggcgactagaaaaaaagcgtaggagcaaggaaaagcagatggcagaagcccagtgcaaaccatattattcggactactctcgatttcgtctgctggtgcatcacctgtgcacctctcattatttagaccttttcataacaggcgtcattgggctgaatgtcgtgactatggcaatggagcattatcagcagccccagatcctcgacgaggcccttaagatttgcaattacattttcaccgtcatcttcgtgttggagtctgtgtttaagttggtcgcctttggattcagacgctttttccaggacagatggaaccagctagacctcgcgattgtgctcctgagcattatggggattactttagaagaaattgaggtgaacgcctccctgcccatcaatcctacaataattcggataatgcgggtgctgaggatcgcccgtgtcctcaagttactgaaaatggctgtagggatgagagctctgctggacacggtgatgcaggcgctcccccaggtgggaaacttgggcctgctgtttatgctgctgttcttcatttttgccgcactgggtgtggagttgttcggtgatctggagtgtgatgagactcacccttgtgaaggtctcgggagacacgccacttttaggaattttggaatggcctttctgacactgtttagagtcagcacaggtgacaattggaacggcattatgaaagatactttaagagattgcgatcaggaaagtacctgctataatacggttattagcccgatctacttcgtgagcttcgtgttaacagcgcagttcgtcctggtgaatgtggtaatagccgtgctgatgaaacacctggaggaaagtaacaaggaagctaaagaggaagcggagcttgaagccgaacttgaactcgaaatgaagacactgtctcctcaaccgcattctcctctgggatctcccttcctctggcctggagttgaaggacccgattctcccgattcgccgaagcctggcgccctacacccagcagcacatgcccgatccgcatcccatttttccctggagcatcccaccatgcaacctcacccaactgaactgcccgggcctgacttattaaccgtgagaaagtccggggtgtctagaacacattctctcccaaacgattcctacatgtgtcggcacggatctacggcggaaggccctctgggacatagaggatggggcctgcctaaggctcagtctggttcagtcttatctgtccactcccagccagcagacacaagctatattctccagctacctaaagatgctccacatctgctccagccgcattccgccccaacatggggaacgatccccaagctacctcctcccggcagatctcccctggcccaaaggcccctgagacggcaggcagctatccggacagactcactggacgtgcaaggacttgggagcagagaggacttgctggctgaggtctccggcccaagtcctcccctcgctcgcgcctacagcttttggggtcaatcttcaactcaggcccaacagcactcacgcagtcactctaaaataagcaaacacatgacccctcccgcgccttgccccgggccagagccaaattggggtaagggcccaccagagaccaggagctcccttgagctcgacaccgagctgagctggatcagtggtgatctgttaccacctggaggccaagaagaacccccctcaccaagagacctaaagaaatgttatagcgtggaagcgcaatcctgtcagcgacgacctacctcttggctggatgagcagcggcgacattccatcgctgtctcctgcctggattcgggttcacagccgcacctcggcactgacccttctaacctaggcgggcagcctctgggcggcccgggcagtcggcccaaaaagaagctgtcccccccctccatcactatcgaccctccagaatctcagggtccccggactcccccctctcctggcatatgtctgcgaaggagagccccaagtagcgattccaaggatcccctggccagtggaccacccgacagtatggccgcgagtccgtccccaaaaaaagatgtgctgtcactgagcgggctgtcatccgatcctgcagatctggatccctag

SEQ ID NO: 259685 - DNA, 5297 bp, Artificial Sequence
  derived and/or modified sequence
atggacgaggaggaggatggcgcaggggctgaggaatctggtcagcccaggagctttatgcggctcaatgatctgtctggagccggtggacgtcccggacccggatcagccgaaaaggatccaggttccgctgactctgaggccgaaggcctgccctatccagcgctggctcctgtcgtgttcttctatttatcacaagactcgcgccctagaagttggtgtctgcgcactgtgtgtaacccctggttcgagcgaattagtatgctggtcatcctcttgaactgcgtaactttgggcatgttcagaccctgcgaggatatcgcttgtgattcccagaggtgtaggatcctgcaggcctttgacgattttattttcgcctttttcgccgtcgagatggtggtcaagatggtggcactgggtatatttggcaagaaatgttatcttggggacacttggaatcggctggatttctttatcgtcatcgctggtatgctggagtactccctagacctccagaatgtcagtttcagcgctgtgcgtacggttcgagtgctcaggccacttagagcaataaatcgggtgccttcaatgcggattttggtgaccctgctgctcgatacactccccatgctgggaaacgtcttgcttttgtgcttctttgtgttctttatatttggtattgttggcgtgcagctttgggcgggtctactgcgcaacaggtgtttcttgccggagaattttagtctcccgctatcggtggatctggagcgctactatcagaccgagaacgaggacgagagccccttcatctgctcccagccgcgtgagaatggaatgaggtcctgtcgaagcgtgccaaccctccgtggtgacggaggaggaggcccaccatgtggtcttgattatgaagcttataattccagttctaacacgacctgcgtgaactggaatcagtattacaccaactgcagcgcaggcgaacacaatcctttcaaaggcgcaatcaattttgacaacatcggttatgcctggatcgcgatttttcaggtcattacgcttgagggctgggttgacatcatgtatttcgttatggacgctcatagcttttacaatttcatttactttatcctcctgatcatcgtaggcagtttcttcatgatcaatctatgcttggtcgtcatcgctacacaattcagcgagacgaagcaacgggaatcccaactcatgagagagcaacgcgtgcggtttctgagcaacgccagcacactggcttcattctctgagccaggctcttgttatgaagagcttctcaagtacctcgtgtatattctgcggaaggccgctagaaggcttgcccaggtgtcaagggctgctggagtgagagtcggcctcctcagttcaccagctccgctcggcggacaggagactcagccctccagttcgtgctcacggtctcatagaagactctcagtgcaccatctagtgcaccatcaccatcatcatcaccaccattatcacttgggaaatggcaccctgcgcgcaccacgggctagccccgaaatccaggaccgtgacgcaaatggaagccgacgactgatgctgccacctccatctactccagcattgtccggagccccacctggtggcgctgaaagtgtgcattccttctaccatgccgattgtcacctggagcctgtgaggtgtcaggctccgccacccaggagtccttcggaggcctctgggagaaccgtgggcagcggcaaggtatacccgacagtacatacaagtccaccaccggaaacccttaaagagaaggctttagtggaggtggctgccagttctggccctcctactctgacgtctctgaatattcctccgggaccatactcctccatgcataagttactggaaactcagtcaacaggagcctgtcagtcaagctgcaaaattagttctccttgcctgaaggctgattctggggcatgcggcccagacagctgcccctactgtgccagagcaggcgctggcgaagtggagctggccgatagagaaatgcccgattccgacagcgaggcagtctacgaatttacccaggacgctcaacacagtgacttgcgggacccacacagcaggagacagcggtccctcgggcctgatgctgagccatcctccgtgctcgctttctggcgtctgatctgcgatacctttcgcaagatcgtggattccaagtatttcgggagagggatcatgattgctatcctagtgaacaccctcagtatggggatcgagtaccatgagcagccagaggagctcaccaatgcactggagatctcgaacattgtatttacttctctctttgctctagaaatgcttttgaagttgctcgtatatggcccatttgggtatatcaagaatccatacaacatatttgatggagttattgtggtcattagcgtctgggagatcgtcggacagcaggggggaggactttcggtgcttagaaccttccgactcatgcgggtgcttaaactcgtcaggttcctgccagctctgcaacggcagcttgtcgtgctcatgaagaccatggacaacgtcgctactttttgtatgctgttaatgctttttatttttatctttagcatcctgggcatgcacctgttcggatgtaagttcgcgtcagaaagagacggcgatacgctcccagaccgtaaaaacttcgatagcctactttgggccattgtgacagttttccagatcctgacccaggaggattggaataaggtcctctacaacggcatggccagcacgtctagttgggccgctctttacttcattgctcttatgacattcggcaattacgtgctctttaatctgctcgtggctatactcgtggagggcttccaggccgaggaaatctccaagagggaggatgcaagcggacagctgtcatgtatccagctgccagttgacagccagggcggagatgccaataagagcgagagcgagccggatttctttagcccttctttagatggcgacggcgatcgaaagaaatgcctcgcccttgtgagtttgggcgagcaccctgagttgcgcaaaagtctgctgccccctttgatcattcataccgccgcaacacctatgtcacttcctaaatcaacttccaccggacttggggaggccctcgggccagcctcaagacgtacatcctcctctggatccgcagaacccggtgccgcacacgaaatgaaaagccccccttctgctagatcttcgccccattctccatggagcgcagcttctagttggaccagtagacggagcagtcgtaatagcctgggccgtgcacccagcctgaagagacggtcccccagcggtgagcggaggagtctgctgtcgggcgagggccaggagtcccaggatgaggaagaatctagtgaggaggagcgggcaagcccagcaggttccgatcacagacaccgaggctcccttgagcgagaagccaaatcttcttttgacctgcctgatactttgcaggttccaggtctccacaggacagctagtggacgcggttctgcctcagagcaccaggattgcaatggtaaaagtgcatcagggcgtctggctagagcactacgccctgacgatccacctctggacggggatgatgcagatgacgaggggaacctcagtaaaggcgaacgagtgagagcatggatccgggctagactaccagcctgttgcctggagagggactcttggtccgcatacatttttcctccccagagtagatttcgcttactgtgtcataggattatcacccacaagatgtttgaccatgtggttctggttatcatctttctcaattgtatcacaatcgccatggagagacctaaaattgatccccattctgcagagcggatcttcctgaccctgtccaactacatcttcaccgccgtgtttctggctgaaatgaccgtgaaggtcgtcgccctcggctggtgctttggtgagcaggcatatctccgcagcagctggaacgtcctcgacggattgctggtactgattagcgtgatcgacatcctcgtctctatggtgtcagatagcggcaccaagatactgggcatgctcagggtgctgcgcctgctccgtaccttgaggcccctgagagttatcagccgggctcaagggctcaaactggtggtggaaaccctgatgtcgtcactgaaacccatcggaaacatagtagtgatttgttgcgcgttctttattattttcggcatactcggcgtgcagctgtttaaaggaaagtttttcgtgtgccagggggaggacacccgtaatatcacaaataagtccgattgcgccgaagctagttaccgttgggtacgacacaaatacaattttgacaacctaggccaagcccttatgtccctgtttgtgcttgcttccaaagacggctgggtggatattatgtatgatggactcgatgcggttggggtcgatcagcagccgatcatgaatcataatccatggatgctattgtatttcatatcatttttgctgattgtggccttcttcgtgttaaacatgtttgtgggggtcgtggtggagaactttcacaagtgcaggcaacaccaggaagaagaagaggcgcgtaggcgagaagaaaagagactgcggagactcgaaaagaagagaagatcgaaagagaaacagatggccgaggcgcagtgcaagccctactattccgattattcccggttcagactcctggttcaccatctttgcacgtcccactatctggatctttttatcaccggggtgatcggacttaatgtcgttactatggctatggagcactaccagcaacctcagattctggacgaagctcttaaaatctgcaactacatttttactgtgatttttgtgctggagtcagtctttaagctggtcgctttcgggtttcgcagattttttcaggaccgatggaatcagcttgacctggcaattgtgttactgtccataatggggatcaccctggaggaaatagaggttaacgcttctctgccgatcaatccaaccatcatcaggatcatgagggttctgcggatcgctcgcgtgctcaaactgctcaagatggccgtcggaatgcgagcattgctggacaccgtcatgcaggctttgccacagctatgggcctggtcatcactggaaacttggtccgtgacccgtcatactccggttcgcgcatgggccgtaatgcccccttttggtacgctggcctggcctagcta

SEQ ID NO: 259686 - DNA, 6821 bp, Artificial Sequence
  derived and/or modified sequence
atggacgaggaggaagacggagcgggagcagaggaatcagggcagcctaggagcttcatgcgtctgaatgatctgagtggcgctggagggagacctgggcctgggagcgccgagaaggatccagggtcagcagactctgaggcagagggattaccatacccagcgctagcgccagtagttttcttctatctcagccaagacagccggccacgctcatggtgcttacgtaccgtgtgcaacccatggtttgagcgaatatccatgttagttattctactcaactgtgtgacgctgggaatgttccggccatgcgaagacattgcatgtgactctcagcgctgccggatcttgcaggcattcgatgatttcatttttgcattttttgcggtcgagatggtggttaagatggtcgcgttggggattttcggaaagaaatgctacctcggcgacacctggaaccgattggactttttcatcgtgattgctggaatgcttgagtacagcctggatcttcagaatgtttcattctccgctgtgaggactgtaagagtcctccgccctttaagagctattaacagggtcccttccatgaggatcctggtgactctgctgttagacaccctgcctatgctcggaaatgttctgttgctgtgtttctttgtgttctttatcttcggtattgtcggtgtccagctgtgggctggactgctgagaaacaggtgctttctaccagaaaatttttcgttgcccttatccgtcgacttggaaagatattatcagaccgagaatgaggatgagtctccgtttatttgctcccagccgagagagaacggcatgaggtcctgccgctccgttccaacattgagaggcgatggcggtggtggcccaccctgcggattagactacgaagcctacaacagctcaagtaatacaacttgtgtaaattggaatcagtactatactaattgttccgccggtgagcacaatccctttaagggggctataaatttcgacaatattggttacgcctggatcgccatttttcaggtgattaccctcgaaggctgggtggacatcatgtatttcgtcatggacgcacatagcttctataacttcatttactttatcttattgattatagttggatccttcttcatgattaacctgtgcctggtggtgatcgccacacaattctctgaaactaagcagcgggagtcacagctcatgcgcgagcaacgagtgaggttcctttctaacgcgtctaccttggcctcattcagcgagcccggatcatgctacgaggagctactgaagtatcttgtgtatattttgcgcaaggctgcacggaggctagcgcaggtgagccgcgcagccggtgtgagagttgggctgttgtcctcccctgcacccctaggaggtcaggagactcagccatcatccagctgtagccgcagccaccgtagactgtctgtgcaccatttggtacatcaccaccaccatcaccatcaccactatcatctgggaaacggcacgctgagagctcctcgcgctagccccgagatacaggatcgggatgccaatggatccaggcgcctcatgttaccgcctccttccacgccagccctttcaggggcaccacctggcggagcagagtctgtacatagtttctaccacgccgactgtcatctggaacccgtccgttgccaggcccctccaccgcgaagtcctagcgaagcttccggaaggacggtggggagcggtaaagtgtatcccactgtgcacacttcgccgcctccggagacactgaaggaaaaagctctagtcgaggttgcggcttcatcgggtccaccaaccctcaccagtctcaatattcctcccggtccatactcatcgatgcataagttactcgaaacccagtccacgggagcatgccagagcagctgtaaaatctcttctccgtgcctgaaagctgatagcggggcatgcggcccagactcttgcccctattgcgcaagagcgggagcaggggaagtggaactggcagatcgggaaatgcccgattctgatagtgaggccgtatacgaatttactcaggacgcacagcactccgatctgagagaccctcacagtcggagacagcggagccttggaccagacgccgaacccagtagcgtgctcgccttttggagactcatctgcgacacctttcggaagattgtggattcaaagtattttggccgaggcattatgattgctattctggtcaatactctttctatggggatcgaataccacgagcaacccgaggagctgaccaacgcactcgaaattagtaacattgtgttcacaagcctgttcgctttggagatgctccttaagctgttagtctatggccctttcggctatatcaaaaacccctacaatattttcgatggtgttattgttgtcataagcgtctgggaaatcgtggggcagcagggcggtggtctgtcagtgctcagaacgttccgcctgatgcgagtgctcaagctggtgaggttcctgcctgcgctgcaaaggcaactcgtggtgctgatgaaaacaatggataatgtcgcgacgttttgcatgctccttatgctcttcatctttattttctcaatactgggtatgcatctgtttggatgtaagttcgcctctgagcgcgatggcgacactctgcccgatcgtaaaaacttcgatagcctgctttgggctattgtaacagtatttcagatacttacccaggaggattggaataaggtcctctacaatggtatggcttctaccagtagttgggccgcactatactttattgcactcatgaccttcggtaattacgtactgttcaatcttctggtggcaatattagttgagggcttccaggcagaggaaattagcaagcgggaggatgcctctggacagctgtcttgtatacagctgccagtggattcacagggcggtgacgccaacaagtccgaaagtgaaccggactttttttcccctagcctggatggagatggcgatagaaaaaagtgcctggctctcgtctcactcggcgagcatcccgaattgcgcaaaagcctgttaccccctctcatcatccacaccgccgcaacccccatgtccctgccaaagtccactagcacaggactgggggaggccctgggccctgcaagcagaagaacctcatcctccggaagtgccgagcctggcgctgcccacgaaatgaagtcgcctcctagcgcacgcagcagcccgcattccccttggtccgccgcttccagttggactagccgcagatcctcccgaaactccctgggaagagccccaagcttaaaacgcaggagtccctctggagaaaggcggagtctgcttagtggcgagggccaggagtcccaggatgaagaggagagcagcgaagaagagcgtgcttctccggcaggttctgatcaccgccatcgaggtagtctggagagagaagctaagtccagcttcgacctgccagataccttgcaggtcccaggcctgcaccggacggcttctggcagaggctccgcctcggagcatcaggactgcaatggaaaatccgcttcagggaggctggccagagccctgaggccagacgatccacctctagatggtgatgatgctgacgacgagggcaacttatcaaagggagagcgggtcagagcatggatccgggctcggctcccagcttgttgtctggagcgcgactcttggtccgcttatatctttccaccccagagccgatttaggctactctgtcatcggattatcacccataaaatgtttgaccacgtggttctagtgatcattttcctgaactgcatcacaattgcaatggaacggcctaagatcgacccacattcagccgaacggatcttcctgacactctctaactacatcttcactgccgtatttctcgccgaaatgactgtaaaggtagtggccttgggatggtgcttcggggagcaggcttatttaagaagctcctggaacgtgcttgatggcctgttggtgctgatttccgttatcgatatcttggtgagcatggtgtccgattcggggacaaaaatactgggtatgcttagagttcttcgactgctgagaacactccggcctctcagagtcatctctagagcacaggggttgaagcttgtcgtcgagaccctcatgagctctctaaaacctataggcaatatagtggtgatctgctgcgcctttttcattatattcggcattctcggagtgcagctgtttaagggaaaattcttcgtctgtcagggggaggacaccagaaacattacgaacaagtccgactgcgcagaagcatcctaccgatgggtgcgtcacaagtataactttgataatcttggacaggccctgatgtctttgtttgtcttggctagcaaggacggctgggtcgatattatgtatgacgggctggacgccgtgggggtcgatcagcagcccatcatgaatcacaatccatggatgctcttgtacttcatttcctttcttcttatcgtggctttcttcgttttgaacatgtttgtgggagtggtggtggagaacttccacaaatgccgccagcatcaagaggaggaagaagctcggagacgcgaggaaaagagactaagaagactggagaaaaagagacgctccaaagaaaaacagatggcagaagcccagtgcaaaccttattacagtgactactctagattcagactcctggttcaccatttgtgtacttcacactatctggacttattcatcaccggtgtgattgggctgaacgtcgtcaccatggccatggaacactaccagcaacctcaaattctggacgaggccttgaagatctgcaattacatctttactgtgatcttcgtgctggaaagcgtcttcaaactggtcgctttcgggttcagacgtttcttccaggatcgctggaaccagctcgaccttgccatagttctgctctcgatcatggggattaccctggaagagatcgaggtaaacgcgtctctgccaatcaaccctacgattatcagaattatgagggtgctccgtatcgcaagggtactcaaattgttgaagatggccgtgggaatgcgagctcttctcgacaccgtgatgcaggccctgccacaggtgggtaatcttggacttctttttatgctgctgttttttatctttgctgctctgggcgtcgagctcttcggtgatctcgagtgtgatgaaacccacccgtgtgagggactgggacggcacgccacctttcgaaacttcgggatggccttcctgacattgttcagagtttccacgggagacaactggaacgggatcatgaaggataccctgcgcgattgtgaccaagagagtacgtgctacaacacagtaatatccccaatctattttgtctcgtttgttttgacggcccagtttgtgctggtgaacgtggtaatcgcggtgctgatgaaacacctcgaggagtccaacaaggaggcaaaggaagaggccgaactggaggctgagctggaactcgaaatgaaaacactgagcccacagccgcattcccccttaggtagccccttcctatggcctggggtggaggggccagactctcccgattcccccaaacctggtgcgctgcatcccgctgcgcatgccagatccgcgtctcatttctccctggaacaccccactatgcagcctcaccctaccgagcttcccggaccagatctccttaccgtgcgaaagtccggtgtttcccgaacgcactcgcttcccaatgattcctacatgtgccgacatggttccaccgccgaagggcctcttggccatcggggttgggggctgcctaaggcgcagtcaggttcagtcttgtcagtgcattcacagcccgcagatacaagttatatcttgcagctgcctaaggatgcaccccacctgctgcaaccccattccgcgccaacatggggaactatcccaaaacttcctcccccaggcaggagccccctggcccagaggcctctgcgcaggcaggcggctatcagaacagattctctagacgtccaggggctcggttcacgggaggatctgctggctgaagtctctggaccgagcccgcctcttgcaagagcatacagcttctggggccagtcttccactcaagcacagcagcacagcagaagccattctaaaatatctaagcatatgacgccccctgcaccctgtcctggacccgaacctaattggggtaagggtccccctgagactaggagcagtctcgagctcgacactgaacttagttggatttcgggcgacctgttacccccaggcggtcaggaggaaccaccatcccctcgggatctgaagaaatgttactctgtggaagcccaatcatgccagcgtaggcctacatcctggctagatgaacaacgacggcactccattgcagtcagctgcttggacagtggcagtcaaccacacctggggaccgatcctagcaaccttggcggtcagcctctgggcggacccggatcaagacctaagaagaaactgagcccgccaagtatcacaatcgatcctccggaaagccagggccctcggactccacctagtcctggtatatgtttgaggaggagggctccttctagcgactctaaagacccgcttgcgtcggggccacccgacagtatggcggctagtccttctcctaagaaagatgtgctgagtctgtccgggctgagctcagacccggctgacctcgacccata

SEQ ID NO: 259687 - DNA, 6788 bp, Artificial Sequence
  derived and/or modified sequence
atggacgaggaggaggatggagcgggcgccgaggagtcgggacagccccggagcttcatgcggctcaacgacctgtcgggggccgggggccggccggggccggggtcagcagaaaaggacccgggcagcgcggactccgaggcggaggggctgccgtacccggcgctggccccggtggttttcttctacttgagccaggacagccgcccgcggagctggtgtctccgcacggtctgtaacccctggtttgagcgcatcagcatgttggtcatccttctcaactgcgtgaccctgggcatgttccggccatgcgaggacatcgcctgtgactcccagcgctgccggatcctgcaggcctttgatgacttcatctttgccttctttgccgtggagatggtggtgaagatggtggccttgggcatctttgggaaaaagtgttacctgggagacacttggaaccggcttgactttttcatcgtcatcgcagggatgctggagtactcgctggacctgcagaacgtcagcttctcagctgtcaggacagtccgtgtgctgcgaccgctcagggccattaaccgggtgcccagcatgcgcatccttgtcacgttgctgctggatacgctgcccatgctgggcaacgtcctgctgctctgcttcttcgtcttcttcatcttcggcatcgtcggcgtccagctgtgggcagggctgcttcggaaccgatgcttcctacctgagaatttcagcctccccctgagcgtggacctggagcgctattaccagacagagaacgaggatgagagccccttcatctgctcccagccacgcgagaacggcatgcggtcctgcagaagcgtgcccacgctgcgcggggacgggggcggtggcccaccttgcggtctggactatgaggcctacaacagctccagcaacaccacctgtgtcaactggaaccagtactacaccaactgctcagcgggggagcacaaccccttcaagggcgccatcaactttgacaacattggctatgcctggatcgccatcttccaggtcatcacgctggagggctgggtcgacatcatgtactttgtgatggatgctcattccttctacaatttcatctacttcatcctcctcatcatcgtgggctccttcttcatgatcaacctgtgcctggtggtgattgccacgcagttctcagagaccaagcagcgggaaagccagctgatgcgggagcagcgtgtgcggttcctgtccaacgccagcaccctggctagcttctctgagcccggcagctgctatgaggagctgctcaagtacctggtgtacatccttcgtaaggcagcccgcaggctggctcaggtctctcgggcagcaggtgtgcgggttgggctgctcagcagcccagcacccctcgggggccaggagacccagcccagcagcagctgctctcgctcccaccgccgcctatccgtccaccacctggtgcaccaccaccaccaccatcaccaccactaccacctgggcaatgggacgctcagggccccccgggccagcccggagatccaggacagggatgccaatgggtcccgccggctcatgctgccaccaccctcgacgcctgccctctccggggccccccctggtggcgcagagtctgtgcacagcttctaccatgccgactgccacttagagccagtccgctgccaggcgccccctcccaggtccccatctgaggcatccggcaggactgtgggcagcgggaaggtgtatcccaccgtgcacaccagccctccaccggagacgctgaaggagaaggcactagtagaggtggctgccagctctgggcccccaaccctcaccagcctcaacatcccacccgggccctacagctccatgcacaagctgctggagacacagagtacaggtgcctgccaaagctcttgcaagatctccagcccttgcttgaaagcagacagtggagcctgtggtccagacagctgcccctactgtgcccgggccggggcaggggaggtggagctcgccgaccgtgaaatgcctgactcagacagcgaggcagtttatgagttcacacaggatgcccagcacagcgacctccgggacccccacagccggcggcaacggagcctgggcccagatgcagagcccagctctgtgctggccttctggaggctaatctgtgacaccttccgaaagattgtggacagcaagtactttggccggggaatcatgatcgccatcctggtcaacacactcagcatgggcatcgaataccacgagcagcccgaggagcttaccaacgccctagaaatcagcaacatcgtcttcaccagcctctttgccctggagatgctgctgaagctgcttgtgtatggtccctttggctacatcaagaatccctacaacatcttcgatggtgtcattgtggtcatcagcgtgtgggagatcgtgggccagcaggggggcggcctgtcggtgctgcggaccttccgcctgatgcgtgtgctgaagctggtgcgcttcctgccggcgctgcagcggcagctggtggtgctcatgaagaccatggacaacgtggccaccttctgcatgctgcttatgctcttcatcttcatcttcagcatcctgggcatgcatctcttcggctgcaagtttgcctctgagcgggatggggacaccctgccagaccggaagaattttgactccttgctctgggccatcgtcactgtctttcagatcctgacccaggaggactggaacaaagtcctctacaatggtatggcctccacgtcgtcctgggcggccctttatttcattgccctcatgaccttcggcaactacgtgctcttcaatttgctggtcgccattctggtggagggcttccaggcggaggaaatcagcaaacgggaagatgcgagtggacagttaagctgtattcagctgcctgtcgactcccaggggggagatgccaacaagtccgaatcagagcccgatttcttctcacccagcctggatggtgatggggacaggaagaagtgcttggccttggtgtccctgggagagcacccggagctgcggaagagcctgctgccgcctctcatcatccacacggccgccacacccatgtcgctgcccaagagcaccagcacgggcctgggcgaggcgctgggccctgcgtcgcgccgcaccagcagcagcgggtcggcagagcctggggcggcccacgagatgaagtcaccgcccagcgcccgcagctctccgcacagcccctggagcgctgcaagcagctggaccagcaggcgctccagccggaacagcctcggccgtgcacccagcctgaagcggagaagcccaagtggagagcggcggtccctgttgtcgggagaaggccaggagagccaggatgaagaggagagctcagaagaggagcgggccagccctgcgggcagtgaccatcgccacagggggtccctggagcgggaggccaagagttcctttgacctgccagacacactgcaggtgccagggctgcatcgcactgccagtggccgagggtctgcttctgagcaccaggactgcaatggcaagtcggcttcagggcgcctggcccgggccctgcggcctgatgaccccccactggatggggatgacgccgatgacgagggcaacctgagcaaaggggaacgggtccgcgcgtggatccgagcccgactccctgcctgctgcctcgagcgagactcctggtcagcctacatcttccctcctcagtccaggttccgcctcctgtgtcaccggatcatcacccacaagatgttcgaccacgtggtccttgtcatcatcttccttaactgcatcaccatcgccatggagcgccccaaaattgacccccacagcgctgaacgcatcttcctgaccctctccaattacatcttcaccgcagtctttctggctgaaatgacagtgaaggtggtggcactgggctggtgcttcggggagcaggcgtacctgcggagcagttggaacgtgctggacgggctgttggtgctcatctccgtcatcgacattctggtgtccatggtctctgacagcggcaccaagatcctgggcatgctgagggtgctgcggctgctgcggaccctgcgcccgctcagggtgatcagccgggcgcaggggctgaagctggtggtggagacgctgatgtcctcactgaaacccatcggcaacattgtagtcatctgctgtgccttcttcatcattttcggcatcttgggggtgcagctcttcaaagggaagtttttcgtgtgccagggcgaggataccaggaacatcaccaataaatcggactgtgccgaggccagttaccggtgggtccggcacaagtacaactttgacaaccttggccaggccctgatgtccctgttcgttttggcctccaaggatggttgggtggacatcatgtacgatgggctggatgctgtgggcgtggaccagcagcccatcatgaaccacaacccctggatgctgctgtacttcatctcgttcctgctcattgtggccttctttgtcctgaacatgtttgtgggtgtggtggtggagaacttccacaagtgtcggcagcaccaggaggaagaggaggcccggcggcgggaggagaagcgcctacgaagactggagaaaaagagaaggagtaaggagaagcagatggctgaagcccagtgcaaaccttactactccgactactcccgcttccggctcctcgtccaccacttgtgcaccagccactacctggacctcttcatcacaggtgtcatcgggctgaacgtggtcaccatggccatggagcactaccagcagccccagattctggatgaggctctgaagatctgcaactacatcttcactgtcatctttgtcttggagtcagttttcaaacttgtggcctttggtttccgtcggttcttccaggacaggtggaaccagctggacctggccattgtgctgctgtccatcatgggcatcacgctggaggaaatcgaggtcaacgcctcgctgcccatcaaccccaccatcatccgcatcatgagggtgctgcgcattgcccgagtgctgaagctgctgaagatggctgtgggcatgcgggcgctgctggacacggtgatgcaggccctgccccagctctgggcgtggagctctttggagacctggagtgtgacgagacacacccctgtgagggcctgggccgtcatgccacctttcggaactttggcatggccttcctaaccctcttccgagtctccacaggtgacaattggaatggcattatgaaggacaccctccgggactgtgaccaggagtccacctgctacaacacggtcatctcgcctatctactttgtgtccttcgtgctgacggcccagttcgtgctagtcaacgtggtgatcgccgtgctgatgaagcacctggaggagagcaacaaggaggccaaggaggaggccgagctagaggctgagctggagctggagatgaagaccctcagcccccagccccactcgccactgggcagccccttcctctggcctggggtcgagggccccgacagccccgacagccccaagcctggggctctgcacccagcggcccacgcgagatcagcctcccacttttccctggagcaccccacgatgcagccccaccccacggagctgccaggaccagacttactgactgtgcggaagtctggggtcagccgaacgcactctctgcccaatgacagctacatgtgtcggcatgggagcactgccgaggggcccctgggacacaggggctgggggctccccaaagctcagtcaggctccgtcttgtccgttcactcccagccagcagataccagctacatcctgcagcttcccaaagatgcacctcatctgctccagccccacagcgccccaacctggggcaccatccccaaactgcccccaccaggacgctcccctttggctcagaggccactcaggcgccaggcagcaataaggactgactccttggacgttcagggtctgggcagccgggaagacctgctggcagaggtgagtgggccctccccgcccctggcccgggcctactctttctggggccagtcaagtacccaggcacagcagcactcccgcagccacagcaagatctccaagcacatgaccccgccagccccttgcccaggcccagaacccaactggggcaagggccctccagagaccagaagcagcttagagttggacacggagctgagctggatttcaggagacctcctgccccctggcggccaggaggagcccccatccccacgggacctgaagaagtgctacagcgtggaggcccagagctgccagcgccggcctacgtcctggctggatgagcagaggagacactctatcgccgtcagctgcctggacagcggctcccaaccccacctgggcacagacccctctaaccttgggggccagcctcttggggggcctgggagccggcccaagaaaaaactcagcccgcctagtatcaccatagacccccccgagagccaaggtcctcggaccccgcccagccctggtatctgcctccggaggagggctccgtccagcgactccaaggatcccttggcctctggcccccctgacagcatggctgcctcgccctccccaaagaaagatgtgctgagtctctccggtttatcctctgacccagcagacctggacccctgagtcctgccccacttt

SEQ ID NO: 259688 - DNA, 6837 bp, Artificial Sequence
  derived and/or modified sequence
atggacgaggaggaggatggagcgggcgccgaggagtcgggacagccccggagcttcatgcggctcaacgacctgtcgggggccgggggccggccggggccggggtcagcagaaaaggacccgggcagcgcggactccgaggcggaggggctgccgtacccggcgctggccccggtggttttcttctacttgagccaggacagccgcccgcggagctggtgtctccgcacggtctgtaacccctggtttgagcgcatcagcatgttggtcatccttctcaactgcgtgaccctgggcatgttccggccatgcgaggacatcgcctgtgactcccagcgctgccggatcctgcaggcctttgatgacttcatctttgccttctttgccgtggagatggtggtgaagatggtggccttgggcatctttgggaaaaagtgttacctgggagacacttggaaccggcttgactttttcatcgtcatcgcagggatgctggagtactcgctggacctgcagaacgtcagcttctcagctgtcaggacagtccgtgtgctgcgaccgctcagggccattaaccgggtgcccagcatgcgcatccttgtcacgttgctgctggatacgctgcccatgctgggcaacgtcctgctgctctgcttcttcgtcttcttcatcttcggcatcgtcggcgtccagctgtgggcagggctgcttcggaaccgatgcttcctacctgagaatttcagcctccccctgagcgtggacctggagcgctattaccagacagagaacgaggatgagagccccttcatctgctcccagccacgcgagaacggcatgcggtcctgcagaagcgtgcccacgctgcgcggggacgggggcggtggcccaccttgcggtctggactatgaggcctacaacagctccagcaacaccacctgtgtcaactggaaccagtactacaccaactgctcagcgggggagcacaaccccttcaagggcgccatcaactttgacaacattggctatgcctggatcgccatcttccaggtcatcacgctggagggctgggtcgacatcatgtactttgtgatggatgctcattccttctacaatttcatctacttcatcctcctcatcatcgtgggctccttcttcatgatcaacctgtgcctggtggtgattgccacgcagttctcagagaccaagcagcgggaaagccagctgatgcgggagcagcgtgtgcggttcctgtccaacgccagcaccctggctagcttctctgagcccggcagctgctatgaggagctgctcaagtacctggtgtacatccttcgtaaggcagcccgcaggctggctcaggtctctcgggcagcaggtgtgcgggttgggctgctcagcagcccagcacccctcgggggccaggagacccagcccagcagcagctgctctcgctcccaccgccgcctatccgtccaccacctggtgcaccaccaccaccaccatcaccaccactaccacctgggcaatgggacgctcagggccccccgggccagcccggagatccaggacagggatgccaatgggtcccgccggctcatgctgccaccaccctcgacgcctgccctctccggggccccccctggtggcgcagagtctgtgcacagcttctaccatgccgactgccacttagagccagtccgctgccaggcgccccctcccaggtccccatctgaggcatccggcaggactgtgggcagcgggaaggtgtatcccaccgtgcacaccagccctccaccggagacgctgaaggagaaggcactagtagaggtggctgccagctctgggcccccaaccctcaccagcctcaacatcccacccgggccctacagctccatgcacaagctgctggagacacagagtacaggtgcctgccaaagctcttgcaagatctccagcccttgcttgaaagcagacagtggagcctgtggtccagacagctgcccctactgtgcccgggccggggcaggggaggtggagctcgccgaccgtgaaatgcctgactcagacagcgaggcagtttatgagttcacacaggatgcccagcacagcgacctccgggacccccacagccggcggcaacggagcctgggcccagatgcagagcccagctctgtgctggccttctggaggctaatctgtgacaccttccgaaagattgtggacagcaagtactttggccggggaatcatgatcgccatcctggtcaacacactcagcatgggcatcgaataccacgagcagcccgaggagcttaccaacgccctagaaatcagcaacatcgtcttcaccagcctctttgccctggagatgctgctgaagctgcttgtgtatggtccctttggctacatcaagaatccctacaacatcttcgatggtgtcattgtggtcatcagcgtgtgggagatcgtgggccagcaggggggcggcctgtcggtgctgcggaccttccgcctgatgcgtgtgctgaagctggtgcgcttcctgccggcgctgcagcggcagctggtggtgctcatgaagaccatggacaacgtggccaccttctgcatgctgcttatgctcttcatcttcatcttcagcatcctgggcatgcatctcttcggctgcaagtttgcctctgagcgggatggggacaccctgccagaccggaagaattttgactccttgctctgggccatcgtcactgtctttcagatcctgacccaggaggactggaacaaagtcctctacaatggtatggcctccacgtcgtcctgggcggccctttatttcattgccctcatgaccttcggcaactacgtgctcttcaatttgctggtcgccattctggtggagggcttccaggcggaggaaatcagcaaacgggaagatgcgagtggacagttaagctgtattcagctgcctgtcgactcccaggggggagatgccaacaagtccgaatcagagcccgatttcttctcacccagcctggatggtgatggggacaggaagaagtgcttggccttggtgtccctgggagagcacccggagctgcggaagagcctgctgccgcctctcatcatccacacggccgccacacccatgtcgctgcccaagagcaccagcacgggcctgggcgaggcgctgggccctgcgtcgcgccgcaccagcagcagcgggtcggcagagcctggggcggcccacgagatgaagtcaccgcccagcgcccgcagctctccgcacagcccctggagcgctgcaagcagctggaccagcaggcgctccagccggaacagcctcggccgtgcacccagcctgaagcggagaagcccaagtggagagcggcggtccctgttgtcgggagaaggccaggagagccaggatgaagaggagagctcagaagaggagcgggccagccctgcgggcagtgaccatcgccacagggggtccctggagcgggaggccaagagttcctttgacctgccagacacactgcaggtgccagggctgcatcgcactgccagtggccgagggtctgcttctgagcaccaggactgcaatggcaagtcggcttcagggcgcctggcccgggccctgcggcctgatgaccccccactggatggggatgacgccgatgacgagggcaacctgagcaaaggggaacgggtccgcgcgtggatccgagcccgactccctgcctgctgcctcgagcgagactcctggtcagcctacatcttccctcctcagtccaggttccgcctcctgtgtcaccggatcatcacccacaagatgttcgaccacgtggtccttgtcatcatcttccttaactgcatcaccatcgccatggagcgccccaaaattgacccccacagcgctgaacgcatcttcctgaccctctccaattacatcttcaccgcagtctttctggctgaaatgacagtgaaggtggtggcactgggctggtgcttcggggagcaggcgtacctgcggagcagttggaacgtgctggacgggctgttggtgctcatctccgtcatcgacattctggtgtccatggtctctgacagcggcaccaagatcctgggcatgctgagggtgctgcggctgctgcggaccctgcgcccgctcagggtgatcagccgggcgcaggggctgaagctggtggtggagacgctgatgtcctcactgaaacccatcggcaacattgtagtcatctgctgtgccttcttcatcattttcggcatcttgggggtgcagctcttcaaagggaagtttttcgtgtgccagggcgaggataccaggaacatcaccaataaatcggactgtgccgaggccagttaccggtgggtccggcacaagtacaactttgacaaccttggccaggccctgatgtccctgttcgttttggcctccaaggatggttgggtggacatcatgtacgatgggctggatgctgtgggcgtggaccagcagcccatcatgaaccacaacccctggatgctgctgtacttcatctcgttcctgctcattgtggccttctttgtcctgaacatgtttgtgggtgtggtggtggagaacttccacaagtgtcggcagcaccaggaggaagaggaggcccggcggcgggaggagaagcgcctacgaagactggagaaaaagagaaggagtaaggagaagcagatggctgaagcccagtgcaaaccttactactccgactactcccgcttccggctcctcgtccaccacttgtgcaccagccactacctggacctcttcatcacaggtgtcatcgggctgaacgtggtcaccatggccatggagcactaccagcagccccagattctggatgaggctctgaagatctgcaactacatcttcactgtcatctttgtcttggagtcagttttcaaacttgtggcctttggtttccgtcggttcttccaggacaggtggaaccagctggacctggccattgtgctgctgtccatcatgggcatcacgctggaggaaatcgaggtcaacgcctcgctgcccatcaaccccaccatcatccgcatcatgagggtgctgcgcattgcccgagtgctgaagctgctgaagatggctgtgggcatgcgggcgctgctggacacggtgatgcaggccctgccccaggtggggaacctgggacttctcttcatgttgttgtttttcatctttgcagctctgggcgtggagctctttggagacctggagtgtgacgagacacacccctgtgagggcctgggccgtcatgccacctttcggaactttggcatggccttcctaaccctcttccgagtctccacaggtgacaattggaatggcattatgaaggacaccctccgggactgtgaccaggagtccacctgctacaacacggtcatctcgcctatctactttgtgtccttcgtgctgacggcccagttcgtgctagtcaacgtggtgatcgccgtgctgatgaagcacctggaggagagcaacaaggaggccaaggaggaggccgagctagaggctgagctggagctggagatgaagaccctcagcccccagccccactcgccactgggcagccccttcctctggcctggggtcgagggccccgacagccccgacagccccaagcctggggctctgcacccagcggcccacgcgagatcagcctcccacttttccctggagcaccccacgatgcagccccaccccacggagctgccaggaccagacttactgactgtgcggaagtctggggtcagccgaacgcactctctgcccaatgacagctacatgtgtcggcatgggagcactgccgaggggcccctgggacacaggggctgggggctccccaaagctcagtcaggctccgtcttgtccgttcactcccagccagcagataccagctacatcctgcagcttcccaaagatgcacctcatctgctccagccccacagcgccccaacctggggcaccatccccaaactgcccccaccaggacgctcccctttggctcagaggccactcaggcgccaggcagcaataaggactgactccttggacgttcagggtctgggcagccgggaagacctgctggcagaggtgagtgggccctccccgcccctggcccgggcctactctttctggggccagtcaagtacccaggcacagcagcactcccgcagccacagcaagatctccaagcacatgaccccgccagccccttgcccaggcccagaacccaactggggcaagggccctccagagaccagaagcagcttagagttggacacggagctgagctggatttcaggagacctcctgccccctggcggccaggaggagcccccatccccacgggacctgaagaagtgctacagcgtggaggcccagagctgccagcgccggcctacgtcctggctggatgagcagaggagacactctatcgccgtcagctgcctggacagcggctcccaaccccacctgggcacagacccctctaaccttgggggccagcctcttggggggcctgggagccggcccaagaaaaaactcagcccgcctagtatcaccatagacccccccgagagccaaggtcctcggaccccgcccagccctggtatctgcctccggaggagggctccgtccagcgactccaaggatcccttggcctctggcccccctgacagcatggctgcctcgccctccccaaagaaagatgtgctgagtctctccggtttatcctctgacccagcagacctggacccctgagtcctgccccacttt

SEQ ID NO: 259689 - protein, 2298 aa, Artificial Sequence
  derived and/or modified sequence
MDEEEDGAGAEESGQPRSFMRLNDLSGAGGRPGPGSAEKDPGSADSEAEGLPYPALAPVVFFYLSQDSRPRSWCLRTVCNPWFERISMLVILLNCVTLGMFRPCEDIACDSQRCRILQAFDDFIFAFFAVEMVVKMVALGIFGKKCYLGDTWNRLDFFIVIAGMLEYSLDLQNVSFSAVRTVRVLRPLRAINRVPSMRILVTLLLDTLPMLGNVLLLCFFVFFIFGIVGVQLWAGLLRNRCFLPENFSLPLSVDLERYYQTENEDESPFICSQPRENGMRSCRSVPTLRGDGGGGPPCGLDYEAYNSSSNTTCVNWNQYYTNCSAGEHNPFKGAINFDNIGYAWIAIFQVITLEGWVDIMYFVMDAHSFYNFIYFILLIIVGSFFMINLCLVVIATQFSETKQRESQLMREQRVRFLSNASTLASFSEPGSCYEELLKYLVYILRKAARRLAQVSRAAGVRVGLLSSPAPLGGQETQPSSSCSRSHRRLSVHHLVHHHHHHHHHYHLGNGTLRAPRASPEIQDRDANGSRRLMLPPPSTPALSGAPPGGAESVHSFYHADCHLEPVRCQAPPPRSPSEASGRTVGSGKVYPTVHTSPPPETLKEKALVEVAASSGPPTLTSLNIPPGPYSSMHKLLETQSTGACQSSCKISSPCLKADSGACGPDSCPYCARAGAGEVELADREMPDSDSEAVYEFTQDAQHSDLRDPHSRRQRSLGPDAEPSSVLAFWRLICDTFRKIVDSKYFGRGIMIAILVNTLSMGIEYHEQPEELTNALEISNIVFTSLFALEMLLKLLVYGPFGYIKNPYNIFDGVIVVISVWEIVGQQGGGLSVLRTFRLMRVLKLVRFLPALQRQLVVLMKTMDNVATFCMLLMLFIFIFSILGMHLFGCKFASERDGDTLPDRKNFDSLLWAIVTVFQILTQEDWNKVLYNGMASTSSWAALYFIALMTFGNYVLFNLLVAILVEGFQAEGDANKSESEPDFFSPSLDGDGDRKKCLALVSLGEHPELRKSLLPPLIIHTAATPMSLPKSTSTGLGEALGPASRRTSSSGSAEPGAAHEMKSPPSARSSPHSPWSAASSWTSRRSSRNSLGRAPSLKRRSPSGERRSLLSGEGQESQDEEESSEEERASPAGSDHRHRGSLEREAKSSFDLPDTLQVPGLHRTASGRGSASEHQDCNGKSASGRLARALRPDDPPLDGDDADDEGNLSKGERVRAWIRARLPACCLERDSWSAYIFPPQSRFRLLCHRIITHKMFDHVVLVIIFLNCITIAMERPKIDPHSAERIFLTLSNYIFTAVFLAEMTVKVVALGWCFGEQAYLRSSWNVLDGLLVLISVIDILVSMVSDSGTKILGMLRVLRLLRTLRPLRVISRAQGLKLVVETLMSSLKPIGNIVVICCAFFIIFGILGVQLFKGKFFVCQGEDTRNITNKSDCAEASYRWVRHKYNFDNLGQALMSLFVLASKDGWVDIMYDGLDAVGVDQQPIMNHNPWMLLYFISFLLIVAFFVLNMFVGVVVENFHKCRQHQEEEEARRREEKRLRRLEKKRRSKEKQMAEAQCKPYYSDYSRFRLLVHHLCTSHYLDLFITGVIGLNVVTMAMEHYQQPQILDEALKICNYIFTVIFVLESVFKLVAFGFRRFFQDRWNQLDLAIVLLSIMGITLEEIEVNASLPINPTIIRIMRVLRIARVLKLLKMAVGMRALLDTVMQALPQVGNLGLLFMLLFFIFAALGVELFGDLECDETHPCEGLGRHATFRNFGMAFLTLFRVSTGDNWNGIMKDTLRDCDQESTCYNTVISPIYFVSFVLTAQFVLVNVVIAVLMKHLEESNKEAKEEAELEAELELEMKTLSPQPHSPLGSPFLWPGVEGPDSPDSPKPGALHPAAHARSASHFSLEHPTDRQLFDTISLLIQGSLEWELKLMDELAGPGGQPSAFPSAPSLGGSDPQMQPHPTELPGPDLLTVRKSGVSRTHSLPNDSYMCRHGSTAEGPLGHRGWGLPKAQSGSVLSVHSQPADTSYILQLPKDAPHLLQPHSAPTWGTIPKLPPPGRSPLAQRPLRRQAAIRTDSLDVQGLGSREDLLAEVSGPSPPLARAYSFWGQSSTQAQQHSRSHSKISKHMTPPAPCPGPEPNWGKGPPETRSSLELDTELSWISGDLLPPGGQEEPPSPRDLKKCYSVEAQSCQRRPTSWLDEQRRHSIAVSCLDSGSQPHLGTDPSNLGGQPLGGPGSRPKKKLSPPSITIDPPESQGPRTPPSPGICLRRRAPSSDSKDPLASGPPDSMAASPSPKKDVLSLSGLSSDPADLDP

SEQ ID NO: 259690 - DNA, 6897 bp, Artificial Sequence
  derived and/or modified sequence
atggacgaggaggaggacggcgccggcgccgaggagagcggccagcccagaagcttcatgagactgaacgacctgagcggcgccggcggcagacccggccccggcagcgccgagaaggaccccggcagcgccgacagcgaggccgagggcctgccctaccccgccctggcccccgtggtgttcttctacctgagccaggacagcagacccagaagctggtgcctgagaaccgtgtgcaacccctggttcgagagaatcagcatgctggtgatcctgctgaactgcgtgaccctgggcatgttcagaccctgcgaggacatcgcctgcgacagccagagatgcagaatcctgcaggccttcgacgacttcatcttcgccttcttcgccgtggagatggtggtgaagatggtggccctgggcatcttcggcaagaagtgctacctgggcgacacctggaacagactggacttcttcatcgtgatcgccggcatgctggagtacagcctggacctgcagaacgtgagcttcagcgccgtgagaaccgtgagagtgctgagacccctgagagccatcaacagagtgcccagcatgagaatcctggtgaccctgctgctggacaccctgcccatgctgggcaacgtgctgctgctgtgcttcttcgtgttcttcatcttcggcatcgtgggcgtgcagctgtgggccggcctgctgagaaacagatgcttcctgcccgagaacttcagcctgcccctgagcgtggacctggagagatactaccagaccgagaacgaggacgagagccccttcatctgcagccagcccagagagaacggcatgagaagctgcagaagcgtgcccaccctgagaggcgacggcggcggcggccccccctgcggcctggactacgaggcctacaacagcagcagcaacaccacctgcgtgaactggaaccagtactacaccaactgcagcgccggcgagcacaaccccttcaagggcgccatcaacttcgacaacatcggctacgcctggatcgccatcttccaggtgatcaccctggagggctgggtggacatcatgtacttcgtgatggacgcccacagcttctacaacttcatctacttcatcctgctgatcatcgtgggcagcttcttcatgatcaacctgtgcctggtggtgatcgccacccagttcagcgagaccaagcagagagagagccagctgatgagagagcagagagtgagattcctgagcaacgccagcaccctggccagcttcagcgagcccggcagctgctacgaggagctgctgaagtacctggtgtacatcctgagaaaggccgccagaagactggcccaggtgagcagagccgccggcgtgagagtgggcctgctgagcagccccgcccccctgggcggccaggagacccagcccagcagcagctgcagcagaagccacagaagactgagcgtgcaccacctggtgcaccaccaccaccaccaccaccaccactaccacctgggcaacggcaccctgagagcccccagagccagccccgagatccaggacagagacgccaacggcagcagaagactgatgctgcccccccccagcacccccgccctgagcggcgccccccccggcggcgccgagagcgtgcacagcttctaccacgccgactgccacctggagcccgtgagatgccaggcccccccccccagaagccccagcgaggccagcggcagaaccgtgggcagcggcaaggtgtaccccaccgtgcacaccagccccccccccgagaccctgaaggagaaggccctggtggaggtggccgccagcagcggcccccccaccctgaccagcctgaacatcccccccggcccctacagcagcatgcacaagctgctggagacccagagcaccggcgcctgccagagcagctgcaagatcagcagcccctgcctgaaggccgacagcggcgcctgcggccccgacagctgcccctactgcgccagagccggcgccggcgaggtggagctggccgacagagagatgcccgacagcgacagcgaggccgtgtacgagttcacccaggacgcccagcacagcgacctgagagacccccacagcagaagacagagaagcctgggccccgacgccgagcccagcagcgtgctggccttctggagactgatctgcgacaccttcagaaagatcgtggacagcaagtacttcggcagaggcatcatgatcgccatcctggtgaacaccctgagcatgggcatcgagtaccacgagcagcccgaggagctgaccaacgccctggagatcagcaacatcgtgttcaccagcctgttcgccctggagatgctgctgaagctgctggtgtacggccccttcggctacatcaagaacccctacaacatcttcgacggcgtgatcgtggtgatcagcgtgtgggagatcgtgggccagcagggcggcggcctgagcgtgctgagaaccttcagactgatgagagtgctgaagctggtgagattcctgcccgccctgcagagacagctggtggtgctgatgaagaccatggacaacgtggccaccttctgcatgctgctgatgctgttcatcttcatcttcagcatcctgggcatgcacctgttcggctgcaagttcgccagcgagagagacggcgacaccctgcccgacagaaagaacttcgacagcctgctgtgggccatcgtgaccgtgttccagatcctgacccaggaggactggaacaaggtgctgtacaacggcatggccagcaccagcagctgggccgccctgtacttcatcgccctgatgaccttcggcaactacgtgctgttcaacctgctggtggccatcctggtggagggcttccaggccgagggcgacgccaacaagagcgagagcgagcccgacttcttcagccccagcctggacggcgacggcgacagaaagaagtgcctggccctggtgagcctgggcgagcaccccgagctgagaaagagcctgctgccccccctgatcatccacaccgccgccacccccatgagcctgcccaagagcaccagcaccggcctgggcgaggccctgggccccgccagcagaagaaccagcagcagcggcagcgccgagcccggcgccgcccacgagatgaagagcccccccagcgccagaagcagcccccacagcccctggagcgccgccagcagctggaccagcagaagaagcagcagaaacagcctgggcagagcccccagcctgaagagaagaagccccagcggcgagagaagaagcctgctgagcggcgagggccaggagagccaggacgaggaggagagcagcgaggaggagagagccagccccgccggcagcgaccacagacacagaggcagcctggagagagaggccaagagcagcttcgacctgcccgacaccctgcaggtgcccggcctgcacagaaccgccagcggcagaggcagcgccagcgagcaccaggactgcaacggcaagagcgccagcggcagactggccagagccctgagacccgacgacccccccctggacggcgacgacgccgacgacgagggcaacctgagcaagggcgagagagtgagagcctggatcagagccagactgcccgcctgctgcctggagagagacagctggagcgcctacatcttccccccccagagcagattcagactgctgtgccacagaatcatcacccacaagatgttcgaccacgtggtgctggtgatcatcttcctgaactgcatcaccatcgccatggagagacccaagatcgacccccacagcgccgagagaatcttcctgaccctgagcaactacatcttcaccgccgtgttcctggccgagatgaccgtgaaggtggtggccctgggctggtgcttcggcgagcaggcctacctgagaagcagctggaacgtgctggacggcctgctggtgctgatcagcgtgatcgacatcctggtgagcatggtgagcgacagcggcaccaagatcctgggcatgctgagagtgctgagactgctgagaaccctgagacccctgagagtgatcagcagagcccagggcctgaagctggtggtggagaccctgatgagcagcctgaagcccatcggcaacatcgtggtgatctgctgcgccttcttcatcatcttcggcatcctgggcgtgcagctgttcaagggcaagttcttcgtgtgccagggcgaggacaccagaaacatcaccaacaagagcgactgcgccgaggccagctacagatgggtgagacacaagtacaacttcgacaacctgggccaggccctgatgagcctgttcgtgctggccagcaaggacggctgggtggacatcatgtacgacggcctggacgccgtgggcgtggaccagcagcccatcatgaaccacaacccctggatgctgctgtacttcatcagcttcctgctgatcgtggccttcttcgtgctgaacatgttcgtgggcgtggtggtggagaacttccacaagtgcagacagcaccaggaggaggaggaggccagaagaagagaggagaagagactgagaagactggagaagaagagaagaagcaaggagaagcagatggccgaggcccagtgcaagccctactacagcgactacagcagattcagactgctggtgcaccacctgtgcaccagccactacctggacctgttcatcaccggcgtgatcggcctgaacgtggtgaccatggccatggagcactaccagcagccccagatcctggacgaggccctgaagatctgcaactacatcttcaccgtgatcttcgtgctggagagcgtgttcaagctggtggccttcggcttcagaagattcttccaggacagatggaaccagctggacctggccatcgtgctgctgagcatcatgggcatcaccctggaggagatcgaggtgaacgccagcctgcccatcaaccccaccatcatcagaatcatgagagtgctgagaatcgccagagtgctgaagctgctgaagatggccgtgggcatgagagccctgctggacaccgtgatgcaggccctgccccaggtgggcaacctgggcctgctgttcatgctgctgttcttcatcttcgccgccctgggcgtggagctgttcggcgacctggagtgcgacgagacccacccctgcgagggcctgggcagacacgccaccttcagaaacttcggcatggccttcctgaccctgttcagagtgagcaccggcgacaactggaacggcatcatgaaggacaccctgagagactgcgaccaggagagcacctgctacaacaccgtgatcagccccatctacttcgtgagcttcgtgctgaccgcccagttcgtgctggtgaacgtggtgatcgccgtgctgatgaagcacctggaggagagcaacaaggaggccaaggaggaggccgagctggaggccgagctggagctggagatgaagaccctgagcccccagccccacagccccctgggcagccccttcctgtggcccggcgtggagggccccgacagccccgacagccccaagcccggcgccctgcaccccgccgcccacgccagaagcgccagccacttcagcctggagcaccccaccgacagacagctgttcgacaccatcagcctgctgatccagggcagcctggagtgggagctgaagctgatggacgagctggccggccccggcggccagcccagcgccttccccagcgcccccagcctgggcggcagcgacccccagatgcagccccaccccaccgagctgcccggccccgacctgctgaccgtgagaaagagcggcgtgagcagaacccacagcctgcccaacgacagctacatgtgcagacacggcagcaccgccgagggccccctgggccacagaggctggggcctgcccaaggcccagagcggcagcgtgctgagcgtgcacagccagcccgccgacaccagctacatcctgcagctgcccaaggacgccccccacctgctgcagccccacagcgcccccacctggggcaccatccccaagctgcccccccccggcagaagccccctggcccagagacccctgagaagacaggccgccatcagaaccgacagcctggacgtgcagggcctgggcagcagagaggacctgctggccgaggtgagcggccccagcccccccctggccagagcctacagcttctggggccagagcagcacccaggcccagcagcacagcagaagccacagcaagatcagcaagcacatgaccccccccgccccctgccccggccccgagcccaactggggcaagggcccccccgagaccagaagcagcctggagctggacaccgagctgagctggatcagcggcgacctgctgccccccggcggccaggaggagccccccagccccagagacctgaagaagtgctacagcgtggaggcccagagctgccagagaagacccaccagctggctggacgagcagagaagacacagcatcgccgtgagctgcctggacagcggcagccagccccacctgggcaccgaccccagcaacctgggcggccagcccctgggcggccccggcagcagacccaagaagaagctgagcccccccagcatcaccatcgacccccccgagagccagggccccagaaccccccccagccccggcatctgcctgagaagaagagcccccagcagcgacagcaaggaccccctggccagcggcccccccgacagcatggccgccagccccagccccaagaaggacgtgctgagcctgagcggcctgagcagcgaccccgccgacctggacccctag

SEQ ID NO: 259691 - DNA, 6897 bp, Artificial Sequence
  derived and/or modified sequence
atggacgaagaggaagacggggccggagcggaggagtctggccaacctaggtcgtttatgcgcctgaacgatctgtctggagcaggagggagacctggccccggaagcgcggagaaagaccccggatccgcagattctgaagcagagggcctgccttatcctgcgctcgccccagtggtttttttttatctctctcaggactcgcgccctagatcgtggtgcttgcggacagtatgtaacccttggttcgagaggattagcatgttggtgatcctgttgaattgcgtgactctgggtatgtttagaccatgcgaagacattgcctgcgatagccagcgatgtcggattctgcaggcctttgatgacttcatcttcgctttctttgccgttgaaatggtggtcaagatggtggcactgggcatctttggcaaaaagtgctatctgggagatacttggaacaggcttgatttctttatcgtaattgcgggtatgctggaatatagcctcgatttacagaatgtgtccttctctgccgtccggacggtgcgtgtactaagaccgctccgggccattaaccgtgtgccaagcatgcgaattctggtcaccctcctccttgatacccttccaatgctcggcaacgtgctcctcctctgcttctttgtatttttcattttcggcattgtgggagttcagctgtgggcaggcctgctgagaaatcgctgtttccttccggaaaacttcagcctgcctctgagcgtggatttggaacgatattaccagacagagaacgaggatgagtctccgttcatatgctctcagccccgggaaaacggcatgcggagttgccgctccgttcccactctgagaggcgatggaggtggcggcccaccctgtggcctagactatgaggcctacaatagttctagcaatacaacttgtgtgaactggaaccagtactacaccaactgtagcgccggtgaacataacccctttaagggcgctatcaattttgataatatcgggtacgcctggatagcgatctttcaagtcatcacactggagggctgggtcgatataatgtacttcgtaatggatgcccactcattctataattttatatatttcatattgttaattatcgttgggtccttcttcatgataaatctgtgcttggtggtgatagccactcagttttcagagacaaaacagcgagaatctcagctcatgagagaacagagggtaaggtttctcagcaatgcaagcacattggccagtttctcagaacccgggagttgttacgaggaattactgaagtacctggtgtacatcctgaggaaagccgctcgcagactggctcaggtgtcccgcgcggccggcgtgagagtagggttgctgagcagccccgctccactgggcgggcaagagactcaaccaagcagcagctgttctcgcagtcaccggcgattgtcagttcatcatctggttcatcaccaccaccatcatcaccaccactaccatctgggtaatggaacgctccgggcgccacgggcctccccggagattcaggatagagatgcgaacggttctagacggctgatgctccccccaccaagtactcctgcgctgagcggtgcccccccggggggagcggagagcgtgcattctttttaccacgcagactgtcacctcgaaccagtgagatgccaggccccccccccacggtccccctccgaagctagcggacgaaccgtaggctccggaaaagtgtatccgactgtgcatacttccccaccaccggaaacattaaaagagaaggctttagtagaggtcgcagcctcgtcggggccacccaccctgacttcccttaacataccacccggaccctactcttccatgcacaaactgctggagacgcagagtaccggagcctgtcagagctcctgtaagatctccagcccttgtcttaaagcagactctggcgcctgcggcccagacagctgtccgtactgcgcccgggctggcgctggtgaagtcgagttggcagacagggaaatgccagattctgattctgaggccgtctacgagtttacccaggacgctcagcatagcgatctccgagatcctcactcgcggcggcagagatcactggggcctgacgcagaaccatcctccgtcctggcattctggcggctgatttgtgacacctttcggaaaattgtggattctaagtacttcggccgcggaatcatgatcgctattctggtgaacacactgtccatgggaattgagtatcacgagcagcctgaggaactgacaaacgctcttgagatttcaaatatcgtcttcacaagtctatttgccctggaaatgctgctcaaactcttggtgtacggtccctttggttatatcaaaaatccttacaatatctttgatggcgtcattgtcgtgataagcgtgtgggaaattgtggggcagcagggaggcgggctaagcgtgttgcgcacattcaggctaatgcgcgtactcaaactggtaagattcctgcctgcgttacagcgccagctggtggtgttgatgaaaacaatggataacgttgccacattctgcatgctgctgatgctgtttatcttcattttttccatattgggcatgcatctgtttggctgcaaattcgctagcgagcgcgatggagacaccctccctgacagaaagaattttgatagtctgctgtgggccatcgttaccgtgttccagatactgactcaggaggactggaataaggtcttgtacaacggtatggcatcaaccagctcttgggcagcactgtactttattgctctgatgacattcggaaactacgtcctgtttaatctccttgtcgccatattagttgagggcttccaggccgagggggacgcgaataagtctgagtccgagcctgacttcttttccccttctctggatggcgatggtgatcgcaaaaaatgtctcgccctggtgtcactgggtgagcatccagagttgagaaaaagtctgctgccccccctcatcattcatactgcagctacacctatgtccctgccaaaaagtactagcacaggcctcggagaggccttagggccagcatctcgccggacctcttcttctggaagtgcggaacccggtgctgctcatgagatgaagagtcccccttcagccaggtcaagcccccattctccctggtccgccgcatcctcttggacctctaggaggtcatctcggaacagccttggcagggccccaagcctcaaacggcgctcaccttccggtgaaagacgcagtttactgagcggagaaggccaggagtcccaggacgaggaggaatcaagcgaggaggagcgggccagccccgcaggatcagaccacagacaccggggctctctggagcgcgaagccaagtcgtctttcgacttacccgacaccctccaggtccctggactgcatcgaactgccagtggacgaggctctgcatcagaacatcaggattgtaatggcaagagcgcttctggcagattggcccgcgcgctgcgtccggatgatccacccctggatggagatgatgcagatgatgaggggaacctgagcaagggcgaacgcgttcgggcctggattcgggcacgattgcctgcatgttgcctggaacgcgactcctggagcgcgtacatctttccacctcagagtagatttaggcttctatgtcaccggattataactcataagatgtttgatcatgtggtactcgtcatcatcttccttaattgcattactattgcgatggaacggcccaagatagatccccatagtgcagagcgcattttcttaacactctcgaactacatttttaccgcagtgttccttgccgaaatgacagttaaggtggttgctttaggctggtgcttcggcgaacaagcctacctcagatcctcctggaacgttctggacggccttctagttctcatttctgttatcgacattctggtgtccatggtcagcgatagtggtaccaagatcctcggtatgcttagagttctccgcctgttacggacactacggcccctcagggtgatttcacgggcgcaaggtctgaagctggtggttgaaactctaatgtctagtctgaaacccatcggtaatatagtggtgatttgctgtgccttcttcatcattttcggcatactcggcgtccagttgttcaaggggaagttcttcgtgtgccagggtgaagatactcggaatattacgaataagtctgactgtgcagaagcttcctacaggtgggtgaggcacaaatacaacttcgacaatctcggacaagcgctgatgtccctttttgtgctggcctccaaagacggctgggttgatatcatgtacgacggcctggatgcagtcggcgtagaccagcagcctatcatgaatcataatccatggatgctcttgtactttatcagcttcctcttaattgtggccttcttcgtgcttaacatgttcgtgggcgtagtcgtcgagaacttccacaagtgtcgtcagcaccaagaagaggaggaagcgcgaagacgtgaggagaagaggttacgccgactggaaaaaaagaggagatccaaggaaaaacagatggccgaggcccagtgcaagccttactattccgattactcccggttcaggctgcttgtccatcacttgtgtacatcacactacctggatctctttattaccggtgttataggccttaacgtcgtcacaatggcgatggaacactaccaacagcctcagatcctagatgaggccctgaagatctgcaactatatttttacagtcatcttcgtgctggaaagtgtgttcaagctcgtggcgttcgggttcaggcggttcttccaggaccggtggaaccagctggatctcgccattgttctcctaagcatcatggggataacactggaggaaattgaagtcaatgcttccctgcccattaaccctacaattataagaatcatgcgtgtgctgcgaattgccagagtcctgaaattgctgaagatggccgtggggatgcgcgcgctactggacactgtgatgcaggctctgccacaggttggaaatctgggactactatttatgctcctgtttttcattttcgcggcattaggagttgagctgttcggggatcttgagtgcgacgaaacccacccttgcgagggtctgggcagacacgcaacctttcgtaacttcggcatggccttcttgactctgtttagagtttctacaggcgataattggaatgggatcatgaaagacacactccgagattgcgaccaggagagcacttgctacaacactgttatttcgccaatatacttcgtttctttcgtgctcacagcccagtttgtcctagtcaacgtggtgattgcggtgcttatgaagcatttagaggaatcaaacaaagaggccaaggaggaagctgaactggaggccgagctggagctggaaatgaagactctcagccctcagccccattcacctcttgggagccctttcctgtggcctggggttgaggggcctgactccccagactcccctaagcccggggccctgcatcccgctgctcatgcacgcagtgcctctcatttctctcttgagcaccccaccgatagacagctcttcgataccatctcactgctgatccaggggagcttggagtgggagttgaagttgatggatgagctcgctggcccgggtggccagcctagtgccttccccagtgctcccagcctcggaggaagtgatccccagatgcagcctcaccccacggaactaccagggcctgatttactgacagtgcgtaagtctggagtttcccgaactcacagtttacccaacgattcttatatgtgccgacacggaagcactgcggaaggacctctgggacatcgcggctgggggttacctaaagctcaatcaggttccgtgctctccgtgcacagccagcctgctgacacaagttacattttgcaactcccgaaggatgctcctcatctcctacaaccgcactcagcccctacctggggtacaattcctaagctcccccccccaggcagatctcctctggcacagcggccactccgcagacaggcggcaattagaacagacagcctggatgtgcaagggctgggatccagagaagacttactggcggaggtctccggaccatcaccaccattagctcgcgcctattccttttggggtcagagttccacccaggctcaacagcactcgaggtcacattcgaaaatctccaagcatatgacaccaccagcaccttgccccggacctgaacctaattggggcaaagggccgcccgaaactcgatccagtctagaactggatacagaactgagctggatatccggagacttacttcccccaggagggcaggaggaaccccccagcccccgggatctcaagaagtgttacagcgttgaagctcagtcttgccagcggagacctacttcttggttagacgaacaaaggcgacacagcattgcagtgagctgcctggattcaggttcgcagccacacctcgggaccgaccccagcaacctcggcgggcaacctcttggcggaccgggatctaggcccaagaaaaagctgagcccaccaagcatcacaatagatccaccagaatcacagggcccaagaactcccccaagtcccgggatatgtctgaggcgtcgtgccccaagctcagatagcaaggaccccctggcctctgggcccccagactccatggctgcttccccctctcccaaaaaggatgtactgagcctgtctggattgagctcagatcctgcagatctcgacccatag

SEQ ID NO: 259692 - DNA, 6897 bp, Artificial Sequence
  derived and/or modified sequence
atggatgaggaggaggatggagctggagctgaggagagcggccagcccaggagcttcatgaggctgaatgacctgagcggggccggcggccggcccggccctggcagcgctgagaaggaccccggcagcgctgacagcgaggccgagggcctgccctacccagccctggcccctgtggtgttcttctacctgagccaggacagccggcccaggtcctggtgcctgaggacagtgtgcaacccctggtttgagcgcatctccatgctggtgatcctgctgaactgtgtgaccctgggcatgttccggccctgtgaagatattgcctgtgacagccagcgctgccgcatcctgcaggcctttgatgacttcatctttgccttctttgctgtggagatggtggtgaagatggtggccctgggcatctttgggaagaagtgctacctgggggacacctggaaccggctggacttcttcatcgtgattgctggcatgctggagtacagcctggacctgcagaatgtgtccttctctgctgtgaggacagtgcgggtgctgcggcccctgcgggccatcaacagagtgcccagcatgaggatcctggtgaccctgctgctggacaccctgcccatgctgggcaatgtgctgctgctgtgcttctttgtgttcttcatctttggaattgtgggcgtgcagctgtgggccggcctgctgaggaaccgctgcttcctgcctgagaacttcagcctgcccctgtctgtggacctggagcgctactaccagacagaaaatgaagatgagagccccttcatctgcagccagccccgggagaatggcatgaggagctgccgctctgtgcccaccctgcggggagatggcggcggcggccccccctgtggcctggactatgaggcctacaacagcagcagcaacaccacctgtgtgaactggaaccagtactacaccaactgcagcgctggggagcacaaccccttcaagggggccatcaactttgacaacatcggctacgcctggatcgccatcttccaggtgatcaccctggagggctgggtggacatcatgtactttgtgatggatgcccacagcttctacaacttcatctacttcatcctgctgatcatcgtgggcagcttcttcatgatcaacctgtgcctggtggtgattgccacccagttcagcgagaccaagcagcgggagagccagctgatgagggagcagagggtgcgcttcctgagcaatgccagcaccctggccagcttcagcgagcccggcagctgctatgaggagctgctgaagtacctggtgtacatcctgaggaaggccgcccggcggctggcccaggtgtccagagctgctggggtgcgggtgggcctgctgagcagccctgcccccctgggcggccaggagacccagcccagcagcagctgcagccgcagccaccggcggctgtctgtgcaccacctggtgcaccaccaccaccaccaccaccaccactaccacctgggcaatggcaccctgcgggccccccgggccagccctgagatccaggacagagatgccaacggcagccggcggctgatgctgcccccacccagcaccccagccctgagcggggcccctcctggaggagctgagagcgtgcacagcttctaccacgccgactgccacctggagcctgtgcgctgccaggcccccccacccaggagccccagcgaggccagcggccgcacagtgggcagcggcaaggtgtaccccaccgtgcacaccagccccccacctgagaccctgaaggagaaggccctggtggaggtggccgccagcagcggcccccccaccctgaccagcctgaacatccccccaggcccctacagctccatgcacaagctgctggagacccagagcactggagcctgccagagcagctgcaagatcagcagcccctgcctgaaggctgacagcggggcctgtggccctgacagctgcccctactgtgcccgggccggggccggggaggtggagctggccgaccgggagatgccagacagcgacagcgaggccgtgtatgagttcacccaggatgcccagcacagcgacctgcgggacccccacagccggcggcagaggagcctgggcccagatgctgagcccagctctgtgctggccttctggaggctcatctgtgacaccttcaggaagatcgtggacagcaagtacttcggccggggcatcatgattgccatcctggtgaacaccctgtccatgggcatcgagtaccacgagcagcctgaggagctgaccaatgccctggagatcagcaacatcgtgttcaccagcctgtttgccctggagatgctgctgaagctgctggtgtatggccccttcggctacatcaagaacccctacaacatctttgatggagtcatcgtggtgatctctgtgtgggagatcgtgggccagcagggcggcggcctgtctgtgctgcggaccttccggctgatgagggtgctgaagctggtgcgcttcctgcctgccctgcagaggcagctggtggtgctgatgaagaccatggacaacgtggccaccttctgcatgctgctgatgctgttcatcttcatcttcagcatcctgggcatgcacctgtttggctgcaagtttgccagcgagagagatggagacaccctgcctgacaggaagaactttgacagcctgctgtgggccatcgtgacagtgttccagatcctgacccaggaggactggaacaaggtgctgtacaacggcatggccagcaccagctcctgggccgccctgtacttcatcgccctgatgaccttcggcaactacgtgctcttcaacctgctggtggccatcctggtggagggcttccaggccgagggagatgccaacaagtctgagagcgagccagacttcttcagccccagcctggatggagatggagacaggaagaagtgcctggccctggtgtccctgggggagcaccctgagctgaggaagagcctgctgcccccactcatcatccacacagctgccacccccatgagcctgcccaagagcaccagcacaggcctgggggaggccctgggccctgccagcaggaggaccagcagcagcggcagcgctgagcccggggccgcccacgagatgaagagccccccatctgcccggagcagcccccacagcccctggagcgctgccagctcctggaccagcagaagaagcagcaggaacagcctgggccgggcccccagcctgaagaggaggagccccagcggggagaggaggagcctgctgagcggggagggccaggagagccaggatgaggaggagagcagcgaggaggagcgggccagccctgctggcagtgaccaccgccaccggggcagcctggagcgggaggccaagagcagctttgacctgcctgacaccctgcaggtgcccggcctgcacaggacagccagcggccggggcagcgccagcgagcaccaggactgcaatggcaagagcgccagcggccgcctggcccgggccctgcggccagatgacccccccctggatggagatgatgctgatgatgagggcaacctgagcaaaggagagcgggtgcgggcctggatccgggcccggctgcctgcctgctgcctggagcgggacagctggagcgcctacatcttccccccccagagccgcttccggctgctgtgccaccgcatcatcacccacaagatgtttgaccacgtggtgctggtgatcatcttcctgaactgcatcaccatcgccatggagcggcccaagattgacccccacagcgctgagcgcatcttcctgaccctgagcaactacatcttcaccgctgtgttcctggccgagatgacagtgaaggtggtggccctgggctggtgctttggagagcaggcctacctgcggagctcctggaatgtgctggatggcctgctggtgctgatcagcgtcatcgacatcctggtgtccatggtgtctgacagcggcaccaagatcctgggcatgctgcgggtgctgcggctgctgcggaccctgcggcccctgcgggtcatcagccgggcccagggcctgaagctggtggtggagaccctgatgagcagcctgaagcccatcggcaacatcgtggtgatctgctgtgccttcttcatcatcttcggcatcctgggcgtgcagctgttcaagggcaagttctttgtgtgccagggcgaggacaccaggaacatcaccaacaagagtgactgtgccgaggccagctaccgctgggtgcgccacaagtacaactttgacaacctgggccaggccctgatgagcctgtttgtgctggccagcaaggatggctgggtggacatcatgtatgatggcctggatgctgtgggcgtggaccagcagcccatcatgaaccacaacccctggatgctgctgtacttcatctccttcctgctgattgtggccttctttgtgctgaacatgtttgtgggcgtggtggtggagaacttccacaagtgccggcagcaccaggaggaggaggaggccaggagaagagaggagaagaggctgcggcggctggagaagaagaggaggagcaaggagaagcagatggccgaggcccagtgcaagccctactacagcgactacagccgcttccggctgctggtgcaccacctgtgcaccagccactacctggacctcttcatcaccggggtgattggcctgaatgtggtgaccatggccatggagcactaccagcagccccagatcctggatgaggccctgaagatctgcaactacatcttcaccgtcatctttgtgctggagagcgtcttcaagctggtggccttcggcttccgccgcttcttccaggaccgctggaaccagctggacctggccatcgtgctgctgagcatcatgggcatcaccctggaggagattgaggtgaatgccagcctgcccatcaaccccaccatcatccgcatcatgagggtgctgcgcatcgcccgggtgctgaagctgctgaagatggctgtgggcatgagggccctgctggacacagtgatgcaggccctgccccaggtgggcaacctgggcctgctcttcatgctgctcttcttcatctttgctgccctgggcgtggagctgtttggagacctggagtgtgatgagacccacccctgtgagggcctgggcagacatgccaccttcaggaactttggcatggccttcctgaccctcttccgggtgtccactggagacaactggaatggcatcatgaaggacaccctgcgggactgtgaccaggagagcacctgctacaacacagtcatcagccccatctactttgtgtcctttgtgctgacagcccagtttgtgctggtgaatgtggtgattgctgtgctgatgaagcacctggaggagagcaacaaggaggccaaggaggaggccgagctggaggccgagctggagctggagatgaagaccctgagcccccagccccacagccccctgggcagccccttcctgtggccaggagtggagggccctgacagcccagacagccccaagccaggggccctgcaccctgctgcccacgcccggagcgccagccacttcagcctggagcaccccacagaccggcagctgtttgacaccatcagcctgctgatccagggcagcctggagtgggagctgaagctgatggatgagctggccggccctgggggccagcccagcgccttccccagcgcccccagcctgggcggcagtgacccccagatgcagccccaccccacagagctgcccggccctgacctgctgactgtgaggaagagcggcgtgtccaggacccacagcctgcccaatgacagctacatgtgcagacatggcagcacagctgagggccccctgggccaccggggctggggcctgcccaaggcccagagcggctctgtgctgtctgtgcacagccagcctgctgacaccagctacatcctgcagctgcccaaggatgccccccacctgctgcagccccacagcgcccccacctggggcaccatccccaagctgcccccacctggccgcagccccctggcccagaggcccctgcggcggcaggccgccatcagaacagacagcctggatgtgcagggcctgggcagccgggaggacctgctggccgaggtgtctggccccagcccccccctggcccgggcctacagcttctggggccagagcagcacccaggcccagcagcacagccgcagccacagcaagatcagcaagcacatgaccccaccagccccctgccccggccctgagcccaactggggcaaaggacctcctgagaccaggagcagcctggagctggacacagagctgtcctggatcagcggggacctgctgcccccaggcggccaggaggagccccccagcccccgggacctgaagaagtgctacagcgtggaggcccagagctgccagaggcggcccacctcctggctggatgagcagaggaggcacagcattgctgtgtcctgcctggacagcggcagccagccccacctgggcacagaccccagcaacctgggcggccagcccctgggcggccctggcagccggcccaagaagaagctgagccccccatccatcaccatcgaccccccagagagccagggccccaggaccccacccagccctggcatctgcctgcggcggcgggcccccagcagtgacagcaaggaccccctggccagcggccccccagacagcatggccgccagccccagccccaagaaggatgtgctgagcctgagcggcctgagcagtgaccctgctgacctggacccctag

SEQ ID NO: 259693 - DNA, 6897 bp, Artificial Sequence
  derived and/or modified sequence
atggacgaggaggaggacggcgccggcgccgaggagagcggccagcctcgtagcttcatgagactgaatgacctgtcaggagctggaggccgccccgggccaggaagtgccgaaaaagatccaggctcagctgactccgaggccgaggggctcccttacccagcactcgcccctgtcgttttcttctacctgagtcaggacagtaggccccgctcctggtgtcttcggactgtctgtaacccctggtttgagcgcatctcgatgttggtgatactattgaactgtgtaacactgggaatgttccgcccttgtgaagacattgcctgcgattcccagagatgccgcatccttcaagcattcgacgatttcatctttgccttttttgccgtcgagatggtagtcaagatggtggctctggggatctttggcaagaagtgctatttgggcgatacctggaatcgactggacttctttatcgtgattgccggtatgctcgagtactccctggacctgcagaacgtttccttcagcgcagtgcgcaccgtgcgggtgctccggccccttcgggcgatcaacagggtccctagtatgcggatcctggtcactctgctccttgacactttgcccatgctcggcaacgtgttgctgctttgcttctttgtattctttatatttggaatagtcggcgtccagctgtgggctgggttactgaggaatcggtgtttcctgcctgagaacttctcactcccactgagcgttgatctggagagatattatcagactgagaatgaggacgagagcccgttcatttgctcccaaccgcgggagaatggcatgaggtcctgccgttctgtgcctaccctgcgcggtgacggaggggggggtcctccctgtggcctggactatgaggcttacaattcatcctcgaacacaacctgtgttaattggaatcagtattacacaaactgctccgctggggaacacaacccctttaaaggcgccataaattttgacaatatagggtatgcctggattgctatcttccaagttatcaccctggaaggctgggtcgacatcatgtattttgtgatggatgcccacagtttctacaattttatctactttattctgctgatcatcgtgggctcattttttatgataaatctatgtctcgtcgtcatagccacgcaatttagcgagacaaagcagagggagtcacaattgatgagagagcagcgcgttcggtttttgtccaatgctagtactcttgctagcttttctgagcctgggtcctgctatgaagagctgcttaagtacttagtctacatactccgcaaggccgcacgccgccttgcgcaggtttcgcgcgccgccggagtccgggttggattgcttagctcacctgccccacttgggggacaagagacccagcctagttcaagctgctcacgcagccacaggcggttgagcgtgcatcacctggtgcaccaccaccaccatcaccaccatcattatcatctgggtaacggtacactccgagcccctcgtgcgtctccagagatacaggatagagatgcgaacggatcgaggaggctgatgctacccccgccgtcaactcccgccctgtctggagcacctccaggaggtgcagagtcagtgcattctttttaccacgccgattgccatctcgaacctgttcggtgccaggctccgccacccaggagccccagcgaagcatcaggccgcactgtggggtccggcaaggtttaccctaccgtgcacacatcaccaccccctgagacattgaaagaaaaggccctggtcgaggtggccgcatcgtcaggaccgcccacactgacatctctgaacattccgccagggccctactcttcaatgcataagctcctcgaaacgcagtcaacaggggcttgccagtctagctgcaagataagtagcccatgcctaaaggcggattctggcgcatgcggtcccgattcttgtccctactgcgctcgcgcaggtgccggcgaagtcgagctggccgatagggagatgcctgactcagactctgaggctgtctatgagtttacgcaagacgcccagcactctgatctgcgagaccctcatagcagacgccagcgctcgctgggaccagacgccgagccttcttccgttctagccttttggcgcctaatttgtgatacatttcggaaaatcgtggattccaaatactttggccgggggatcatgatcgcaatactggtcaacactctgtccatgggcatagagtaccatgaacaacctgaagaactgacaaatgcactcgagatctccaacattgtctttacatccctcttcgcactggaaatgctcctcaagttgttagtgtacgggccattcgggtacattaaaaatccatataacatattcgacggcgtgatagtggtcatatctgtttgggaaatcgtgggacagcaaggggggggtctatcagtcctgcggacctttcggctgatgagggtgctcaaacttgtccgtttcctgccagccctgcagagacagcttgtcgtactcatgaaaacgatggacaatgttgcgacattttgcatgctgctgatgctctttatcttcatcttcagcatcctagggatgcacctgttcggctgtaagtttgcctctgaacgtgatggtgacactcttccagatagaaaaaacttcgacagccttctatgggccatagtgacagtattccaaatcttaacacaagaggactggaacaaagtgctatacaacggcatggcttctacctccagctgggctgcactatacttcatagctctgatgaccttcgggaactatgtgctgttcaacctgctagtcgcaatccttgtggagggattccaggctgaaggggacgcaaataagagcgaaagcgagcctgatttcttctccccctccctggatggagacggggacagaaaaaagtgtctggcccttgtgtccctgggagaacatccagagcttaggaagtccctcctgccacctcttatcattcacacagccgctactccaatgtcgctaccgaaaagtacatcaaccggcctcggagaggcactggggccagctagtcgcaggacatcatcgagcgggtctgccgagcctggcgcagcccacgaaatgaaatcgccaccctccgcccgttctagtcctcattcgccctggtccgccgccagttcgtggacatccagaaggagttctagaaattcactgggcagggccccatctctcaagcgccgctcccccagcggcgagcggagaagcttgctcagcggggaaggacaggaatctcaggacgaagaggagtcaagtgaggaggagagagcctctccagccggcagcgaccacagacatagggggtctttagagcgcgaagccaaatcctctttcgatctgccggatacactgcaagttccagggcttcaccggaccgcaagcggccggggaagcgctagtgaacaccaggattgtaatggcaagagcgcttccggccgcttggctcgtgctttgagacccgatgatcctccactcgatggagatgatgcggacgatgaagggaacttatcaaagggagagagggtacgcgcctggatcagggcgagacttccggcctgctgcttggagagggacagctggagcgcctacattttcccacctcagagccggttcaggctgttatgccaccggatcattacccataagatgttcgatcacgtggttctcgtgattatctttttgaactgcatcactattgcgatggaacgtccgaaaatcgacccccattccgctgaaaggatcttcttgactctttccaactacatcttcacagcagtatttctcgccgagatgacagtgaaggtggtcgccctcggctggtgcttcggagaacaggcctaccttagatcgagctggaacgtgctggatggcctattggtgttaatctctgttattgacatcttggtgagtatggtctccgattcgggaacgaagattctgggcatgctgcgcgtgctgcgtctgcttaggactctacgcccacttcgagtgattagccgagctcaggggttaaaactcgtggtcgaaaccctgatgagcagccttaagccaattggaaatattgtggtcatttgttgtgcctttttcattatattcggtattctcggtgtgcagctgttcaaagggaagttttttgtgtgtcagggggaagatacccgtaatatcactaataagtctgactgcgccgaggcctcatatcgctgggtgaggcataaatacaactttgacaatttagggcaggcccttatgagccttttcgtattggcgagcaaagatggctgggtggacatcatgtatgacggactggacgccgtgggggtagaccagcagcctatcatgaaccataacccatggatgcttctctacttcatcagctttctcttgattgtcgcattcttcgtattgaacatgtttgtgggggtggtggtggagaacttccataagtgccgccagcaccaggaggaagaagaggcacgccgccgcgaggagaagaggcttcgcagattggagaagaaaagacggtcgaaagaaaaacagatggcagaggctcagtgtaaaccatactactcagactattcaagatttcgtttgttagtccaccacttatgtacatcgcactacctggatttgttcatcaccggcgtcattgggttgaatgtcgtaacaatggccatggaacactatcagcagcctcagatcctggacgaagctctcaagatatgtaattatatctttacagttatcttcgtgctggaatccgtttttaaactggtggctttcgggtttagacgattctttcaggaccgctggaatcaactggacttagctattgttctgctgtccatcatgggaatcaccttggaagaaatcgaagtgaatgcctccctgccgataaacccaactattataaggatcatgcgggtgctgcggattgctagagtgctgaagcttctgaagatggcagtaggtatgagggcactattggacactgtcatgcaggccctgccacaggtgggcaatctcgggttgttatttatgctgttgtttttcattttcgcagcattgggagtggagctattcggtgatctggagtgtgacgagacgcatccttgcgagggcctcggtcgccatgcgacctttagaaactttggcatggcatttctaaccctctttcgtgtgtccaccggcgacaactggaacgggattatgaaagatacccttcgagattgcgaccaggaaagcacatgttacaacactgtgatcagtccaatctatttcgtgagttttgtgctgacagctcagttcgtcttggtcaacgtggtgatcgctgtcctcatgaagcatctggaggagtccaataaggaggccaaagaggaagcggaattagaagcggagctggaattggagatgaagaccctgagcccacagcctcactcacccttaggatcccctttcctctggccaggcgtcgaggggccagactctccagatagtcccaaacctggtgccttgcatcccgctgcacatgcaagaagcgcctctcacttctccttagaacatccaaccgatcgccaattattcgacactatatcgctgctgattcaggggtccttggaatgggagctgaagctcatggatgagctcgcaggtcctggcggccagccttccgcctttccttccgcgccaagtctggggggctcagatcctcaaatgcagccacaccctacagaactccccgggccagatctattgaccgttcggaagtccggggtgtcccgtacgcattcgcttcccaatgacagctatatgtgcagacatggcagcacggccgagggacccctcggacacaggggatggggcttaccgaaagcacaaagtggatccgttctctcggtccattcacaacccgccgacactagttacatcctacagctccctaaagatgcaccccacttgcttcagccacattcagctcctacttggggtactatcccaaagttgccgccccccgggcggagtcctctggcccagaggccactccgcagacaggccgccatacggacagactcactcgacgttcagggactgggctcccgggaggacctgctcgccgaggtgagtggcccgagcccaccactggcccgggcctattcattttggggacagtcctcgacccaggcgcagcaacacagtaggtcccattctaagatctctaagcatatgactcctcctgcaccttgcccggggcctgaaccgaactggggcaaggggccacccgaaacaaggagctctctggagctggacactgagctctcttggattagcggggacctgcttcccccgggcggtcaggaggaacctccaagcccccgcgaccttaagaaatgttattctgtggaagcccagtcttgccaaaggcgcccaacaagctggcttgacgagcagcggcgccacagtatcgcagttagttgcctcgactctggtagccaacctcacctgggcacggaccctagcaacctgggcggccagccgctcggaggtccgggaagcagacccaagaagaagctcagtcctccgtctataaccatcgatccccccgagagccagggtccaaggactccgcctagcccaggcatctgcttgagacgccgggctcccagctcggactctaaggaccctctagccagtggcccgcctgactccatggcagcttctccatccccgaagaaagacgtactgtccctgagtggtctctcttcagatcccgcggacctggacccttag

SEQ ID NO: 259694 - DNA, 6896 bp, Artificial Sequence
  derived and/or modified sequence
atggacgaggaggaggacggagccggagccgaagaatcaggccagccgagatcgttcatgaggttgaatgatttgtccggcgctggcggtcgtccgggtcctggaagcgctgaaaaggatcccggatcggccgacagcgaagcagagggtctgccctatccagctctggcgcctgtagtctttttctacctttcgcaagactccaggcccaggtcctggtgtctgcgcacagtgtgtaacccctggttcgagaggattagcatgttggttattctgctcaactgcgtgaccctgggcatgttccgaccgtgcgaagacatagcttgcgattcacagcgatgccgaatcctgcaggcatttgacgatttcatatttgccttcttcgctgtggagatggtggtcaagatggtggccctaggaatttttgggaaaaaatgttacttaggcgacacttggaatcgcctggactttttcatcgtaattgctggcatgttagaatacagtctggatctccagaacgtgagcttttcagccgtcaggaccgtccgcgtcttgcgtccacttcgggcaattaatagagtgccttccatgcgcattctggtgactttactgctggataccctgcccatgctggggaatgtgctgctgctgtgtttctttgtgttctttatctttggcatagtaggcgtccagctttgggccggtctgcttcggaatcgctgttttctgcctgaaaacttctccctccccctctcagtggatctggaacgttattaccagaccgagaacgaggacgaaagtccttttatctgttctcagcctcgcgagaacgggatgcgctcctgccggagtgtcccaaccctgcgtggggatgggggaggaggcccaccatgcggcttagattacgaagcttataattcttcatcaaataccacttgtgttaattggaaccaatactacacaaactgttcggctggggagcacaatccttttaagggggcaataaacttcgataatattggatatgcttggattgcaatctttcaggtgattactttagaagggtgggtggacatcatgtattttgtgatggacgctcattctttttataacttcatctactttattctgttaataatcgtcggttccttctttatgatcaatttatgcctggtggtaatcgctactcagttcagcgaaactaaacagcgcgaaagccagcttatgcgggagcaacgcgttcgcttcctctcgaacgcctcaactctggcttcattttcagagccgggttcatgttatgaagaactccttaagtatcttgtgtacatcttaagaaaggcagcccgtagactagcccaggtgtcacgtgccgcaggcgtgcgagtgggccttctgagttccccggctcctcttgggggacaggagactcagccatcttcgtcctgtagcagaagtcacagaagactgagtgtgcaccacctagtgcaccaccatcaccatcaccaccaccactaccacctgggcaatggtaccctccgcgcacccagagcttccccagagattcaggaccgagatgctaatggcagtcggagactcatgctgccacccccatcaactccagctctgtctggagccccaccaggaggcgctgagtctgtccactctttttaccatgccgattgccatttggagccagttcgctgtcaagctcctcctcctcgctccccatcagaggcttccggcaggaccgtggggtcaggaaaagtctatccaactgtacacacctccccaccccctgagacactcaaggagaaagctcttgtggaggtcgctgccagtagcggcccacccaccctgacgtccctgaatattcctccaggcccatattcatcgatgcataagctattggagacccagtctacaggtgcctgccagtcttcctgtaaaatttccagcccttgcctgaaggcggatagcggagcctgtggccctgacagctgcccttattgtgcgcgtgctggggctggagaagtggagctcgcggacagggagatgcctgacagcgattcagaagccgtgtatgaattcacccaggacgcacaacactccgacctgagagaccctcattcgaggcggcagcggagcttaggacccgacgcagagccatcatcagttctggctttctggcgtttgatctgtgacacattcaggaagatcgtagattctaaatatttcggcaggggtattatgatcgccatcctggtaaataccttatcgatggggattgagtatcatgaacagcctgaggaacttacgaacgcactagagattagtaacatcgtctttacttcattatttgcgctggaaatgttactcaagctgctcgtctatggtcccttcggctacattaagaatccatataatatctttgacggcgttattgtagtcatttctgtgtgggagatagtgggccagcaaggtggaggactctcggtgctccgcaccttccgcctgatgagggtcctcaagctcgtgcgcttcctgcctgcactgcagaggcagcttgtcgtcctcatgaaaaccatggataatgtggctaccttctgtatgttgctgatgctgtttatcttcatttttagtatcctaggcatgcatcttttcgggtgcaaattcgctagcgaacgggacggcgatacccttccagatcgcaagaatttcgattcactgctctgggccatcgtgaccgtgttccaaatcttgacccaggaagattggaataaggtactgtataacggtatggctagtacttcttcttgggctgccctctatttcatcgcgctgatgacattcggcaactacgtgcttttcaacctcctcgtggcaattctggtcgaagggttccaggctgagggtgacgcaaataagagcgaatccgagccagacttcttctctccatcactggacggagacggtgaccggaagaaatgcctagccctggtgtctctgggtgagcatccagagttgaggaaatccctgctgcctcctctcattattcacacagctgccacaccaatgagcctgccgaaaagcacgagcacaggcttgggagaggctctgggacctgccagcaggcggaccagtagtagcggtagcgcagagccaggtgcggctcacgagatgaaatcacccccttcggccagaagcagccctcattcaccctggtctgccgcatcttcatggacttcccgccgatcctcccgcaacagtctggggagggctccaagtctcaaacgcagatccccatccggcgaacgccgatcccttctgagcggagagggacaggagtcccaggacgaagaagaatcctcagaagaggagagagcttcccccgcaggaagcgatcatagacataggggctctctggagcgcgaggccaagtccagctttgacctccccgacacattgcaggtgcccggattgcatcgtactgcatccgggagaggatccgcaagcgaacaccaagattgcaatggcaagtctgccagcggcaggcttgcaagggccctaaggccagacgatccaccattggacggagacgatgcagacgatgaaggtaatctgtcaaagggggaaagagtgagagcctggattcgggctcgcctgcctgcctgctgtctcgaaagggattcttggtccgcctacatctttcctccccagagcagattccggctcctgtgccatcgcattataactcataagatgtttgatcacgtggtactcgtaatcattttccttaactgcattacgatagcaatggaacggcctaagatcgatccacatagcgccgagcgaatattcctcacactgtctaactatatcttcactgccgtgtttcttgccgagatgacagtgaaagttgtagccttaggctggtgcttcggggagcaggcctacctgcgatcaagttggaatgtgttggacggcctcctcgtcctgatttcagttatcgacattctcgtgtcaatggtgtcggacagcggcaccaagatcctggggatgcttcgcgtgctgcgcctattgcggacgctccgacccctcagagtgatttcaagagcacagggattgaagctggtcgtggaaactctgatgagctcactgaaacccatcggtaacatcgtagtaatctgttgcgcttttttcattatcttcgggattctgggcgtccagctatttaagggcaaatttttcgtttgccagggagaagacacccgtaatatcacaaataagtccgactgtgctgaagcttcgtacagatgggtgcgccataagtacaactttgacaatttagggcaggccctcatgtcactgttcgtgctagccagcaaggacggctgggtggatatcatgtacgatggcctggatgcagtgggtgttgatcagcagccaatcatgaatcataacccatggatgctcctctactttatttctttcctgctgattgtggccttcttcgtactgaatatgtttgtgggcgtagtggtggagaacttccacaaatgcagacagcaccaggaagaggaggaggctcgcagacgcgaggaaaaaagactccgcagactggagaagaaacgcagatcgaaggagaaacagatggctgaagctcaatgcaaaccttactactctgattactcacggtttaggctcttagtccaccacctgtgcacttcacactatctggatctcttcatcaccggtgtgatagggctgaacgtggttaccatggccatggagcattatcagcagccccagatacttgatgaggccttaaaaatctgcaattacatattcacagtgattttcgtgctggaaagcgttttcaaattggttgcctttggcttcaggcgattctttcaggaccgctggaatcagttggaccttgccattgttctcctgagtatcatgggtataacgttggaggagattgaggtgaacgcttctctacctattaatcctaccatcattagaatcatgcgagtcctgcgtatcgccagagtgcttaaactgctaaaaatggccgtgggcatgagagcactcctagacactgtcatgcaggccctcccacaagtgggtaatctgggactgctctttatgctactgtttttcatctttgctgcactgggggtggagttgttcggggacctcgagtgtgacgagacccacccctgcgaaggtctgggtaggcacgctaccttccgcaactttggcatggcattcctgactctctttcgggtctccaccggcgataattggaatggcatcatgaaagatacgctccgagactgcgatcaggagtctacatgttataacaccgtgatctcgcctatttacttcgtgagttttgtgctgacagcccaatttgtactggtgaacgtagtgatcgccgtgcttatgaaacacttggaggagtcaaacaaggaagcaaaagaggaggccgagcttgaggccgaactggagcttgagatgaaaactctcagtcctcagccacacagtcccctgggctcccctttcctgtggcccggtgtggagggacccgactcacccgactctcctaagccaggcgctttacatcccgctgcccacgctagatctgcctctcatttttcattggagcaccccactgatagacagctctttgacactatctctttgctgatccaagggagcctggaatgggagctgaagctgatggacgaactagcagggccagggggtcagccaagtgccttcccctctgctccttctctgggcggtagcgatccccagatgcaaccacatcccactgagctgcccggtcccgatctgcttacggtgcggaagagcggcgttagccgcacgcactctcttcctaacgatagttatatgtgtagacacggctcaactgccgagggcccactcggccatagggggtggggtttaccaaaggctcaatcaggcagcgtactcagtgttcatagccagccagcagatacaagctacattctccagttgcccaaagatgctccacatctgctgcagccacacagtgctcctacctggggcactatccctaaattaccaccacctgggaggagtcccctggcccagaggcctctaagacggcaggctgcgatccgcacggacagtctagacgtgcaggggctggggtcaagggaggatctgctggcagaggtgtctggcccttctccgccactggctagagcgtattctttttgggggcagtcttccacgcaggcccagcaacactcgagaagccacagtaaaatctccaagcacatgactcccccagctccctgtccagggcctgaaccaaactggggcaaagggccaccggaaacccgatctagcctggagcttgataccgaattaagctggatctccggggaccttctgcccccaggagggcaggaagagccgcctagtcccagagatctgaaaaaatgctattctgtcgaggcccagtcctgtcagaggagacccacatcatggcttgacgagcagagacgccatagcatcgcagtcagctgtcttgactctgggagtcagccacatttaggcaccgacccaagcaacctgggcggtcagcctctcggaggccctgggtcacggcctaagaagaaattatccccaccttccatcaccattgatcctcccgagagccagggccctaggacccctccatctcctggtatctgtcttcggagaagggcaccatccagcgattcaaaggaccccctggcttccggtcctccggattcgatggcagcgtccccttcgccgaaaaaggacgtgctttcacttagcggtctgagtagtgatcctgctgatctggacccgta

SEQ ID NO: 259695 - DNA, 6912 bp, Artificial Sequence
  derived and/or modified sequence
atggacgaggaggaggatggagcgggcgccgaggagtcgggacagccccggagcttcatgcggctcaacgacctgtcgggggccgggggccggccggggccggggtcagcagaaaaggacccgggcagcgcggactccgaggcggaggggctgccgtacccggcgctggccccggtggttttcttctacttgagccaggacagccgcccgcggagctggtgtctccgcacggtctgtaacccctggtttgagcgcatcagcatgttggtcatccttctcaactgcgtgaccctgggcatgttccggccatgcgaggacatcgcctgtgactcccagcgctgccggatcctgcaggcctttgatgacttcatctttgccttctttgccgtggagatggtggtgaagatggtggccttgggcatctttgggaaaaagtgttacctgggagacacttggaaccggcttgactttttcatcgtcatcgcagggatgctggagtactcgctggacctgcagaacgtcagcttctcagctgtcaggacagtccgtgtgctgcgaccgctcagggccattaaccgggtgcccagcatgcgcatccttgtcacgttgctgctggatacgctgcccatgctgggcaacgtcctgctgctctgcttcttcgtcttcttcatcttcggcatcgtcggcgtccagctgtgggcagggctgcttcggaaccgatgcttcctacctgagaatttcagcctccccctgagcgtggacctggagcgctattaccagacagagaacgaggatgagagccccttcatctgctcccagccacgcgagaacggcatgcggtcctgcagaagcgtgcccacgctgcgcggggacgggggcggtggcccaccttgcggtctggactatgaggcctacaacagctccagcaacaccacctgtgtcaactggaaccagtactacaccaactgctcagcgggggagcacaaccccttcaagggcgccatcaactttgacaacattggctatgcctggatcgccatcttccaggtcatcacgctggagggctgggtcgacatcatgtactttgtgatggatgctcattccttctacaatttcatctacttcatcctcctcatcatcgtgggctccttcttcatgatcaacctgtgcctggtggtgattgccacgcagttctcagagaccaagcagcgggaaagccagctgatgcgggagcagcgtgtgcggttcctgtccaacgccagcaccctggctagcttctctgagcccggcagctgctatgaggagctgctcaagtacctggtgtacatccttcgtaaggcagcccgcaggctggctcaggtctctcgggcagcaggtgtgcgggttgggctgctcagcagcccagcacccctcgggggccaggagacccagcccagcagcagctgctctcgctcccaccgccgcctatccgtccaccacctggtgcaccaccaccaccaccatcaccaccactaccacctgggcaatgggacgctcagggccccccgggccagcccggagatccaggacagggatgccaatgggtcccgccggctcatgctgccaccaccctcgacgcctgccctctccggggccccccctggtggcgcagagtctgtgcacagcttctaccatgccgactgccacttagagccagtccgctgccaggcgccccctcccaggtccccatctgaggcatccggcaggactgtgggcagcgggaaggtgtatcccaccgtgcacaccagccctccaccggagacgctgaaggagaaggcactagtagaggtggctgccagctctgggcccccaaccctcaccagcctcaacatcccacccgggccctacagctccatgcacaagctgctggagacacagagtacaggtgcctgccaaagctcttgcaagatctccagcccttgcttgaaagcagacagtggagcctgtggtccagacagctgcccctactgtgcccgggccggggcaggggaggtggagctcgccgaccgtgaaatgcctgactcagacagcgaggcagtttatgagttcacacaggatgcccagcacagcgacctccgggacccccacagccggcggcaacggagcctgggcccagatgcagagcccagctctgtgctggccttctggaggctaatctgtgacaccttccgaaagattgtggacagcaagtactttggccggggaatcatgatcgccatcctggtcaacacactcagcatgggcatcgaataccacgagcagcccgaggagcttaccaacgccctagaaatcagcaacatcgtcttcaccagcctctttgccctggagatgctgctgaagctgcttgtgtatggtccctttggctacatcaagaatccctacaacatcttcgatggtgtcattgtggtcatcagcgtgtgggagatcgtgggccagcaggggggcggcctgtcggtgctgcggaccttccgcctgatgcgtgtgctgaagctggtgcgcttcctgccggcgctgcagcggcagctggtggtgctcatgaagaccatggacaacgtggccaccttctgcatgctgcttatgctcttcatcttcatcttcagcatcctgggcatgcatctcttcggctgcaagtttgcctctgagcgggatggggacaccctgccagaccggaagaattttgactccttgctctgggccatcgtcactgtctttcagatcctgacccaggaggactggaacaaagtcctctacaatggtatggcctccacgtcgtcctgggcggccctttatttcattgccctcatgaccttcggcaactacgtgctcttcaatttgctggtcgccattctggtggagggcttccaggcggagggagatgccaacaagtccgaatcagagcccgatttcttctcacccagcctggatggtgatggggacaggaagaagtgcttggccttggtgtccctgggagagcacccggagctgcggaagagcctgctgccgcctctcatcatccacacggccgccacacccatgtcgctgcccaagagcaccagcacgggcctgggcgaggcgctgggccctgcgtcgcgccgcaccagcagcagcgggtcggcagagcctggggcggcccacgagatgaagtcaccgcccagcgcccgcagctctccgcacagcccctggagcgctgcaagcagctggaccagcaggcgctccagccggaacagcctcggccgtgcacccagcctgaagcggagaagcccaagtggagagcggcggtccctgttgtcgggagaaggccaggagagccaggatgaagaggagagctcagaagaggagcgggccagccctgcgggcagtgaccatcgccacagggggtccctggagcgggaggccaagagttcctttgacctgccagacacactgcaggtgccagggctgcatcgcactgccagtggccgagggtctgcttctgagcaccaggactgcaatggcaagtcggcttcagggcgcctggcccgggccctgcggcctgatgaccccccactggatggggatgacgccgatgacgagggcaacctgagcaaaggggaacgggtccgcgcgtggatccgagcccgactccctgcctgctgcctcgagcgagactcctggtcagcctacatcttccctcctcagtccaggttccgcctcctgtgtcaccggatcatcacccacaagatgttcgaccacgtggtccttgtcatcatcttccttaactgcatcaccatcgccatggagcgccccaaaattgacccccacagcgctgaacgcatcttcctgaccctctccaattacatcttcaccgcagtctttctggctgaaatgacagtgaaggtggtggcactgggctggtgcttcggggagcaggcgtacctgcggagcagttggaacgtgctggacgggctgttggtgctcatctccgtcatcgacattctggtgtccatggtctctgacagcggcaccaagatcctgggcatgctgagggtgctgcggctgctgcggaccctgcgcccgctcagggtgatcagccgggcgcaggggctgaagctggtggtggagacgctgatgtcctcactgaaacccatcggcaacattgtagtcatctgctgtgccttcttcatcattttcggcatcttgggggtgcagctcttcaaagggaagtttttcgtgtgccagggcgaggataccaggaacatcaccaataaatcggactgtgccgaggccagttaccggtgggtccggcacaagtacaactttgacaaccttggccaggccctgatgtccctgttcgttttggcctccaaggatggttgggtggacatcatgtacgatgggctggatgctgtgggcgtggaccagcagcccatcatgaaccacaacccctggatgctgctgtacttcatctcgttcctgctcattgtggccttctttgtcctgaacatgtttgtgggtgtggtggtggagaacttccacaagtgtcggcagcaccaggaggaagaggaggcccggcggcgggaggagaagcgcctacgaagactggagaaaaagagaaggagtaaggagaagcagatggctgaagcccagtgcaaaccttactactccgactactcccgcttccggctcctcgtccaccacttgtgcaccagccactacctggacctcttcatcacaggtgtcatcgggctgaacgtggtcaccatggccatggagcactaccagcagccccagattctggatgaggctctgaagatctgcaactacatcttcactgtcatctttgtcttggagtcagttttcaaacttgtggcctttggtttccgtcggttcttccaggacaggtggaaccagctggacctggccattgtgctgctgtccatcatgggcatcacgctggaggaaatcgaggtcaacgcctcgctgcccatcaaccccaccatcatccgcatcatgagggtgctgcgcattgcccgagtgctgaagctgctgaagatggctgtgggcatgcgggcgctgctggacacggtgatgcaggccctgccccaggtggggaacctgggacttctcttcatgttgttgtttttcatctttgcagctctgggcgtggagctctttggagacctggagtgtgacgagacacacccctgtgagggcctgggccgtcatgccacctttcggaactttggcatggccttcctaaccctcttccgagtctccacaggtgacaattggaatggcattatgaaggacaccctccgggactgtgaccaggagtccacctgctacaacacggtcatctcgcctatctactttgtgtccttcgtgctgacggcccagttcgtgctagtcaacgtggtgatcgccgtgctgatgaagcacctggaggagagcaacaaggaggccaaggaggaggccgagctagaggctgagctggagctggagatgaagaccctcagcccccagccccactcgccactgggcagccccttcctctggcctggggtcgagggccccgacagccccgacagccccaagcctggggctctgcacccagcggcccacgcgagatcagcctcccacttttccctggagcaccccacggacaggcagctgtttgacaccatatccctgctgatccagggctccctggagtgggagctgaagctgatggacgagctggcaggcccagggggccagccctctgccttcccttctgcccccagcctgggaggctccgacccacagatgcagccccaccccacggagctgccaggaccagacttactgactgtgcggaagtctggggtcagccgaacgcactctctgcccaatgacagctacatgtgtcggcatgggagcactgccgaggggcccctgggacacaggggctgggggctccccaaagctcagtcaggctccgtcttgtccgttcactcccagccagcagataccagctacatcctgcagcttcccaaagatgcacctcatctgctccagccccacagcgccccaacctggggcaccatccccaaactgcccccaccaggacgctcccctttggctcagaggccactcaggcgccaggcagcaataaggactgactccttggacgttcagggtctgggcagccgggaagacctgctggcagaggtgagtgggccctccccgcccctggcccgggcctactctttctggggccagtcaagtacccaggcacagcagcactcccgcagccacagcaagatctccaagcacatgaccccgccagccccttgcccaggcccagaacccaactggggcaagggccctccagagaccagaagcagcttagagttggacacggagctgagctggatttcaggagacctcctgccccctggcggccaggaggagcccccatccccacgggacctgaagaagtgctacagcgtggaggcccagagctgccagcgccggcctacgtcctggctggatgagcagaggagacactctatcgccgtcagctgcctggacagcggctcccaaccccacctgggcacagacccctctaaccttgggggccagcctcttggggggcctgggagccggcccaagaaaaaactcagcccgcctagtatcaccatagacccccccgagagccaaggtcctcggaccccgcccagccctggtatctgcctccggaggagggctccgtccagcgactccaaggatcccttggcctctggcccccctgacagcatggctgcctcgccctccccaaagaaagatgtgctgagtctctccggtttatcctctgacccagcagacctggacccctgagtcctgccccacttt

SEQ ID NO: 259696 - protein, 2321 aa, Artificial Sequence
  derived and/or modified sequence
MDEEEDGAGAEESGQPRSFMRLNDLSGAGGRPGPGSAEKDPGSADSEAEGLPYPALAPVVFFYLSQDSRPRSWCLRTVCNPWFERISMLVILLNCVTLGMFRPCEDIACDSQRCRILQAFDDFIFAFFAVEMVVKMVALGIFGKKCYLGDTWNRLDFFIVIAGMLEYSLDLQNVSFSAVRTVRVLRPLRAINRVPSMRILVTLLLDTLPMLGNVLLLCFFVFFIFGIVGVQLWAGLLRNRCFLPENFSLPLSVDLERYYQTENEDESPFICSQPRENGMRSCRSVPTLRGDGGGGPPCGLDYEAYNSSSNTTCVNWNQYYTNCSAGEHNPFKGAINFDNIGYAWIAIFQVITLEGWVDIMYFVMDAHSFYNFIYFILLIIVGSFFMINLCLVVIATQFSETKQRESQLMREQRVRFLSNASTLASFSEPGSCYEELLKYLVYILRKAARRLAQVSRAAGVRVGLLSSPAPLGGQETQPSSSCSRSHRRLSVHHLVHHHHHHHHHYHLGNGTLRAPRASPEIQDRDANGSRRLMLPPPSTPALSGAPPGGAESVHSFYHADCHLEPVRCQAPPPRSPSEASGRTVGSGKVYPTVHTSPPPETLKEKALVEVAASSGPPTLTSLNIPPGPYSSMHKLLETQSTGACQSSCKISSPCLKADSGACGPDSCPYCARAGAGEVELADREMPDSDSEAVYEFTQDAQHSDLRDPHSRRQRSLGPDAEPSSVLAFWRLICDTFRKIVDSKYFGRGIMIAILVNTLSMGIEYHEQPEELTNALEISNIVFTSLFALEMLLKLLVYGPFGYIKNPYNIFDGVIVVISVWEIVGQQGGGLSVLRTFRLMRVLKLVRFLPALQRQLVVLMKTMDNVATFCMLLMLFIFIFSILGMHLFGCKFASERDGDTLPDRKNFDSLLWAIVTVFQILTQEDWNKVLYNGMASTSSWAALYFIALMTFGNYVLFNLLVAILVEGFQAEEISKREDASGQLSCIQLPVDSQGGDANKSESEPDFFSPSLDGDGDRKKCLALVSLGEHPELRKSLLPPLIIHTAATPMSLPKSTSTGLGEALGPASRRTSSSGSAEPGAAHEMKSPPSARSSPHSPWSAASSWTSRRSSRNSLGRAPSLKRRSPSGERRSLLSGEGQESQDEEESSEEERASPAGSDHRHRGSLEREAKSSFDLPDTLQVPGLHRTASGRGSASEHQDCNGKSASGRLARALRPDDPPLDGDDADDEGNLSKGERVRAWIRARLPACCLERDSWSAYIFPPQSRFRLLCHRIITHKMFDHVVLVIIFLNCITIAMERPKIDPHSAERIFLTLSNYIFTAVFLAEMTVKVVALGWCFGEQAYLRSSWNVLDGLLVLISVIDILVSMVSDSGTKILGMLRVLRLLRTLRPLRVISRAQGLKLVVETLMSSLKPIGNIVVICCAFFIIFGILGVQLFKGKFFVCQGEDTRNITNKSDCAEASYRWVRHKYNFDNLGQALMSLFVLASKDGWVDIMYDGLDAVGVDQQPIMNHNPWMLLYFISFLLIVAFFVLNMFVGVVVENFHKCRQHQEEEEARRREEKRLRRLEKKRRSKEKQMAEAQCKPYYSDYSRFRLLVHHLCTSHYLDLFITGVIGLNVVTMAMEHYQQPQILDEALKICNYIFTVIFVLESVFKLVAFGFRRFFQDRWNQLDLAIVLLSIMGITLEEIEVNASLPINPTIIRIMRVLRIARVLKLLKMAVGMRALLDTVMQALPQVGNLGLLFMLLFFIFAALGVELFGDLECDETHPCEGLGRHATFRNFGMAFLTLFRVSTGDNWNGIMKDTLRDCDQESTCYNTVISPIYFVSFVLTAQFVLVNVVIAVLMKHLEESNKEAKEEAELEAELELEMKTLSPQPHSPLGSPFLWPGVEGPDSPDSPKPGALHPAAHARSASHFSLEHPTDRQLFDTISLLIQGSLEWELKLMDELAGPGGQPSAFPSAPSLGGSDPQMQPHPTELPGPDLLTVRKSGVSRTHSLPNDSYMCRHGSTAEGPLGHRGWGLPKAQSGSVLSVHSQPADTSYILQLPKDAPHLLQPHSAPTWGTIPKLPPPGRSPLAQRPLRRQAAIRTDSLDVQGLGSREDLLAEVSGPSPPLARAYSFWGQSSTQAQQHSRSHSKISKHMTPPAPCPGPEPNWGKGPPETRSSLELDTELSWISGDLLPPGGQEEPPSPRDLKKCYSVEAQSCQRRPTSWLDEQRRHSIAVSCLDSGSQPHLGTDPSNLGGQPLGGPGSRPKKKLSPPSITIDPPESQGPRTPPSPGICLRRRAPSSDSKDPLASGPPDSMAASPSPKKDVLSLSGLSSDPADLDP

SEQ ID NO: 259697 - DNA, 6966 bp, Artificial Sequence
  derived and/or modified sequence
atggacgaggaggaggacggcgccggcgccgaggagagcggccagcccagaagcttcatgagactgaacgacctgagcggcgccggcggcagacccggccccggcagcgccgagaaggaccccggcagcgccgacagcgaggccgagggcctgccctaccccgccctggcccccgtggtgttcttctacctgagccaggacagcagacccagaagctggtgcctgagaaccgtgtgcaacccctggttcgagagaatcagcatgctggtgatcctgctgaactgcgtgaccctgggcatgttcagaccctgcgaggacatcgcctgcgacagccagagatgcagaatcctgcaggccttcgacgacttcatcttcgccttcttcgccgtggagatggtggtgaagatggtggccctgggcatcttcggcaagaagtgctacctgggcgacacctggaacagactggacttcttcatcgtgatcgccggcatgctggagtacagcctggacctgcagaacgtgagcttcagcgccgtgagaaccgtgagagtgctgagacccctgagagccatcaacagagtgcccagcatgagaatcctggtgaccctgctgctggacaccctgcccatgctgggcaacgtgctgctgctgtgcttcttcgtgttcttcatcttcggcatcgtgggcgtgcagctgtgggccggcctgctgagaaacagatgcttcctgcccgagaacttcagcctgcccctgagcgtggacctggagagatactaccagaccgagaacgaggacgagagccccttcatctgcagccagcccagagagaacggcatgagaagctgcagaagcgtgcccaccctgagaggcgacggcggcggcggccccccctgcggcctggactacgaggcctacaacagcagcagcaacaccacctgcgtgaactggaaccagtactacaccaactgcagcgccggcgagcacaaccccttcaagggcgccatcaacttcgacaacatcggctacgcctggatcgccatcttccaggtgatcaccctggagggctgggtggacatcatgtacttcgtgatggacgcccacagcttctacaacttcatctacttcatcctgctgatcatcgtgggcagcttcttcatgatcaacctgtgcctggtggtgatcgccacccagttcagcgagaccaagcagagagagagccagctgatgagagagcagagagtgagattcctgagcaacgccagcaccctggccagcttcagcgagcccggcagctgctacgaggagctgctgaagtacctggtgtacatcctgagaaaggccgccagaagactggcccaggtgagcagagccgccggcgtgagagtgggcctgctgagcagccccgcccccctgggcggccaggagacccagcccagcagcagctgcagcagaagccacagaagactgagcgtgcaccacctggtgcaccaccaccaccaccaccaccaccactaccacctgggcaacggcaccctgagagcccccagagccagccccgagatccaggacagagacgccaacggcagcagaagactgatgctgcccccccccagcacccccgccctgagcggcgccccccccggcggcgccgagagcgtgcacagcttctaccacgccgactgccacctggagcccgtgagatgccaggcccccccccccagaagccccagcgaggccagcggcagaaccgtgggcagcggcaaggtgtaccccaccgtgcacaccagccccccccccgagaccctgaaggagaaggccctggtggaggtggccgccagcagcggcccccccaccctgaccagcctgaacatcccccccggcccctacagcagcatgcacaagctgctggagacccagagcaccggcgcctgccagagcagctgcaagatcagcagcccctgcctgaaggccgacagcggcgcctgcggccccgacagctgcccctactgcgccagagccggcgccggcgaggtggagctggccgacagagagatgcccgacagcgacagcgaggccgtgtacgagttcacccaggacgcccagcacagcgacctgagagacccccacagcagaagacagagaagcctgggccccgacgccgagcccagcagcgtgctggccttctggagactgatctgcgacaccttcagaaagatcgtggacagcaagtacttcggcagaggcatcatgatcgccatcctggtgaacaccctgagcatgggcatcgagtaccacgagcagcccgaggagctgaccaacgccctggagatcagcaacatcgtgttcaccagcctgttcgccctggagatgctgctgaagctgctggtgtacggccccttcggctacatcaagaacccctacaacatcttcgacggcgtgatcgtggtgatcagcgtgtgggagatcgtgggccagcagggcggcggcctgagcgtgctgagaaccttcagactgatgagagtgctgaagctggtgagattcctgcccgccctgcagagacagctggtggtgctgatgaagaccatggacaacgtggccaccttctgcatgctgctgatgctgttcatcttcatcttcagcatcctgggcatgcacctgttcggctgcaagttcgccagcgagagagacggcgacaccctgcccgacagaaagaacttcgacagcctgctgtgggccatcgtgaccgtgttccagatcctgacccaggaggactggaacaaggtgctgtacaacggcatggccagcaccagcagctgggccgccctgtacttcatcgccctgatgaccttcggcaactacgtgctgttcaacctgctggtggccatcctggtggagggcttccaggccgaggagatcagcaagagagaggacgccagcggccagctgagctgcatccagctgcccgtggacagccagggcggcgacgccaacaagagcgagagcgagcccgacttcttcagccccagcctggacggcgacggcgacagaaagaagtgcctggccctggtgagcctgggcgagcaccccgagctgagaaagagcctgctgccccccctgatcatccacaccgccgccacccccatgagcctgcccaagagcaccagcaccggcctgggcgaggccctgggccccgccagcagaagaaccagcagcagcggcagcgccgagcccggcgccgcccacgagatgaagagcccccccagcgccagaagcagcccccacagcccctggagcgccgccagcagctggaccagcagaagaagcagcagaaacagcctgggcagagcccccagcctgaagagaagaagccccagcggcgagagaagaagcctgctgagcggcgagggccaggagagccaggacgaggaggagagcagcgaggaggagagagccagccccgccggcagcgaccacagacacagaggcagcctggagagagaggccaagagcagcttcgacctgcccgacaccctgcaggtgcccggcctgcacagaaccgccagcggcagaggcagcgccagcgagcaccaggactgcaacggcaagagcgccagcggcagactggccagagccctgagacccgacgacccccccctggacggcgacgacgccgacgacgagggcaacctgagcaagggcgagagagtgagagcctggatcagagccagactgcccgcctgctgcctggagagagacagctggagcgcctacatcttccccccccagagcagattcagactgctgtgccacagaatcatcacccacaagatgttcgaccacgtggtgctggtgatcatcttcctgaactgcatcaccatcgccatggagagacccaagatcgacccccacagcgccgagagaatcttcctgaccctgagcaactacatcttcaccgccgtgttcctggccgagatgaccgtgaaggtggtggccctgggctggtgcttcggcgagcaggcctacctgagaagcagctggaacgtgctggacggcctgctggtgctgatcagcgtgatcgacatcctggtgagcatggtgagcgacagcggcaccaagatcctgggcatgctgagagtgctgagactgctgagaaccctgagacccctgagagtgatcagcagagcccagggcctgaagctggtggtggagaccctgatgagcagcctgaagcccatcggcaacatcgtggtgatctgctgcgccttcttcatcatcttcggcatcctgggcgtgcagctgttcaagggcaagttcttcgtgtgccagggcgaggacaccagaaacatcaccaacaagagcgactgcgccgaggccagctacagatgggtgagacacaagtacaacttcgacaacctgggccaggccctgatgagcctgttcgtgctggccagcaaggacggctgggtggacatcatgtacgacggcctggacgccgtgggcgtggaccagcagcccatcatgaaccacaacccctggatgctgctgtacttcatcagcttcctgctgatcgtggccttcttcgtgctgaacatgttcgtgggcgtggtggtggagaacttccacaagtgcagacagcaccaggaggaggaggaggccagaagaagagaggagaagagactgagaagactggagaagaagagaagaagcaaggagaagcagatggccgaggcccagtgcaagccctactacagcgactacagcagattcagactgctggtgcaccacctgtgcaccagccactacctggacctgttcatcaccggcgtgatcggcctgaacgtggtgaccatggccatggagcactaccagcagccccagatcctggacgaggccctgaagatctgcaactacatcttcaccgtgatcttcgtgctggagagcgtgttcaagctggtggccttcggcttcagaagattcttccaggacagatggaaccagctggacctggccatcgtgctgctgagcatcatgggcatcaccctggaggagatcgaggtgaacgccagcctgcccatcaaccccaccatcatcagaatcatgagagtgctgagaatcgccagagtgctgaagctgctgaagatggccgtgggcatgagagccctgctggacaccgtgatgcaggccctgccccaggtgggcaacctgggcctgctgttcatgctgctgttcttcatcttcgccgccctgggcgtggagctgttcggcgacctggagtgcgacgagacccacccctgcgagggcctgggcagacacgccaccttcagaaacttcggcatggccttcctgaccctgttcagagtgagcaccggcgacaactggaacggcatcatgaaggacaccctgagagactgcgaccaggagagcacctgctacaacaccgtgatcagccccatctacttcgtgagcttcgtgctgaccgcccagttcgtgctggtgaacgtggtgatcgccgtgctgatgaagcacctggaggagagcaacaaggaggccaaggaggaggccgagctggaggccgagctggagctggagatgaagaccctgagcccccagccccacagccccctgggcagccccttcctgtggcccggcgtggagggccccgacagccccgacagccccaagcccggcgccctgcaccccgccgcccacgccagaagcgccagccacttcagcctggagcaccccaccgacagacagctgttcgacaccatcagcctgctgatccagggcagcctggagtgggagctgaagctgatggacgagctggccggccccggcggccagcccagcgccttccccagcgcccccagcctgggcggcagcgacccccagatgcagccccaccccaccgagctgcccggccccgacctgctgaccgtgagaaagagcggcgtgagcagaacccacagcctgcccaacgacagctacatgtgcagacacggcagcaccgccgagggccccctgggccacagaggctggggcctgcccaaggcccagagcggcagcgtgctgagcgtgcacagccagcccgccgacaccagctacatcctgcagctgcccaaggacgccccccacctgctgcagccccacagcgcccccacctggggcaccatccccaagctgcccccccccggcagaagccccctggcccagagacccctgagaagacaggccgccatcagaaccgacagcctggacgtgcagggcctgggcagcagagaggacctgctggccgaggtgagcggccccagcccccccctggccagagcctacagcttctggggccagagcagcacccaggcccagcagcacagcagaagccacagcaagatcagcaagcacatgaccccccccgccccctgccccggccccgagcccaactggggcaagggcccccccgagaccagaagcagcctggagctggacaccgagctgagctggatcagcggcgacctgctgccccccggcggccaggaggagccccccagccccagagacctgaagaagtgctacagcgtggaggcccagagctgccagagaagacccaccagctggctggacgagcagagaagacacagcatcgccgtgagctgcctggacagcggcagccagccccacctgggcaccgaccccagcaacctgggcggccagcccctgggcggccccggcagcagacccaagaagaagctgagcccccccagcatcaccatcgacccccccgagagccagggccccagaaccccccccagccccggcatctgcctgagaagaagagcccccagcagcgacagcaaggaccccctggccagcggcccccccgacagcatggccgccagccccagccccaagaaggacgtgctgagcctgagcggcctgagcagcgaccccgccgacctggacccctag

SEQ ID NO: 259698 - DNA, 6966 bp, Artificial Sequence
  derived and/or modified sequence
atggatgaggaggaggatggggccggggctgaggagtctggccagccccgaagtttcatgcgcctgaatgacctcagcggggccggggggcggcccggccccggatccgctgaaaaagatccaggctccgcggatagcgaggccgagggcctcccctacccagcacttgcgccagtggtatttttttacttaagccaggatagccgaccacggagctggtgtctgaggacagtatgtaatccatggtttgagcgtataagcatgcttgtgattctgttaaactgcgtgactttagggatgttcaggccttgcgaagacatcgcctgcgatagtcagagatgtcgtattctgcaggctttcgatgactttatttttgccttctttgctgtggagatggtggttaagatggttgctctcggtatctttggaaagaagtgttacctgggtgacacttggaatcggctggattttttcatcgtcattgctggcatgctcgagtacagccttgacttgcagaatgtgagtttttctgcagttcgaacagtgcgtgttttgcgccctcttagagctatcaatcgggtgcccagcatgcggatcctggtgaccctgctgctggatactctgcctatgctgggcaacgtgctcctactctgtttcttcgtatttttcatcttcgggattgttggagtgcaactgtgggctggcctgctgcgcaatcggtgttttctgcccgagaatttcagtctgccactgtccgtggacctggaacggtattaccaaaccgagaatgaggatgaaagcccctttatctgctctcagcctcgtgagaatggtatgagaagctgccgaagtgtacccacactacggggcgacgggggagggggacccccttgtggcctggattacgaagcctataactccagtagcaacaccacgtgcgtgaattggaaccagtactacaccaattgtagtgcaggtgaacacaatccgtttaagggtgccatcaacttcgataacatcggatacgcctggatcgcgatcttccaggttattactttagaggggtgggtcgatattatgtactttgtcatggatgcacactccttctataactttatctactttatcctgctcattattgtgggttccttctttatgataaacctgtgtctcgtggttattgctacccagtttagcgaaaccaaacagcgcgagtctcagctcatgagggaacagcgggtgaggttcctgtctaacgcctctacactcgccagtttttccgagccaggatcttgttatgaagagctgctgaagtatctggtctatattctccggaaggcagcacggcgtctggcccaagtaagcagagcagccggagtgcgagtggggcttctctcatccccggcccccctaggcggacaggagacacagccgtcttcctcttgctcaagatcacatcgtcgcctttctgtgcatcatctggtccaccaccaccaccaccaccaccaccattatcatctcggcaacggtacactccgagctccgcgagcatctccagagatccaggatagagatgccaatggtagtagacgcctcatgctgccccccccctccacccctgcgttaagcggagcaccgcctggaggagccgaaagtgtgcattccttctaccatgccgactgccacctcgaaccggtgaggtgccaggctccgccccccagatctccctcggaggcttctggaaggacggtcggctctggtaaagtatacccaaccgtccacacaagcccccccccagagaccctgaaggagaaagctctggtcgaggtggccgcctcgagcgggcctccgactctgacgagcctgaatatccctccgggaccgtatagcagcatgcataaattgcttgagactcaatctacaggtgcgtgccagagcagttgcaagatctcctccccttgtcttaaagctgactcgggagcttgcggccccgactcttgcccatactgtgccagagctggagccggagaggttgagctggctgaccgcgagatgccagatagcgattcagaggcagtatacgaatttacccaagatgcgcagcatagtgacctcagagatcctcactccaggaggcagaggagtttaggacccgatgcagagccatccagcgtgcttgctttttggaggttaatctgcgatacatttcgcaagatcgttgacagcaagtactttggccgcggcatcatgatcgcaatattggttaataccctgtcaatgggcatcgagtaccatgaacagcccgaagaactgacaaatgctctggagatcagtaatattgtgttcactagcttgtttgcgttggagatgctcctgaaactgttggtatacgggccattcggctatatcaaaaatccgtacaacatcttcgacggcgtgatcgtggtgataagtgtgtgggagattgtgggccagcagggcggtggtttatccgtgctgcgaaccttccgattgatgcgagttttaaaactggtcagatttctgcctgcattacagagacagctggtggtgctgatgaaaaccatggacaatgttgccaccttctgcatgctgttgatgctgttcatctttatctttagcattttaggtatgcatctgtttgggtgtaaatttgccagcgagcgggacggtgatactctcccagatcgcaagaatttcgatagtctgctgtgggcgatcgtaaccgttttccaaatcctcacacaagaagattggaacaaggtgctctacaacgggatggcgtctacatcatcatgggccgcattatatttcatcgcccttatgacttttggaaactacgtcctgttcaacctgttggtcgctatactggtggagggcttccaggctgaagagatctccaagagggaggatgcctcagggcagctgagctgtattcaacttcccgtggactcccagggaggcgatgctaacaaatctgaatcggagccagatttctttagtccatctctagatggggacggggacagaaagaagtgtctcgccctggtgagcctcggcgagcatccagaactgcggaagtcccttctccctccgctgataatacataccgcggcaacccctatgtcacttccaaagagcacaagcactggcttgggcgaggcgttggggccagcctcgaggcgtacaagcagctcaggatccgcggagccgggcgccgcccatgagatgaaaagcccaccctccgctcgcagcagtccccacagcccatggtcagcagctagcagctggactagcaggcgaagctctaggaatagcctgggaagggccccatcacttaagagaaggtccccctccggtgagaggaggtcattgttgtcgggggaggggcaagaatcacaggatgaggaggagagttcagaagaggagagagcaagtcctgccggctccgaccaccgccacagaggctcattggaacgggaggcgaaatcctcatttgacttgcccgatactctccaagtacccggactccatcgcacagccagtggcaggggttccgcctcggagcatcaggattgcaatgggaaatccgccagtggcagactggcccgcgctctgcgaccagatgatccacctcttgacggcgacgacgccgacgacgagggcaatctgagtaaaggagaacgggtgcgggcctggatacgggcaaggctgcccgcctgctgcctggagagggatagttggtccgcctacatctttccacctcagagtcggttcagactgttgtgccaccgcatcattactcacaagatgtttgaccacgtagtactggtgattattttcctgaactgtataaccatcgccatggagagacctaagatcgatccccacagcgccgaacgaattttcttgactctcagcaattatattttcactgccgtttttctggcagaaatgacagtcaaggtcgtggcacttggttggtgctttggagaacaggcctacttaagatcttcttggaacgtactggatgggctgctggttcttatctccgttatcgatatcctggtttccatggtaagcgactcaggcaccaagattttgggaatgctgagagtcctgcgtctcctgcgcaccctgcggccccttagagtcatctctcgcgcacaggggttaaaactagtcgtagaaacactgatgtccagcctgaaaccaatcggtaatatagttgtcatttgctgcgcattctttatcatatttggcatcctgggggtgcaattattcaagggtaagtttttcgtctgccaaggcgaggatacgcgaaacatcacaaataaatctgattgcgccgaagcttcatatcggtgggtccgacacaagtacaatttcgacaatctaggacaggctctgatgagcctttttgtgcttgcttcaaaagatggctgggttgatatcatgtatgacgggctggatgctgtcggcgtagaccagcagcccattatgaatcacaacccgtggatgcttctctattttatttctttcctgttgatcgtagccttttttgtgctgaacatgtttgtgggagtcgtggtggagaactttcataagtgccggcagcatcaggaggaagaggaagcaaggagacgggaggaaaaacggctgcggcgccttgagaaaaagagaagaagcaaagagaagcagatggcggaggcacagtgtaagccgtattattccgattactcacgatttaggctgcttgtccatcacctttgcaccagccactatttggacctattcatcacaggagtgataggcctgaacgtcgtaacgatggccatggagcactaccaacagccacaaatcctggacgaagccctcaaaatctgtaactacattttcaccgttatcttcgtgttagaatcggtgttcaagctcgtggccttcggattcaggaggttctttcaggacaggtggaaccagttagacctggccatcgtactgctttctatcatgggcatcaccttggaagagattgaggtgaacgccagccttccaataaatccaacgattatccgaattatgcgagtcttgagaatcgcccgggttcttaaactgcttaaaatggcagttggaatgagagctctgttggacacagtcatgcaggccctgccacaggtaggcaacttgggactcctcttcatgctgctcttcttcattttcgcagccttgggagtagaactcttcggtgatttggaatgcgacgaaacacacccatgtgagggactcggcagacatgcgacattccgtaacttcgggatggctttcctcacactgttccgcgttagtaccggcgacaactggaatgggatcatgaaggacacccttagagactgcgaccaggagagtacatgctataacactgttatctcaccaatttacttcgtgtcctttgtgcttacagcccaattcgtattggtgaacgtggtaattgccgtactaatgaagcatctcgaggaaagcaacaaggaggcgaaggaagaggctgaactggaggctgagctcgaacttgagatgaagaccttgagtccacagccccattcccccctgggctcgccattcctttggcccggcgtggaaggtccagactccccggactctccgaaacccggcgcactccaccccgcagcacacgctcggtccgccagtcatttttccctcgagcatccaactgatcggcagctgttcgatacgatttcactcctgatccagggctccctggagtgggagttaaagctcatggacgaactggccgggcccggaggacagccaagcgcctttccatccgctccgagcctggggggctctgatccgcagatgcagccacaccccaccgagctccccggccctgatctgttgaccgtaagaaagtctggagtatctaggactcattctctgcccaacgacagttatatgtgcaggcatgggagcaccgccgaggggccgctgggtcaccgaggctggggtctgcctaaggctcagagcggctctgtgctgtctgttcattcacagcccgcggacacaagttacatcctgcagctgcctaaagacgcccctcatcttttacagcctcactccgccccaacgtggggcaccatcccaaaactgccaccgcccggccgatcccctctggcccagaggccattaagaaggcaggcagctatcagaactgactccctggacgtgcagggcctcggaagtcgagaggatctgctggccgaggtgtccgggccctcccccccactggcaagggcatattcattttggggccaaagctcaacacaggcccagcaacatagcaggtcccattctaaaatcagcaagcatatgacacccccggccccttgccctggccctgaaccaaattggggcaagggtccgcccgaaacaaggtccagtctggagctcgatacagagctctcttggataagcggagatttgcttccccccgggggtcaggaagagcctccttccccgcgcgacctcaagaaatgttatagtgtggaagctcaatcctgccagcggaggcccacctcttggctggacgaacagcgccgccacagtatcgcagtgtcctgcttggactcaggctcacagccacacctgggtactgacccgtcaaatctaggtggacaacctctgggcgggccagggagcaggcctaagaaaaaactttctcctccatccattactattgaccctcccgagagccagggtccacgaacccccccctccccaggcatctgcttgcgcaggcgcgcacctagctctgatagtaaggaccccttggcatccggtccccctgattcgatggccgcttccccgtctcccaagaaagacgttttaagcttatctgggctgagtagtgatcctgcagacctggacccgtag

SEQ ID NO: 259699 - DNA, 6966 bp, Artificial Sequence
  derived and/or modified sequence
atggatgaggaggaggatggagctggagctgaggagagcggccagcccaggagcttcatgaggctgaatgacctgagcggggccggcggccggcccggccctggcagcgctgagaaggaccccggcagcgctgacagcgaggccgagggcctgccctacccagccctggcccctgtggtgttcttctacctgagccaggacagccggcccaggtcctggtgcctgaggacagtgtgcaacccctggtttgagcgcatctccatgctggtgatcctgctgaactgtgtgaccctgggcatgttccggccctgtgaagatattgcctgtgacagccagcgctgccgcatcctgcaggcctttgatgacttcatctttgccttctttgctgtggagatggtggtgaagatggtggccctgggcatctttgggaagaagtgctacctgggggacacctggaaccggctggacttcttcatcgtgattgctggcatgctggagtacagcctggacctgcagaatgtgtccttctctgctgtgaggacagtgcgggtgctgcggcccctgcgggccatcaacagagtgcccagcatgaggatcctggtgaccctgctgctggacaccctgcccatgctgggcaatgtgctgctgctgtgcttctttgtgttcttcatctttggaattgtgggcgtgcagctgtgggccggcctgctgaggaaccgctgcttcctgcctgagaacttcagcctgcccctgtctgtggacctggagcgctactaccagacagaaaatgaagatgagagccccttcatctgcagccagccccgggagaatggcatgaggagctgccgctctgtgcccaccctgcggggagatggcggcggcggccccccctgtggcctggactatgaggcctacaacagcagcagcaacaccacctgtgtgaactggaaccagtactacaccaactgcagcgctggggagcacaaccccttcaagggggccatcaactttgacaacatcggctacgcctggatcgccatcttccaggtgatcaccctggagggctgggtggacatcatgtactttgtgatggatgcccacagcttctacaacttcatctacttcatcctgctgatcatcgtgggcagcttcttcatgatcaacctgtgcctggtggtgattgccacccagttcagcgagaccaagcagcgggagagccagctgatgagggagcagagggtgcgcttcctgagcaatgccagcaccctggccagcttcagcgagcccggcagctgctatgaggagctgctgaagtacctggtgtacatcctgaggaaggccgcccggcggctggcccaggtgtccagagctgctggggtgcgggtgggcctgctgagcagccctgcccccctgggcggccaggagacccagcccagcagcagctgcagccgcagccaccggcggctgtctgtgcaccacctggtgcaccaccaccaccaccaccaccaccactaccacctgggcaatggcaccctgcgggccccccgggccagccctgagatccaggacagagatgccaacggcagccggcggctgatgctgcccccacccagcaccccagccctgagcggggcccctcctggaggagctgagagcgtgcacagcttctaccacgccgactgccacctggagcctgtgcgctgccaggcccccccacccaggagccccagcgaggccagcggccgcacagtgggcagcggcaaggtgtaccccaccgtgcacaccagccccccacctgagaccctgaaggagaaggccctggtggaggtggccgccagcagcggcccccccaccctgaccagcctgaacatccccccaggcccctacagctccatgcacaagctgctggagacccagagcactggagcctgccagagcagctgcaagatcagcagcccctgcctgaaggctgacagcggggcctgtggccctgacagctgcccctactgtgcccgggccggggccggggaggtggagctggccgaccgggagatgccagacagcgacagcgaggccgtgtatgagttcacccaggatgcccagcacagcgacctgcgggacccccacagccggcggcagaggagcctgggcccagatgctgagcccagctctgtgctggccttctggaggctcatctgtgacaccttcaggaagatcgtggacagcaagtacttcggccggggcatcatgattgccatcctggtgaacaccctgtccatgggcatcgagtaccacgagcagcctgaggagctgaccaatgccctggagatcagcaacatcgtgttcaccagcctgtttgccctggagatgctgctgaagctgctggtgtatggccccttcggctacatcaagaacccctacaacatctttgatggagtcatcgtggtgatctctgtgtgggagatcgtgggccagcagggcggcggcctgtctgtgctgcggaccttccggctgatgagggtgctgaagctggtgcgcttcctgcctgccctgcagaggcagctggtggtgctgatgaagaccatggacaacgtggccaccttctgcatgctgctgatgctgttcatcttcatcttcagcatcctgggcatgcacctgtttggctgcaagtttgccagcgagagagatggagacaccctgcctgacaggaagaactttgacagcctgctgtgggccatcgtgacagtgttccagatcctgacccaggaggactggaacaaggtgctgtacaacggcatggccagcaccagctcctgggccgccctgtacttcatcgccctgatgaccttcggcaactacgtgctcttcaacctgctggtggccatcctggtggagggcttccaggccgaggagatcagcaagcgggaggatgccagcggccagctgagctgcatccagctgcctgtggacagccagggcggagatgccaacaagtctgagagcgagccagacttcttcagccccagcctggatggagatggagacaggaagaagtgcctggccctggtgtccctgggggagcaccctgagctgaggaagagcctgctgcccccactcatcatccacacagctgccacccccatgagcctgcccaagagcaccagcacaggcctgggggaggccctgggccctgccagcaggaggaccagcagcagcggcagcgctgagcctggagctgcccacgagatgaagagcccccccagcgcccggagcagcccccacagcccctggagcgctgccagctcctggaccagccgccgcagcagcaggaacagcctgggccgggcccccagcctgaagagaagaagccccagcggggagcggcgcagcctgctgtctggagagggccaggagagccaggatgaggaggagagcagcgaggaggagcgggccagccctgctggcagtgaccaccgccaccggggcagcctggagcgggaggccaagagcagctttgacctgcctgacaccctgcaggtgcccggcctgcacaggacagccagcggccggggcagcgccagcgagcaccaggactgcaatggcaagagcgccagcggccgcctggcccgggccctgcggccagatgatcctcccctggatggagatgatgctgatgatgagggcaacctgagcaagggggagcgggtgcgggcctggatccgggcccggctgcctgcctgctgcctggagcgggacagctggagcgcctacatcttccccccccagagccgcttccggctgctgtgccaccgcatcatcacccacaagatgtttgaccacgtggtgctggtgatcatcttcctgaactgcatcaccatcgccatggagcggcccaagattgacccccacagcgctgagcgcatcttcctgaccctgagcaactacatcttcaccgctgtgttcctggccgagatgacagtgaaggtggtggccctgggctggtgcttcggggagcaggcctacctgcggagctcctggaatgtgctggatggcctgctggtgctgatctctgtgattgacatcctggtgtccatggtgtctgattctggcaccaagatcctgggcatgctgcgggtgctgcggctgctgcggaccctgcggcccctgcgggtcatcagccgggcccagggcctgaagctggtggtggagaccctgatgagcagcctgaagcccatcggcaacatcgtggtgatctgctgtgccttcttcatcatcttcggcatcctgggcgtgcagctgttcaagggcaagttctttgtgtgccagggcgaggacaccaggaacatcaccaacaagagtgactgtgccgaggccagctaccgctgggtgcgccacaagtacaactttgacaacctgggccaggccctgatgagcctgtttgtgctggccagcaaggatggctgggtggacatcatgtatgatggcctggatgctgtgggcgtggaccagcagcccatcatgaaccacaacccctggatgctgctgtacttcatctccttcctgctgattgtggccttctttgtgctgaacatgtttgtgggcgtggtggtggagaacttccacaagtgccggcagcaccaggaggaggaggaggcccggcggcgggaggagaagaggctgcggcggctggagaagaagagaagaagcaaggagaagcagatggccgaggcccagtgcaagccctactacagcgactacagccgcttccggctgctggtgcaccacctgtgcaccagccactacctggacctcttcatcactggagtcatcggcctgaatgtggtgaccatggccatggagcactaccagcagccccagatcctggatgaggccctgaagatctgcaactacatcttcaccgtcatctttgtgctggagagcgtcttcaagctggtggccttcggcttccgccgcttcttccaggaccgctggaaccagctggacctggccatcgtgctgctgagcatcatgggcatcaccctggaggagattgaggtgaatgccagcctgcccatcaaccccaccatcatccgcatcatgagggtgctgagaattgcccgggtgctgaagctgctgaagatggctgtgggcatgagggccctgctggacacagtgatgcaggccctgccccaggtgggcaacctgggcctgctcttcatgctgctcttcttcatctttgctgccctgggcgtggagctgtttggagacctggagtgtgatgagacccacccctgtgagggcctgggcagacatgccaccttcaggaactttggcatggccttcctgaccctcttccgggtgtccactggagacaactggaatggcatcatgaaggacaccctgcgggactgtgaccaggagagcacctgctacaacacagtcatcagccccatctactttgtgtcctttgtgctgacagcccagtttgtgctggtgaatgtggtgattgctgtgctgatgaagcacctggaggagagcaacaaggaggccaaggaggaggccgagctggaggccgagctggagctggagatgaagaccctgagcccccagccccacagccccctgggcagccccttcctgtggccaggagtggagggccctgacagcccagacagccccaagccaggggccctgcaccctgctgcccacgcccggagcgccagccacttcagcctggagcaccccacagaccggcagctgtttgacaccatcagcctgctgatccagggcagcctggagtgggagctgaagctgatggatgagctggccggccctgggggccagcccagcgccttccccagcgcccccagcctgggcggcagtgacccccagatgcagccccaccccacagagctgcccggccctgacctgctgactgtgaggaagtctggagtgtccaggacccacagcctgcccaatgacagctacatgtgccgccacggcagcacagctgagggccccctgggccaccggggctggggcctgcccaaggcccagagcggctctgtgctgtctgtgcacagccagcctgctgacaccagctacatcctgcagctgcccaaggatgccccccacctgctgcagccccacagcgcccccacctggggcaccatccccaagctgcccccacctggccgcagccccctggcccagaggcccctgcggcggcaggccgccatcagaacagacagcctggatgtgcagggcctgggcagccgggaggacctgctggccgaggtgtctggccccagcccccccctggcccgggcctacagcttctggggccagagcagcacccaggcccagcagcacagccgcagccacagcaagatcagcaagcacatgaccccaccagccccctgccccggccctgagcccaactggggcaagggccccccagagaccaggagcagcctggagctggacacagagctgtcctggatcagcggggacctgctgcccccaggcggccaggaggagccccccagcccccgggacctgaagaagtgctacagcgtggaggcccagagctgccagaggcggcccacctcctggctggatgagcagaggaggcacagcattgctgtgtcctgcctggacagcggcagccagccccacctgggcacagaccccagcaacctgggcggccagcccctgggcggccctggcagccggcccaagaagaagctgagcccccccagcatcaccattgatcctcctgagagccagggccccaggaccccacccagccctggcatctgcctgcggcggcgggcccccagcagtgacagcaaggaccccctggccagcggccccccagacagcatggccgccagccccagccccaagaaggatgtgctgagcctgagcggcctgagcagtgaccctgctgacctggacccctag

SEQ ID NO: 259700 - DNA, 6966 bp, Artificial Sequence
  derived and/or modified sequence
atggacgaggaggaggacggcgccggcgccgaggagagcggccagccccggagtttcatgcgtctcaatgatctttccggggcgggtgggcgccccggacccggaagcgctgagaaagacccaggatctgcagatagtgaggcggagggactgccatatcctgccctcgcgcctgtggtattcttttacctttcccaggactcccgcccgcgttcatggtgtctgaggacagtctgcaacccgtggttcgagcgcatctctatgctcgtcatcctgctgaattgtgtcacgttaggaatgtttcggccttgtgaagatattgcctgcgactctcaacggtgccggattctccaggcgttcgatgatttcattttcgctttctttgcagtggagatggtcgtcaagatggttgcgctggggatttttggaaaaaagtgctacctcggtgacacatggaatagactggattttttcattgtcatcgctgggatgctggagtattccctggatctccaaaatgtctccttcagcgccgttcggactgtgcgcgtactgcgcccgctccgggccatcaatcgcgtgccttcaatgcgcattctggtaacccttctgcttgacactctgccaatgctgggaaacgtccttctgttgtgcttcttcgtattcttcatttttgggatcgtcggagtccaattatgggcaggcctcctgagaaacaggtgtttcctccccgaaaatttcagtctacctctctctgtggaccttgaacgttactaccaaactgagaatgaagatgagtcccccttcatatgctcccagccccgcgagaatgggatgcggagctgtaggtcggtccctaccctccgaggcgacggcgggggggggcccccatgcggcctcgattacgaagcctacaactcatcaagcaatactacttgtgtgaattggaaccagtactacacaaattgctctgcgggtgagcataaccccttcaagggtgccataaattttgacaacatcgggtacgcctggatcgctattttccaagtcatcacgctggaaggatgggtggatattatgtacttcgttatggatgcccactcgttttataattttatttatttcattttgttaattattgttggtagcttctttatgataaatctgtgtttggtggtgattgcaacacagttttcagaaacaaagcagagggagtctcagttgatgcgcgagcagagggtgcggtttttgtcaaatgctagtaccctggctagtttcagcgagcctggcagctgttacgaagaattactcaaatacttggtctacatactgcgtaaggccgccagacgactggcgcaggtgtctcgggccgcaggtgttcgggtcgggttgttgtcctctccggcccctctcggcggccaggagacgcagccttctagttcctgttctcgcagccacaggcgactttccgtgcaccatctggtgcatcaccatcaccatcaccatcaccattaccacctgggcaatggtacattgcgtgcccctagggcgtcacccgaaatccaggatcgcgatgctaacggatcccggcgactgatgttacccccacccagcaccccagcactgtcaggggcccctcccgggggagctgagtcagtgcatagtttctatcatgctgactgtcatctcgaaccggtacgctgtcaggctcctcctcctcggagtccctccgaagccagcgggcgaacagtcggcagtggcaaagtgtaccccacagtccacacaagcccaccccccgagactctgaaggagaaggctctggtggaggtggcagcttctagtggcccgcccaccttgaccagcctcaatatccctcccggtccctatagcagcatgcacaagctactcgaaacccagtccaccggagcatgccagagtagctgtaaaatctcaagcccctgtctgaaggccgactctggcgcctgcggtcccgacagctgtccatattgtgccagggccggtgctggagaggtggagctagcggaccgtgagatgcctgacagtgacagcgaagctgtatatgaattcacccaggatgcgcaacactctgatcttagagacccacactctcgccggcaacgttctctcggccccgatgcagagccctctagcgtccttgccttctggcgcctgatttgtgatacgttcaggaagatcgtcgacagcaaatactttggtcggggcataatgatcgccatactggtgaacaccctaagcatgggcattgaatatcatgagcagcctgaagagttgacaaatgccctggagataagcaatatcgtgttcacctccctgtttgccttagaaatgctgctcaagctgttggtgtacggaccatttggttacatcaagaatccttacaatatcttcgacggagtaatcgtcgtcatctcagtgtgggagattgtaggacagcagggaggggggctctctgtactgcggacgttccgtctaatgcgagtactcaaactggttagatttctgcctgcacttcagcgccagctggtggtccttatgaagacaatggataacgtcgctactttctgtatgctcctcatgcttttcatcttcatattctctatcttaggtatgcatctattcggatgtaaatttgcctccgaaagggatggggacacattgccagataggaaaaattttgactctttactgtgggcgatagtgactgtctttcagatcttaacccaggaggactggaacaaggttctgtataacgggatggcgagcaccagttcttgggcagccctgtactttattgccctgatgactttcggcaactatgtcctcttcaatctccttgtggcaatactggttgagggattccaggctgaagaaatttctaaacgcgaggacgcctctggccaactgagctgtatacaactccctgtggactcacaagggggagacgctaacaagtccgagtccgaaccagatttcttctccccttctcttgacggtgacggcgaccgaaagaaatgtctggcactggttagccttggtgaacaccctgaattaagaaaatctttgttgccccctcttatcatccataccgcggccacccccatgagtttacctaagtcaacctcgactggtttgggcgaggctctggggccggcctctaggcgcacctcctccagcgggtccgccgaacccggcgcagcacacgaaatgaagtcccctccgagcgcaagatcctctccgcattccccctggagcgcagcttcaagctggacgtcgagaaggagttccaggaattcactcgggcgggcccccagtcttaaacgcaggtcaccttcgggagagcgcaggtccctcctgtctggagagggacaggaatcacaagacgaagaagagtcatctgaggaagaacgagcttcccctgcaggttcggaccacagacatcgcggctcattggagcgcgaggcgaagagtagctttgacctgcccgacactcttcaggtgcctggattgcacagaacagcctcaggcagggggagtgccagcgaacaccaggactgtaacgggaagtctgccagtggccgtctggcccgtgccttgaggccggatgacccaccgctggacggggatgatgctgacgacgagggcaatctttctaagggagagagagtacgcgcatggattagagcccgattgcccgcctgctgccttgaacgtgatagctggtctgcctacatctttccaccacagtcaaggttcaggcttctgtgccataggatcattactcataaaatgtttgatcacgtggtgctagttatcatttttttaaattgcataaccattgctatggagaggcccaaaatcgatcctcactctgcggagcggattttcctgacactttcaaattacattttcaccgccgtgttcctggccgagatgacggtgaaggtggtggccttgggctggtgctttggggagcaagcctacttacgctcttcctggaatgtgttggacggactgctcgttttaatttcagtgattgatatcctcgtgagcatggtgtctgacagtggaacaaagatcctcggaatgctccgagtgcttcggctattgcggaccctgcggcccttacgagtgatttcaagagcgcaaggactaaagctcgtggtggaaaccctgatgtcttctctgaagccaatcgggaacatcgttgtaatctgctgcgcattcttcataatcttcggcatcttaggggtccagctgtttaaagggaagttttttgtgtgtcaaggagaggatacccgcaatattaccaataagtccgattgcgctgaggcgagttataggtgggtgagacataaatacaatttcgacaatctgggtcaagccttgatgtccttattcgtgctggcatctaaggacggatgggtagatatcatgtatgatggactggatgccgtgggagtggatcagcaacccataatgaatcacaacccatggatgctgctgtatttcatttcattcctgttgatcgtggccttttttgtactgaacatgttcgtgggcgttgtcgtggaaaattttcacaagtgccgacagcaccaggaggaagaagaagccaggcgccgagaggagaagcgacttagacggttggagaagaaaagacggtcgaaggaaaagcagatggccgaagcccagtgtaagccctattactccgattactcgaggttccgcctactggtccaccatctgtgcacgagtcactaccttgacctgttcatcaccggcgtcattgggctaaatgtggtcactatggctatggagcattaccagcagccgcagatcctggacgaagcccttaagatttgtaattacatctttaccgtaatctttgtgctcgagtctgtgttcaaactcgtggccttcggattcaggaggttcttccaggacagatggaaccaacttgacctggcaattgttctcttgtcaatcatggggattaccctcgaagagatcgaggtaaacgcctctctccccatcaatccaaccataatccgcatcatgcgcgtcttacggatagcccgtgtcctcaagttactaaaaatggcggtgggcatgagggctctgctggacacagttatgcaggctttgccgcaggttgggaatcttggcttgttgttcatgctgttgtttttcatctttgccgccctgggagtcgagctgttcggtgatttggaatgcgatgagacccatccatgcgaaggccttggacgccacgccacatttagaaatttcggtatggcttttctgactctgttcagggtgagcacaggcgataactggaatggcattatgaaagatactctgcgggattgtgaccaggaaagcacttgttacaacactgttatctcgccaatctacttcgtgtcattcgtgttgactgctcagtttgtgctggtcaacgtagttatagcagtgttgatgaaacacctggaggagagtaataaagaagctaaggaagaggccgaactggaggctgagctggagctggaaatgaaaacgttaagtcctcagccccattcgccccttggaagccctttcctctggccgggagtcgaaggaccggactcgccagatagccccaaacctggcgctcttcaccccgccgcccatgctcggagtgcgtcccacttctccctggagcatcctaccgatagacagctcttcgataccatcagtctgttgatccagggctccctggagtgggaactgaagctcatggatgaactggcaggcccgggcggccagcccagtgcattcccatcagcgccgtcactgggcggatccgatcctcagatgcagccccatcccaccgaactgcccgggcctgacctactgactgtacggaaatccggggtgagtcgcactcattctctgcccaacgactcctacatgtgtcgccatggatcaacagcagagggcccactgggacatcgcggctggggactccccaaggcccagagcgggtctgtcctctcagtgcactcccagcccgctgacacatcatacatcctgcagctgcctaaagatgcgccacatttgcttcaacctcattccgcaccaacgtgggggacaatccctaaactccctcctccaggtaggagccccctggctcagaggcctctgcggagacaggcggcgatcagaactgactccctagatgtgcagggattgggctcccgagaggatctgctcgctgaagtgtccggtcctagccctcctctcgctcgcgcatattctttctggggacagagtagcacacaagcccaacagcactcgcggtcgcatagtaagatctccaaacatatgacgcccccagcgccctgccccggccctgagcccaattggggcaaaggtccccctgagacaaggtctagcctggaactggataccgagcttagctggatcagcggtgacctgttgccgcccggcggccaggaggaaccaccctcccctagggatttaaagaagtgctactctgtggaggcccaatcctgtcagcggcggcctacgagctggctggacgaacagcggcgccactcaatagctgtatcatgcctggatagcggatctcagccccatttgggaaccgacccgagcaacctgggtggacagcctctcggcgggccgggcagtcgacccaagaagaaactgtcccctcctagcattacaatcgaccctcccgaatcccaaggtcctagaaccccgccttcccctggcatttgcctgcgtcgcagagccccatcatcagactcgaaggaccctctagcttctggtccccccgactcaatggctgcctcccccagtcccaaaaaagacgtactgtcactgagcgggttatcaagcgatcccgccgatctggatccgtag

SEQ ID NO: 259701 - DNA, 6965 bp, Artificial Sequence
  derived and/or modified sequence
atggacgaggaggaagacggggctggcgcagaggagtccggacaacccaggtctttcatgagactgaatgacctgagcggtgcgggtgggagacctgggcctggcagtgctgagaaggaccctggcagtgctgattccgaagcagagggcttaccttatcctgccttagctcccgtggtctttttttatctctcccaagacagccgccctcgttcctggtgtctccgaactgtgtgcaacccatggttcgaacgcattagcatgctcgtgatcctgctgaactgtgttacgttggggatgtttcgaccctgtgaggatattgcgtgtgatagccagcgttgccgcatactgcaagcattcgacgactttatttttgctttcttcgcagtggaaatggtcgtgaaaatggtggccctaggtatattcggtaagaaatgctacctgggcgatacatggaatcggctggactttttcatcgtgatagcaggtatgctggagtactcgctggatctacagaacgtgtcctttagtgctgtacgcaccgtcagggtactccgccctctccgtgccatcaatcgggttccctccatgcgcattctggtgacactgcttctggacaccctccccatgctgggaaacgtcttattgctctgtttttttgttttcttcattttcggcatcgtgggcgtccagctttgggcgggattactgcggaacaggtgcttcctacccgagaacttcagcttgcctttgtccgtggacctggaacgatactatcagaccgagaacgaagacgaatcccctttcatctgcagtcagcccagagagaacggtatgagaagttgcagatctgtccctactttacgtggagacggaggaggaggcccaccttgtggccttgattacgaagcatacaattcctcctcaaatactacttgcgtaaactggaatcagtactacacaaactgttcagcaggcgagcacaacccgttcaaaggtgccattaactttgataacataggctacgcctggattgccatcttccaagtgatcacactggagggctgggtggatatcatgtattttgtgatggacgcacactcattctacaattttatctacttcattctgctcattattgtcggctccttctttatgattaatctctgtcttgttgtaattgccacccagttcagcgaaacaaagcagcgagagtcccagctgatgcgagagcagagggtcagattcctgtcgaacgcaagtacactggctagctttagcgaacccggttcctgttatgaagagctcctgaagtatttagtctacatcttacggaaagctgccagacgactggcccaggtctcccgggctgccggtgtccgtgtgggcctactgagcagccccgcacctctggggggtcaggaaacgcagccctcgtcaagctgctcacgcagtcatagaaggctgtctgtgcatcacctggtacatcaccatcaccatcatcaccatcattaccacctcggtaatgggactctgcgcgctcccagagcttcaccagagattcaagaccgagacgccaatggcagccggagattaatgcttccaccaccctcaacacctgccctgagcggtgccccacctggcggagcagaatccgttcattcattttatcacgccgattgccatttagaaccggttaggtgccaagcacccccacctagatcaccttctgaagcctctggacggaccgtgggctctggtaaggtgtatccgaccgtgcatacaagtcctcccccagaaacactcaaggagaaggctctggtcgaggtagctgcaagcagtggcccacccaccttgaccagcctaaacatccccccaggcccttatagttcgatgcataaactgctggagacgcagagtaccggtgcatgtcagtcttcctgtaaaatcagttctccctgcctgaaagctgatagtggggcatgcggacccgatagctgtccatactgtgctagggccggagctggagaggttgagcttgctgatagggaaatgcccgactccgattctgaggcggtgtatgaatttacccaagatgcccagcattccgaccttcgggacccgcattctaggaggcaacgatctctcggaccggatgcagagcccagttcggtgctggccttctggcggctaatatgcgacacatttcgaaagatcgtcgatagtaagtattttgggaggggaataatgatcgctattctggtgaataccctcagtatggggatcgaatatcatgaacagcctgaggagttgacgaacgccctggaaattagtaatatagtatttacaagcctttttgctctggagatgctgctgaagttattggtgtacggacccttcggatacatcaagaatccttacaacatcttcgatggcgtcattgtggtgatcagtgtgtgggagatcgtgggtcagcagggcggaggactgtccgtcctgcgaacgtttcggctgatgagggtcctgaagctcgtgcggttcctgcccgctctccagcgccagcttgtggtcttgatgaagactatggacaacgtagccacattctgtatgctcttgatgctttttatttttattttttcaatcttggggatgcatctgttcggctgtaagttcgctagtgaaagggatggagacaccctgccagatcggaagaatttcgactcattattgtgggcaatcgtgaccgttttccaaatactcacccaggaagattggaacaaggtcctgtacaatggtatggcgtccacgtcaagctgggcggcactgtactttatcgcgctaatgacctttggaaactatgtgctcttcaacttgctcgttgcaatccttgtggagggatttcaagctgaggagatttctaaacgcgaagatgccagtggtcaactctcctgcatccagctgccagttgactcccagggcggtgacgccaacaagtcagagtctgagcccgactttttctcccccagtctcgatggcgacggagaccgcaagaagtgtctggcattggtctccctgggagagcatcctgagcttaggaaaagtctgctacccccactgattattcatactgccgctacccctatgtccctcccaaaatctactagcacaggattgggagaggcactaggcccagcatcccggcgaaccagtagctcagggagcgccgaaccgggagcagcacacgagatgaagtccccacccagcgcgcgttcttccccccattccccatggtccgcggcaagctcatggactagcaggaggagctcaaggaattcgctgggtagggcccctagccttaagcgcagatcaccctcaggagagcgtcgcagcctcctttctggcgaaggacaggaatcacaggatgaggaggaatcctccgaagaagagcgcgcatctccagcgggttccgatcacagacatcgcggatcccttgaacgtgaggcaaaatcaagcttcgacctccctgacaccttgcaggtacccggactgcaccggactgcctcagggcgagggagtgcctcagagcatcaggattgtaacggaaaatccgcctccggccgtttagccagagcattgagaccagacgacccaccgttagacggcgacgacgccgacgacgagggaaacctctctaagggggagcgggtgagggcctggattagagctcgactgcccgcatgctgtctggagcgcgatagttggagcgcctatatctttcccccacagtccagattccgcttgctgtgtcatcggataatcacccataaaatgttcgaccatgtcgtgctggtgattatattcttgaattgtatcactatagccatggagagacctaagatcgatccgcactcagccgaaaggatattcttgaccctcagcaactatattttcacagctgtgtttttggccgaaatgaccgtgaaagtggtcgccctgggatggtgttttggcgagcaggcataccttagaagtagctggaatgtgctcgacggactgctggtgcttattagtgttattgacattctagtctccatggtgtctgacagcggtaccaagatactcgggatgctgcgagttctccgcttgttacgcacactgcgaccattgcgcgtgatatccagggcccaggggctgaaactcgtggttgaaaccttgatgtcatcactaaaaccgatcggaaatatcgttgttatctgctgcgcatttttcatcatatttgggatcctgggcgttcagttattcaagggcaagttcttcgtctgtcagggtgaggacactaggaatattacaaacaagagtgactgtgcagaagcttcttaccggtgggttcggcataaatataattttgacaatctgggtcaggctctgatgagtctttttgtcttggctagtaaggacggatgggtagatattatgtacgacggcctggatgctgtgggagtcgaccagcagcccatcatgaaccataacccttggatgctcttgtacttcatcagctttctgctcattgtggccttttttgtgcttaatatgtttgtcggggttgtggtggagaatttccataagtgtagacagcaccaagaagaagaggaagctcggaggagagaggagaagaggctgaggcgactggagaaaaagcgacgctcaaaagagaagcaaatggctgaggcacagtgtaagccttactactccgactatagcagattccgactgctcgtgcaccacctctgcacctcgcactatctggatctgtttattaccggggtcattggcttgaacgtggtcaccatggccatggagcactaccaacagccccagattctcgatgaggcgctcaagatctgcaattatatctttactgtcatattcgtgctggagtctgtgttcaagctggtggctttcggctttcggcgtttcttccaggaccgatggaaccagttagacctcgccatagttcttctgagtataatgggaattacactggaggagattgaggtgaacgcaagtttaccaatcaatccgacaattatcagaatcatgagggttctgcggatcgcacgcgtattgaaattgctcaagatggcggtgggaatgagggcgctgctggacacggtcatgcaggctctgccacaagtggggaacctgggcctcctcttcatgctactgtttttcatcttcgcagccttgggagttgagttgtttggagatctggaatgcgacgagactcacccatgcgaaggactgggtcgccacgcaacattcaggaacttcggaatggcgtttctaactctgttccgggtgtctactggcgacaactggaacgggataatgaaggatactctacgggattgcgatcaggagagtacatgttacaatacagtcatatcccccatctactttgtctcctttgtcctcacggcgcaatttgtattagtcaacgttgtgattgcggtgcttatgaagcacctggaagaaagcaataaggaggctaaggaagaggccgagttggaggccgagctggagctagagatgaaaacactgtcacctcaaccacattcccctcttgggtcaccatttctctggcccggagtcgagggccctgactcacccgattctccaaaacccggagctttgcaccctgccgctcacgctcggtccgcctcgcactttagcctggaacatcctactgaccgacagttgtttgatacaatctcactactgatacagggcagtctcgaatgggagcttaagttaatggatgaattggctggcccagggggacagccatcagcctttccctcagccccatcgttaggcggatccgatccacagatgcagccccacccaactgagctgcctggcccagaccttctaaccgtgaggaagtccggagtctcgcggacccactcacttcctaatgatagctatatgtgtagacacggctccactgccgagggcccacttgggcaccggggttgggggctgcctaaggcccagtccggatctgtcttgagcgtgcattcccagcctgcagatacaagctacatcctgcagctgcccaaagacgccccacacctgttacagccccactctgcaccgacctggggcaccattcccaaactgcctccacctggacgtagccccttagcacagagaccactgcggaggcaggccgcaatacgcacggactcacttgatgtgcagggcctgggttctagagaggatctgttggcagaggtctccggccctagccctccgttagcccgtgcctattcattctggggccaatcctccactcaggctcagcaacacagtcggagtcattccaagatttccaagcatatgacgcctccagccccttgccccggacccgaacccaattggggaaaggggcctcctgaaacccgcagcagtttggaactggacacagaactttcctggattagcggcgatttactgcctccgggtggacaggaggagccaccgagtccaagggatttgaagaagtgctacagcgtcgaggcccaatcctgtcagaggaggccaacaagctggctggacgaacaacgccgtcactcaattgccgtgtcttgcctagactccgggagtcagccacatctggggaccgacccaagtaacctggggggtcagcctttaggcggaccaggatcccgtccaaaaaagaagctgtccccaccctccattactatcgaccctcctgagtctcagggccctcgcactccacccagccccggtatttgcctccggcgtcgtgcgccaagtagcgatagtaaggacccactcgccagcggccctcccgatagtatggccgctagtccatcccccaagaaagatgtgctttcgttgagtggcctgagcagcgacccagctgacctggacccata

SEQ ID NO: 259702 - DNA, 6981 bp, Artificial Sequence
  derived and/or modified sequence
atggacgaggaggaggatggagcgggcgccgaggagtcgggacagccccggagcttcatgcggctcaacgacctgtcgggggccgggggccggccggggccggggtcagcagaaaaggacccgggcagcgcggactccgaggcggaggggctgccgtacccggcgctggccccggtggttttcttctacttgagccaggacagccgcccgcggagctggtgtctccgcacggtctgtaacccctggtttgagcgcatcagcatgttggtcatccttctcaactgcgtgaccctgggcatgttccggccatgcgaggacatcgcctgtgactcccagcgctgccggatcctgcaggcctttgatgacttcatctttgccttctttgccgtggagatggtggtgaagatggtggccttgggcatctttgggaaaaagtgttacctgggagacacttggaaccggcttgactttttcatcgtcatcgcagggatgctggagtactcgctggacctgcagaacgtcagcttctcagctgtcaggacagtccgtgtgctgcgaccgctcagggccattaaccgggtgcccagcatgcgcatccttgtcacgttgctgctggatacgctgcccatgctgggcaacgtcctgctgctctgcttcttcgtcttcttcatcttcggcatcgtcggcgtccagctgtgggcagggctgcttcggaaccgatgcttcctacctgagaatttcagcctccccctgagcgtggacctggagcgctattaccagacagagaacgaggatgagagccccttcatctgctcccagccacgcgagaacggcatgcggtcctgcagaagcgtgcccacgctgcgcggggacgggggcggtggcccaccttgcggtctggactatgaggcctacaacagctccagcaacaccacctgtgtcaactggaaccagtactacaccaactgctcagcgggggagcacaaccccttcaagggcgccatcaactttgacaacattggctatgcctggatcgccatcttccaggtcatcacgctggagggctgggtcgacatcatgtactttgtgatggatgctcattccttctacaatttcatctacttcatcctcctcatcatcgtgggctccttcttcatgatcaacctgtgcctggtggtgattgccacgcagttctcagagaccaagcagcgggaaagccagctgatgcgggagcagcgtgtgcggttcctgtccaacgccagcaccctggctagcttctctgagcccggcagctgctatgaggagctgctcaagtacctggtgtacatccttcgtaaggcagcccgcaggctggctcaggtctctcgggcagcaggtgtgcgggttgggctgctcagcagcccagcacccctcgggggccaggagacccagcccagcagcagctgctctcgctcccaccgccgcctatccgtccaccacctggtgcaccaccaccaccaccatcaccaccactaccacctgggcaatgggacgctcagggccccccgggccagcccggagatccaggacagggatgccaatgggtcccgccggctcatgctgccaccaccctcgacgcctgccctctccggggccccccctggtggcgcagagtctgtgcacagcttctaccatgccgactgccacttagagccagtccgctgccaggcgccccctcccaggtccccatctgaggcatccggcaggactgtgggcagcgggaaggtgtatcccaccgtgcacaccagccctccaccggagacgctgaaggagaaggcactagtagaggtggctgccagctctgggcccccaaccctcaccagcctcaacatcccacccgggccctacagctccatgcacaagctgctggagacacagagtacaggtgcctgccaaagctcttgcaagatctccagcccttgcttgaaagcagacagtggagcctgtggtccagacagctgcccctactgtgcccgggccggggcaggggaggtggagctcgccgaccgtgaaatgcctgactcagacagcgaggcagtttatgagttcacacaggatgcccagcacagcgacctccgggacccccacagccggcggcaacggagcctgggcccagatgcagagcccagctctgtgctggccttctggaggctaatctgtgacaccttccgaaagattgtggacagcaagtactttggccggggaatcatgatcgccatcctggtcaacacactcagcatgggcatcgaataccacgagcagcccgaggagcttaccaacgccctagaaatcagcaacatcgtcttcaccagcctctttgccctggagatgctgctgaagctgcttgtgtatggtccctttggctacatcaagaatccctacaacatcttcgatggtgtcattgtggtcatcagcgtgtgggagatcgtgggccagcaggggggcggcctgtcggtgctgcggaccttccgcctgatgcgtgtgctgaagctggtgcgcttcctgccggcgctgcagcggcagctggtggtgctcatgaagaccatggacaacgtggccaccttctgcatgctgcttatgctcttcatcttcatcttcagcatcctgggcatgcatctcttcggctgcaagtttgcctctgagcgggatggggacaccctgccagaccggaagaattttgactccttgctctgggccatcgtcactgtctttcagatcctgacccaggaggactggaacaaagtcctctacaatggtatggcctccacgtcgtcctgggcggccctttatttcattgccctcatgaccttcggcaactacgtgctcttcaatttgctggtcgccattctggtggagggcttccaggcggaggaaatcagcaaacgggaagatgcgagtggacagttaagctgtattcagctgcctgtcgactcccaggggggagatgccaacaagtccgaatcagagcccgatttcttctcacccagcctggatggtgatggggacaggaagaagtgcttggccttggtgtccctgggagagcacccggagctgcggaagagcctgctgccgcctctcatcatccacacggccgccacacccatgtcgctgcccaagagcaccagcacgggcctgggcgaggcgctgggccctgcgtcgcgccgcaccagcagcagcgggtcggcagagcctggggcggcccacgagatgaagtcaccgcccagcgcccgcagctctccgcacagcccctggagcgctgcaagcagctggaccagcaggcgctccagccggaacagcctcggccgtgcacccagcctgaagcggagaagcccaagtggagagcggcggtccctgttgtcgggagaaggccaggagagccaggatgaagaggagagctcagaagaggagcgggccagccctgcgggcagtgaccatcgccacagggggtccctggagcgggaggccaagagttcctttgacctgccagacacactgcaggtgccagggctgcatcgcactgccagtggccgagggtctgcttctgagcaccaggactgcaatggcaagtcggcttcagggcgcctggcccgggccctgcggcctgatgaccccccactggatggggatgacgccgatgacgagggcaacctgagcaaaggggaacgggtccgcgcgtggatccgagcccgactccctgcctgctgcctcgagcgagactcctggtcagcctacatcttccctcctcagtccaggttccgcctcctgtgtcaccggatcatcacccacaagatgttcgaccacgtggtccttgtcatcatcttccttaactgcatcaccatcgccatggagcgccccaaaattgacccccacagcgctgaacgcatcttcctgaccctctccaattacatcttcaccgcagtctttctggctgaaatgacagtgaaggtggtggcactgggctggtgcttcggggagcaggcgtacctgcggagcagttggaacgtgctggacgggctgttggtgctcatctccgtcatcgacattctggtgtccatggtctctgacagcggcaccaagatcctgggcatgctgagggtgctgcggctgctgcggaccctgcgcccgctcagggtgatcagccgggcgcaggggctgaagctggtggtggagacgctgatgtcctcactgaaacccatcggcaacattgtagtcatctgctgtgccttcttcatcattttcggcatcttgggggtgcagctcttcaaagggaagtttttcgtgtgccagggcgaggataccaggaacatcaccaataaatcggactgtgccgaggccagttaccggtgggtccggcacaagtacaactttgacaaccttggccaggccctgatgtccctgttcgttttggcctccaaggatggttgggtggacatcatgtacgatgggctggatgctgtgggcgtggaccagcagcccatcatgaaccacaacccctggatgctgctgtacttcatctcgttcctgctcattgtggccttctttgtcctgaacatgtttgtgggtgtggtggtggagaacttccacaagtgtcggcagcaccaggaggaagaggaggcccggcggcgggaggagaagcgcctacgaagactggagaaaaagagaaggagtaaggagaagcagatggctgaagcccagtgcaaaccttactactccgactactcccgcttccggctcctcgtccaccacttgtgcaccagccactacctggacctcttcatcacaggtgtcatcgggctgaacgtggtcaccatggccatggagcactaccagcagccccagattctggatgaggctctgaagatctgcaactacatcttcactgtcatctttgtcttggagtcagttttcaaacttgtggcctttggtttccgtcggttcttccaggacaggtggaaccagctggacctggccattgtgctgctgtccatcatgggcatcacgctggaggaaatcgaggtcaacgcctcgctgcccatcaaccccaccatcatccgcatcatgagggtgctgcgcattgcccgagtgctgaagctgctgaagatggctgtgggcatgcgggcgctgctggacacggtgatgcaggccctgccccaggtggggaacctgggacttctcttcatgttgttgtttttcatctttgcagctctgggcgtggagctctttggagacctggagtgtgacgagacacacccctgtgagggcctgggccgtcatgccacctttcggaactttggcatggccttcctaaccctcttccgagtctccacaggtgacaattggaatggcattatgaaggacaccctccgggactgtgaccaggagtccacctgctacaacacggtcatctcgcctatctactttgtgtccttcgtgctgacggcccagttcgtgctagtcaacgtggtgatcgccgtgctgatgaagcacctggaggagagcaacaaggaggccaaggaggaggccgagctagaggctgagctggagctggagatgaagaccctcagcccccagccccactcgccactgggcagccccttcctctggcctggggtcgagggccccgacagccccgacagccccaagcctggggctctgcacccagcggcccacgcgagatcagcctcccacttttccctggagcaccccacggacaggcagctgtttgacaccatatccctgctgatccagggctccctggagtgggagctgaagctgatggacgagctggcaggcccagggggccagccctctgccttcccttctgcccccagcctgggaggctccgacccacagatgcagccccaccccacggagctgccaggaccagacttactgactgtgcggaagtctggggtcagccgaacgcactctctgcccaatgacagctacatgtgtcggcatgggagcactgccgaggggcccctgggacacaggggctgggggctccccaaagctcagtcaggctccgtcttgtccgttcactcccagccagcagataccagctacatcctgcagcttcccaaagatgcacctcatctgctccagccccacagcgccccaacctggggcaccatccccaaactgcccccaccaggacgctcccctttggctcagaggccactcaggcgccaggcagcaataaggactgactccttggacgttcagggtctgggcagccgggaagacctgctggcagaggtgagtgggccctccccgcccctggcccgggcctactctttctggggccagtcaagtacccaggcacagcagcactcccgcagccacagcaagatctccaagcacatgaccccgccagccccttgcccaggcccagaacccaactggggcaagggccctccagagaccagaagcagcttagagttggacacggagctgagctggatttcaggagacctcctgccccctggcggccaggaggagcccccatccccacgggacctgaagaagtgctacagcgtggaggcccagagctgccagcgccggcctacgtcctggctggatgagcagaggagacactctatcgccgtcagctgcctggacagcggctcccaaccccacctgggcacagacccctctaaccttgggggccagcctcttggggggcctgggagccggcccaagaaaaaactcagcccgcctagtatcaccatagacccccccgagagccaaggtcctcggaccccgcccagccctggtatctgcctccggaggagggctccgtccagcgactccaaggatcccttggcctctggcccccctgacagcatggctgcctcgccctccccaaagaaagatgtgctgagtctctccggtttatcctctgacccagcagacctggacccctgagtcctgccccacttt

SEQ ID NO: 259703 - protein, 255 aa, Artificial Sequence
  derived and/or modified sequence
MLDSVTHSTFLPNASFCDPLMSWTDLFSNEEYYPAFEHQTACDSYWTSVHPEYWTKRHVWEWLQFCCDQYKLDTNCISFCNFNISGLQLCSMTQEEFVEAAGLCGEYLYFILQNIRTQGYSFFNDAEESKATIKDYADSNCLKTSGIKSQDCHSHSRTSLQSSHLWEFVRDLLLSPEENCGILEWEDREQGIFRVVKSEALAKMWGQRKKNDRMTYEKLSRALRYYYKTGILERVDRRLVYKFGKNAHGWQEDKL

SEQ ID NO: 259704 - protein, 265 aa, Artificial Sequence
  derived and/or modified sequence
MPSLPHSHRVMLDSVTHSTFLPNASFCDPLMSWTDLFSNEEYYPAFEHQTACDSYWTSVHPEYWTKRHVWEWLQFCCDQYKLDTNCISFCNFNISGLQLCSMTQEEFVEAAGLCGEYLYFILQNIRTQGYSFFNDAEESKATIKDYADSNCLKTSGIKSQDCHSHSRTSLQSSHLWEFVRDLLLSPEENCGILEWEDREQGIFRVVKSEALAKMWGQRKKNDRMTYEKLSRALRYYYKTGILERVDRRLVYKFGKNAHGWQEDKL

SEQ ID NO: 259705 - DNA, 2317 bp, Artificial Sequence
  derived and/or modified sequence
cacaaggctacaggtgtctttatttccactgcacgctggtgctgggagcgcctgccttctcttgccttgaaagcctcctctttggacctagccaccgctgccctcacggtaatgttggactcggtgacacacagcaccttcctgcctaatgcatccttctgcgatcccctgatgtcgtggactgatctgttcagcaatgaagagtactaccctgcctttgagcatcagacagcctgtgactcatactggacatcagtccaccctgaatactggactaagcgccatgtgtgggagtggctccagttctgctgcgaccagtacaagttggacaccaattgcatctccttctgcaacttcaacatcagtggcctgcagctgtgcagcatgacacaggaggagttcgtcgaggcagctggcctctgcggcgagtacctgtacttcatcctccagaacatccgcacacaaggttactccttttttaatgacgctgaagaaagcaaggccaccatcaaagactatgctgattccaactgcttgaaaacaagtggcatcaaaagtcaagactgtcacagtcatagtagaacaagcctccaaagttctcatctatgggaatttgtacgagacctgcttctatctcctgaagaaaactgtggcattctggaatgggaagatagggaacaaggaatttttcgggtggttaaatcggaagccctggcaaagatgtggggacaaaggaagaaaaatgacagaatgacatatgaaaagttgagcagagccctgagatactactataaaacaggaattttggagcgggttgaccgaaggttagtgtacaaatttggaaaaaatgcacacgggtggcaggaagacaagctatgatctgctccaggcatcaagctcattttatggatttctgtcttttaaaacaatcagattgcaatagacattcgaaaggcttcattttcttctctttttttttaacctgcaaacatgctgataaaatttctccacatctcagcttacatttggattcagagttgttgtctacggagggtgagagcagaaactcttaagaaatcctttcttctccctaaggggatgaggggatgatcttttgtggtgtcttgatcaaactttattttcctagagttgtggaatgacaacagcccatgccattgatgctgatcagagaaaaactattcaattctgccattagagacacatccaatgctcccatcccaaaggttcaaaagttttcaaataactgtggcagctcaccaaaggtgggggaaagcatgattagtttgcaggttatggtaggagagggtgagatataagacatacatactttagattttaaattattaaagtcaaaaatccatagaaaagtatccctttttttttttttgagacgggttctcactatgttgcccagggctggtcttgaactcctatgctcaagtgatcctcccacctcggcctcccaaagtactgtgattacaagcgtgagccacggcacctgggcagaaaagtatcttaattaatgaaagagctaagccatcaagctgggacttaattggatttaacataggttcacagaaagtttcctaaccagagcatctttttgaccactcagcaaaacttccacagacatccttctggacttaaacacttaacattaaccacattattaattgttgctgagtttattcccccttctaactgatggctggcatctgatatgcagagttagtcaacagacactggcatcaattacaaaatcactgctgtttctgtgattcaagctgtcaacacaataaaatcgaaattcattgattccatctctggtccagatgttaaacgtttataaaaccggaaatgtcctaacaactctgtaatggcaaattaaattgtgtgtcttttttgttttgtctttctacctgatgtgtattcaagcgctataacacgtatttccttgacaaaaatagtgacagtgaattcacactaataaatgttcataggttaaagtctgcactgacattttctcatcaatcactggtatgtaagttatcagtgactgacagctaggtggactgcccctaggacttctgtttcaccagagcaggaatcaagtggtgaggcactgaatcgctgtacaggctgaagacctccttattagagttgaacttcaaagtaacttgttttaaaaaatgtgaattactgtaaaataatctattttggattcatgtgttttccaggtggatatagtttgtaaacaatgtgaataaagtatttaacatgtaaaaaaaaaaaaaaa

SEQ ID NO: 259706 - DNA, 798 bp, Artificial Sequence
  derived and/or modified sequence
atgcctagtcttccccacagccacagggtcatgttggacagtgttacccacagtacctttctgcctaacgcttctttctgcgatccactcatgagctggactgatttgttctctaacgaggaatattatcctgcctttgagcatcagacagcgtgcgactcatactggacatcagtccatccagaatattggacgaagagacacgtctgggaatggctgcagttctgctgcgaccagtataagctggacacaaactgcataagtttctgcaacttcaacattagcggattgcagctctgctctatgacccaggaagaattcgtggaggctgccggcctgtgcggcgagtacctgtactttattcttcaaaacattaggactcagggatactcatttttcaatgatgcagaagaaagtaaggccactattaaagattatgctgacagcaactgcctgaaaacctctggcatcaaatctcaagactgtcactctcattccagaacctctctgcaaagttctcacctgtgggagtttgtgagagacctgctgctttctcccgaagagaattgcggcattctggagtgggaggatagagagcagggaatctttcgtgtggtcaaatcagaggccctcgcgaagatgtgggggcagcggaagaagaatgacagaatgacatatgagaagctgtctagagccctgaggtactattataagactgggattctcgagagagtcgataggcggctagtgtacaagttcggaaagaatgcccatgggtggcaagaggacaaactgtag

SEQ ID NO: 259707 - DNA, 798 bp, Artificial Sequence
  derived and/or modified sequence
atgcccagcctgccccacagccaccgggtgatgctggacagcgtgacccacagcaccttcctgcccaatgccagcttctgtgaccccctgatgtcctggacagacctcttcagcaatgaggagtactacccagcctttgagcaccagacagcctgtgacagctactggacctctgtgcaccctgagtactggaccaagagacatgtgtgggagtggctgcagttctgctgtgaccagtacaagctggacaccaactgcatctccttctgcaacttcaacatcagcggcctgcagctgtgcagcatgacccaggaggagtttgtggaggccgccggcctgtgtggggagtacctgtacttcatcctgcagaacatccgcacccagggctacagcttcttcaatgatgctgaggagagcaaggccaccatcaaggactatgctgacagcaactgcctgaagaccagcggcatcaagagccaggactgccacagccacagcaggaccagcctgcagagcagccacctgtgggagtttgtgcgggacctgctgctgagccctgaggagaactgtggcatcctggagtgggaggaccgggagcagggcatcttccgggtggtgaagtctgaggccctggccaagatgtggggccagaggaagaagaatgacaggatgacctatgagaagctgagccgggccctgcgctactactacaagacaggcatcctggagcgggtggaccggcggctggtgtacaagtttgggaagaatgcccacggctggcaggaggacaagctgtag

SEQ ID NO: 259708 - DNA, 798 bp, Artificial Sequence
  derived and/or modified sequence
atgcccagcctgccccacagccaccgggtgatgctggacagcgtgacccattctaccttcttgcctaatgcctctttttgcgaccctctcatgagttggaccgacttattctctaatgaggaatactacccggcttttgagcaccagacagcctgtgactcttactggacaagcgtccaccccgaatactggaccaagagacatgtgtgggagtggctgcagttctgctgcgatcagtacaagctggatacaaactgcatctccttctgtaattttaatattagcggccttcagctctgcagtatgacacaggaggaatttgtggaggcggcgggcctgtgtggggagtacctgtacttcattctccagaatatcagaactcaggggtattcattcttcaatgacgcagaagagtccaaagcaaccatcaaggactatgccgatagcaactgcttaaagacaagtgggattaagagccaggactgccacagccacagcaggacaagtctccaaagctcccatctatgggaattcgtgcgggatctgttactgtcgcctgaggagaactgcgggattctggaatgggaggaccgggaacagggcatttttagggtggtgaagagcgaggccctggcaaaaatgtgggggcagagaaagaagaatgatcgcatgacctacgagaagctttccagggccctgagatattattataaaactggcatcctcgagagggtggatcggagactcgtctacaagttcggcaagaacgcccatggttggcaagaagataaactgtag

SEQ ID NO: 259709 - DNA, 798 bp, Artificial Sequence
  derived and/or modified sequence
atgccctcgctcccacatagccaccgagtgatgctcgatagcgtgacacactcaacttttctgccgaatgcttctttctgcgatccattaatgagctggaccgacctcttctcaaacgaggagtattacccagcttttgagcaccagacagcctgtgacagctactggacttccgtgcacccagagtactggactaagaggcacgtgtgggagtggctacagttctgctgtgatcagtataaactagatactaactgtatttccttttgtaactttaacatatcaggtctgcaactgtgttctatgactcaagaagagtttgttgaggctgccggtttgtgtggggaatacctgtactttattctacaaaacatccgcacccagggctacagcttctttaacgatgctgaagagagtaaagctaccatcaaagactacgccgactccaattgcttgaagacctctggcattaagtcacaggattgtcatagccactccaggacctctttgcagtcctcccacttatgggagttcgtgcgcgatctgttgctcagtcctgaagaaaactgcgggatcctggaatgggaagatagagaacaagggattttccgggttgtcaaatccgaagctcttgccaagatgtgggggcagcgcaagaagaatgatagaatgacttatgagaaactgtctcgggctctgcgttactactataagaccggcatcctagaaagggtggacagacgcctggtgtacaaattcggtaaaaatgcgcacggctggcaggaagataaattatag

SEQ ID NO: 259710 - DNA, 798 bp, Artificial Sequence
  derived and/or modified sequence
atgcccagcctgccccacagccacagagtgatgctggacagcgtgacccacagcaccttcctgcccaacgccagcttctgcgaccccctgatgagctggaccgacctgttcagcaacgaggagtactaccccgccttcgagcaccagaccgcctgcgacagctactggaccagcgtgcaccccgagtactggaccaagagacacgtgtgggagtggctgcagttctgctgcgaccagtacaagctggacaccaactgcatcagcttctgcaacttcaacatcagcggcctgcagctgtgcagcatgacccaggaggagttcgtggaggccgccggcctgtgcggcgagtacctgtacttcatcctgcagaacatcagaacccagggctacagcttcttcaacgacgccgaggagagcaaggccaccatcaaggactacgccgacagcaactgcctgaagaccagcggcatcaagagccaggactgccacagccacagcagaaccagcctgcagagcagccacctgtgggagttcgtgagagacctgctgctgagccccgaggagaactgcggcatcctggagtgggaggacagagagcagggcatcttcagagtggtgaagagcgaggccctggccaagatgtggggccagagaaagaagaacgacagaatgacctacgagaagctgagcagagccctgagatactactacaagaccggcatcctggagagagtggacagaagactggtgtacaagttcggcaagaacgcccacggctggcaggaggacaagctgtag

SEQ ID NO: 259711 - DNA, 2321 bp, Artificial Sequence
  derived and/or modified sequence
gtaggtgtcacttatatcacaaggctacaggtgtctttatttccactgcacgctggtgctgggagcgcctgccttctcttgccttgaaagcctcctctttggacctagccaccgctgccctcacggtaatgttggactcggtgacacacagcaccttcctgcctaatgcatccttctgcgatcccctgatgtcgtggactgatctgttcagcaatgaagagtactaccctgcctttgagcatcagacagcctgtgactcatactggacatcagtccaccctgaatactggactaagcgccatgtgtgggagtggctccagttctgctgcgaccagtacaagttggacaccaattgcatctccttctgcaacttcaacatcagtggcctgcagctgtgcagcatgacacaggaggagttcgtcgaggcagctggcctctgcggcgagtacctgtacttcatcctccagaacatccgcacacaaggttactccttttttaatgacgctgaagaaagcaaggccaccatcaaagactatgctgattccaactgcttgaaaacaagtggcatcaaaagtcaagactgtcacagtcatagtagaacaagcctccaaagttctcatctatgggaatttgtacgagacctgcttctatctcctgaagaaaactgtggcattctggaatgggaagatagggaacaaggaatttttcgggtggttaaatcggaagccctggcaaagatgtggggacaaaggaagaaaaatgacagaatgacatatgaaaagttgagcagagccctgagatactactataaaacaggaattttggagcgggttgaccgaaggttagtgtacaaatttggaaaaaatgcacacgggtggcaggaagacaagctatgatctgctccaggcatcaagctcattttatggatttctgtcttttaaaacaatcagattgcaatagacattcgaaaggcttcattttcttctctttttttttaacctgcaaacatgctgataaaatttctccacatctcagcttacatttggattcagagttgttgtctatggagggtgagagcagaaactcttaagaaatcctttcttctccctaaggggatgaggggatgatcttttgtggtgtcttgatcaaactttattttcctagagttgtggaatgacaacagcccatgccattgatgctgatcagagaaaaactattcaattctgccattagagacacatccaatgctcccatcccaaaggttcaaaagttttcaaataactgtggcagctcaccaaaggtgggggaaagcatgattagtttgcaggttatggtaggagagggtgagatataagacatacatactttagattttaaattattaaagtcaaaaatccatagaaaagtatccctttttttttttttgagacgggttctcactatgttgcccagggctggtcttgaactcctatgctcaagtgatcctcccacctcagcctcccaaagtactgtgattacaagcgtgagccacggcacctgggcagaaaagtatcttaattaatgaaagagctaagccatcaagctgggacttaattggatttaacataggttcacagaaagtttcctaaccagagcatctttttgaccactcagcaaaacttccacagacatccttctggacttaaacacttaacattaaccacattattaattgttgctgagtttattcccccttctaactgatggctggcatctgatatgcagagttagtcaacagacactggcatcaattacaaaatcactgctgtttctgtgattcaagctgtcaacacaataaaatcgaaattcattgattccatctcaggtccagatgttaaacgtttataaaaccggaaatgtcctaacaactctgtaatggcaaattaaattgtgtgtcttttttgttttgtctttctacctgatgtgtattcaagcgctataacacgtatttccttgacaaaaatagtgacagtgaattcacactaataaatgttcataggttaaagtctgcactgacattttctcatcaatcactggtatgtaagttatcagtgactgacagctaggtggactgcccctaggacttctgtttcaccagagcaggaatcaagtggtgaggcactgaatcgctgtacaggctgaagacctccttattagagttgaacttcaaagtaacttgttttaaaaaatatgaattactgtaaaataatctattttggattcatgtgttttccaggtggatatagtttgtaaacaatgtgaataaagtatttaacatgttc

SEQ ID NO: 259712 - DNA, 2450 bp, Artificial Sequence
  derived and/or modified sequence
ggctgagtggtttgctccttcccctctctctgggaggctgagcaggggtgccgggttgctcaggccatgggagccacacctgttattgctgcctctgatttgtgtgacactgagaagcccacaggcctgtccctccaactcggtggaccctctctgtgtgcatttggtgtgtgagccagctctgagaagggttcagaagccactggaggcatctggggacctcagcttccatgccatctctgcctcactcccacagggtaatgttggactcggtgacacacagcaccttcctgcctaatgcatccttctgcgatcccctgatgtcgtggactgatctgttcagcaatgaagagtactaccctgcctttgagcatcagacagcctgtgactcatactggacatcagtccaccctgaatactggactaagcgccatgtgtgggagtggctccagttctgctgcgaccagtacaagttggacaccaattgcatctccttctgcaacttcaacatcagtggcctgcagctgtgcagcatgacacaggaggagttcgtcgaggcagctggcctctgcggcgagtacctgtacttcatcctccagaacatccgcacacaaggttactccttttttaatgacgctgaagaaagcaaggccaccatcaaagactatgctgattccaactgcttgaaaacaagtggcatcaaaagtcaagactgtcacagtcatagtagaacaagcctccaaagttctcatctatgggaatttgtacgagacctgcttctatctcctgaagaaaactgtggcattctggaatgggaagatagggaacaaggaatttttcgggtggttaaatcggaagccctggcaaagatgtggggacaaaggaagaaaaatgacagaatgacatatgaaaagttgagcagagccctgagatactactataaaacaggaattttggagcgggttgaccgaaggttagtgtacaaatttggaaaaaatgcacacgggtggcaggaagacaagctatgatctgctccaggcatcaagctcattttatggatttctgtcttttaaaacaatcagattgcaatagacattcgaaaggcttcattttcttctctttttttttaacctgcaaacatgctgataaaatttctccacatctcagcttacatttggattcagagttgttgtctatggagggtgagagcagaaactcttaagaaatcctttcttctccctaaggggatgaggggatgatcttttgtggtgtcttgatcaaactttattttcctagagttgtggaatgacaacagcccatgccattgatgctgatcagagaaaaactattcaattctgccattagagacacatccaatgctcccatcccaaaggttcaaaagttttcaaataactgtggcagctcaccaaaggtgggggaaagcatgattagtttgcaggttatggtaggagagggtgagatataagacatacatactttagattttaaattattaaagtcaaaaatccatagaaaagtatccctttttttttttttgagacgggttctcactatgttgcccagggctggtcttgaactcctatgctcaagtgatcctcccacctcagcctcccaaagtactgtgattacaagcgtgagccacggcacctgggcagaaaagtatcttaattaatgaaagagctaagccatcaagctgggacttaattggatttaacataggttcacagaaagtttcctaaccagagcatctttttgaccactcagcaaaacttccacagacatccttctggacttaaacacttaacattaaccacattattaattgttgctgagtttattcccccttctaactgatggctggcatctgatatgcagagttagtcaacagacactggcatcaattacaaaatcactgctgtttctgtgattcaagctgtcaacacaataaaatcgaaattcattgattccatctcaggtccagatgttaaacgtttataaaaccggaaatgtcctaacaactctgtaatggcaaattaaattgtgtgtcttttttgttttgtctttctacctgatgtgtattcaagcgctataacacgtatttccttgacaaaaatagtgacagtgaattcacactaataaatgttcataggttaaagtctgcactgacattttctcatcaatcactggtatgtaagttatcagtgactgacagctaggtggactgcccctaggacttctgtttcaccagagcaggaatcaagtggtgaggcactgaatcgctgtacaggctgaagacctccttattagagttgaacttcaaagtaacttgttttaaaaaatatgaattactgtaaaataatctattttggattcatgtgttttccaggtggatatagtttgtaaacaatgtgaataaagtatttaacatg

SEQ ID NO: 259713 - protein, 2261 aa, Artificial Sequence
  derived and/or modified sequence
MDEEEDGAGAEESGQPRSFMRLNDLSGAGGRPGPGSAEKDPGSADSEAEGLPYPALAPVVFFYLSQDSRPRSWCLRTVCNPWFERISMLVILLNCVTLGMFRPCEDIACDSQRCRILQAFDDFIFAFFAVEMVVKMVALGIFGKKCYLGDTWNRLDFFIVIAGMLEYSLDLQNVSFSAVRTVRVLRPLRAINRVPSMRILVTLLLDTLPMLGNVLLLCFFVFFIFGIVGVQLWAGLLRNRCFLPENFSLPLSVDLERYYQTENEDESPFICSQPRENGMRSCRSVPTLRGDGGGGPPCGLDYEAYNSSSNTTCVNWNQYYTNCSAGEHNPFKGAINFDNIGYAWIAIFQVITLEGWVDIMYFVMDAHSFYNFIYFILLIIVGSFFMINLCLVVIATQFSETKQRESQLMREQRVRFLSNASTLASFSEPGSCYEELLKYLVYILRKAARRLAQVSRAAGVRVGLLSSPAPLGGQETQPSSSCSRSHRRLSVHHLVHHHHHHHHHYHLGNGTLRAPRASPEIQDRDANGSRRLMLPPPSTPALSGAPPGGAESVHSFYHADCHLEPVRCQAPPPRSPSEASGRTVGSGKVYPTVHTSPPPETLKEKALVEVAASSGPPTLTSLNIPPGPYSSMHKLLETQSTGACQSSCKISSPCLKADSGACGPDSCPYCARAGAGEVELADREMPDSDSEAVYEFTQDAQHSDLRDPHSRRQRSLGPDAEPSSVLAFWRLICDTFRKIVDSKYFGRGIMIAILVNTLSMGIEYHEQPEELTNALEISNIVFTSLFALEMLLKLLVYGPFGYIKNPYNIFDGVIVVISVWEIVGQQGGGLSVLRTFRLMRVLKLVRFLPALQRQLVVLMKTMDNVATFCMLLMLFIFIFSILGMHLFGCKFASERDGDTLPDRKNFDSLLWAIVTVFQILTQEDWNKVLYNGMASTSSWAALYFIALMTFGNYVLFNLLVAILVEGFQAEGDANKSESEPDFFSPSLDGDGDRKKCLALVSLGEHPELRKSLLPPLIIHTAATPMSLPKSTSTGLGEALGPASRRTSSSGSAEPGAAHEMKSPPSARSSPHSPWSAASSWTSRRSSRNSLGRAPSLKRRSPSGERRSLLSGEGQESQDEEESSEEERASPAGSDHRHRGSLEREAKSSFDLPDTLQVPGLHRTASGRGSASEHQDCNGKSASGRLARALRPDDPPLDGDDADDEGNLSKGERVRAWIRARLPACCLERDSWSAYIFPPQSRFRLLCHRIITHKMFDHVVLVIIFLNCITIAMERPKIDPHSAERIFLTLSNYIFTAVFLAEMTVKVVALGWCFGEQAYLRSSWNVLDGLLVLISVIDILVSMVSDSGTKILGMLRVLRLLRTLRPLRVISRAQGLKLVVETLMSSLKPIGNIVVICCAFFIIFGILGVQLFKGKFFVCQGEDTRNITNKSDCAEASYRWVRHKYNFDNLGQALMSLFVLASKDGWVDIMYDGLDAVGVDQQPIMNHNPWMLLYFISFLLIVAFFVLNMFVGVVVENFHKCRQHQEEEEARRREEKRLRRLEKKRRNLMLDDVIASGSSASAASEAQCKPYYSDYSRFRLLVHHLCTSHYLDLFITGVIGLNVVTMAMEHYQQPQILDEALKICNYIFTVIFVLESVFKLVAFGFRRFFQDRWNQLDLAIVLLSIMGITLEEIEVNASLPINPTIIRIMRVLRIARVLKLLKMAVGMRALLDTVMQALPQVGNLGLLFMLLFFIFAALGVELFGDLECDETHPCEGLGRHATFRNFGMAFLTLFRVSTGDNWNGIMKDTLRDCDQESTCYNTVISPIYFVSFVLTAQFVLVNVVIAVLMKHLEESNKEAKEEAELEAELELEMKTLSPQPHSPLGSPFLWPGVEGPDSPDSPKPGALHPAAHARSASHFSLEHPTMQPHPTELPGPDLLTVRKSGVSRTHSLPNDSYMCRHGSTAEGPLGHRGWGLPKAQSGSVLSVHSQPADTSYILQLPKDAPHLLQPHSAPTWGTIPKLPPPGRSPLAQRPLRRQAAIRTDSLDVQGLGSREDLLAEVSGPSPPLARAYSFWGQSSTQAQQHSRSHSKISKHMTPPAPCPGPEPNWGKGPPETRSSLELDTELSWISGDLLPPGGQEEPPSPRDLKKCYSVEAQSCQRRPTSWLDEQRRHSIAVSCLDSGSQPHLGTDPSNLGGQPLGGPGSRPKKKLSPPSITIDPPESQGPRTPPSPGICLRRRAPSSDSKDPLASGPPDSMAASPSPKKDVLSLSGLSSDPADLDP

SEQ ID NO: 259714 - DNA, 6786 bp, Artificial Sequence
  derived and/or modified sequence
atggacgaggaggaggacggcgccggcgccgaggagagcggccagcccagaagcttcatgagactgaacgacctgagcggcgccggcggcagacccggccccggcagcgccgagaaggaccccggcagcgccgacagcgaggccgagggcctgccctaccccgccctggcccccgtggtgttcttctacctgagccaggacagcagacccagaagctggtgcctgagaaccgtgtgcaacccctggttcgagagaatcagcatgctggtgatcctgctgaactgcgtgaccctgggcatgttcagaccctgcgaggacatcgcctgcgacagccagagatgcagaatcctgcaggccttcgacgacttcatcttcgccttcttcgccgtggagatggtggtgaagatggtggccctgggcatcttcggcaagaagtgctacctgggcgacacctggaacagactggacttcttcatcgtgatcgccggcatgctggagtacagcctggacctgcagaacgtgagcttcagcgccgtgagaaccgtgagagtgctgagacccctgagagccatcaacagagtgcccagcatgagaatcctggtgaccctgctgctggacaccctgcccatgctgggcaacgtgctgctgctgtgcttcttcgtgttcttcatcttcggcatcgtgggcgtgcagctgtgggccggcctgctgagaaacagatgcttcctgcccgagaacttcagcctgcccctgagcgtggacctggagagatactaccagaccgagaacgaggacgagagccccttcatctgcagccagcccagagagaacggcatgagaagctgcagaagcgtgcccaccctgagaggcgacggcggcggcggccccccctgcggcctggactacgaggcctacaacagcagcagcaacaccacctgcgtgaactggaaccagtactacaccaactgcagcgccggcgagcacaaccccttcaagggcgccatcaacttcgacaacatcggctacgcctggatcgccatcttccaggtgatcaccctggagggctgggtggacatcatgtacttcgtgatggacgcccacagcttctacaacttcatctacttcatcctgctgatcatcgtgggcagcttcttcatgatcaacctgtgcctggtggtgatcgccacccagttcagcgagaccaagcagagagagagccagctgatgagagagcagagagtgagattcctgagcaacgccagcaccctggccagcttcagcgagcccggcagctgctacgaggagctgctgaagtacctggtgtacatcctgagaaaggccgccagaagactggcccaggtgagcagagccgccggcgtgagagtgggcctgctgagcagccccgcccccctgggcggccaggagacccagcccagcagcagctgcagcagaagccacagaagactgagcgtgcaccacctggtgcaccaccaccaccaccaccaccaccactaccacctgggcaacggcaccctgagagcccccagagccagccccgagatccaggacagagacgccaacggcagcagaagactgatgctgcccccccccagcacccccgccctgagcggcgccccccccggcggcgccgagagcgtgcacagcttctaccacgccgactgccacctggagcccgtgagatgccaggcccccccccccagaagccccagcgaggccagcggcagaaccgtgggcagcggcaaggtgtaccccaccgtgcacaccagccccccccccgagaccctgaaggagaaggccctggtggaggtggccgccagcagcggcccccccaccctgaccagcctgaacatcccccccggcccctacagcagcatgcacaagctgctggagacccagagcaccggcgcctgccagagcagctgcaagatcagcagcccctgcctgaaggccgacagcggcgcctgcggccccgacagctgcccctactgcgccagagccggcgccggcgaggtggagctggccgacagagagatgcccgacagcgacagcgaggccgtgtacgagttcacccaggacgcccagcacagcgacctgagagacccccacagcagaagacagagaagcctgggccccgacgccgagcccagcagcgtgctggccttctggagactgatctgcgacaccttcagaaagatcgtggacagcaagtacttcggcagaggcatcatgatcgccatcctggtgaacaccctgagcatgggcatcgagtaccacgagcagcccgaggagctgaccaacgccctggagatcagcaacatcgtgttcaccagcctgttcgccctggagatgctgctgaagctgctggtgtacggccccttcggctacatcaagaacccctacaacatcttcgacggcgtgatcgtggtgatcagcgtgtgggagatcgtgggccagcagggcggcggcctgagcgtgctgagaaccttcagactgatgagagtgctgaagctggtgagattcctgcccgccctgcagagacagctggtggtgctgatgaagaccatggacaacgtggccaccttctgcatgctgctgatgctgttcatcttcatcttcagcatcctgggcatgcacctgttcggctgcaagttcgccagcgagagagacggcgacaccctgcccgacagaaagaacttcgacagcctgctgtgggccatcgtgaccgtgttccagatcctgacccaggaggactggaacaaggtgctgtacaacggcatggccagcaccagcagctgggccgccctgtacttcatcgccctgatgaccttcggcaactacgtgctgttcaacctgctggtggccatcctggtggagggcttccaggccgagggcgacgccaacaagagcgagagcgagcccgacttcttcagccccagcctggacggcgacggcgacagaaagaagtgcctggccctggtgagcctgggcgagcaccccgagctgagaaagagcctgctgccccccctgatcatccacaccgccgccacccccatgagcctgcccaagagcaccagcaccggcctgggcgaggccctgggccccgccagcagaagaaccagcagcagcggcagcgccgagcccggcgccgcccacgagatgaagagcccccccagcgccagaagcagcccccacagcccctggagcgccgccagcagctggaccagcagaagaagcagcagaaacagcctgggcagagcccccagcctgaagagaagaagccccagcggcgagagaagaagcctgctgagcggcgagggccaggagagccaggacgaggaggagagcagcgaggaggagagagccagccccgccggcagcgaccacagacacagaggcagcctggagagagaggccaagagcagcttcgacctgcccgacaccctgcaggtgcccggcctgcacagaaccgccagcggcagaggcagcgccagcgagcaccaggactgcaacggcaagagcgccagcggcagactggccagagccctgagacccgacgacccccccctggacggcgacgacgccgacgacgagggcaacctgagcaagggcgagagagtgagagcctggatcagagccagactgcccgcctgctgcctggagagagacagctggagcgcctacatcttccccccccagagcagattcagactgctgtgccacagaatcatcacccacaagatgttcgaccacgtggtgctggtgatcatcttcctgaactgcatcaccatcgccatggagagacccaagatcgacccccacagcgccgagagaatcttcctgaccctgagcaactacatcttcaccgccgtgttcctggccgagatgaccgtgaaggtggtggccctgggctggtgcttcggcgagcaggcctacctgagaagcagctggaacgtgctggacggcctgctggtgctgatcagcgtgatcgacatcctggtgagcatggtgagcgacagcggcaccaagatcctgggcatgctgagagtgctgagactgctgagaaccctgagacccctgagagtgatcagcagagcccagggcctgaagctggtggtggagaccctgatgagcagcctgaagcccatcggcaacatcgtggtgatctgctgcgccttcttcatcatcttcggcatcctgggcgtgcagctgttcaagggcaagttcttcgtgtgccagggcgaggacaccagaaacatcaccaacaagagcgactgcgccgaggccagctacagatgggtgagacacaagtacaacttcgacaacctgggccaggccctgatgagcctgttcgtgctggccagcaaggacggctgggtggacatcatgtacgacggcctggacgccgtgggcgtggaccagcagcccatcatgaaccacaacccctggatgctgctgtacttcatcagcttcctgctgatcgtggccttcttcgtgctgaacatgttcgtgggcgtggtggtggagaacttccacaagtgcagacagcaccaggaggaggaggaggccagaagaagagaggagaagagactgagaagactggagaagaagagaagaaacctgatgctggacgacgtgatcgccagcggcagcagcgccagcgccgccagcgaggcccagtgcaagccctactacagcgactacagcagattcagactgctggtgcaccacctgtgcaccagccactacctggacctgttcatcaccggcgtgatcggcctgaacgtggtgaccatggccatggagcactaccagcagccccagatcctggacgaggccctgaagatctgcaactacatcttcaccgtgatcttcgtgctggagagcgtgttcaagctggtggccttcggcttcagaagattcttccaggacagatggaaccagctggacctggccatcgtgctgctgagcatcatgggcatcaccctggaggagatcgaggtgaacgccagcctgcccatcaaccccaccatcatcagaatcatgagagtgctgagaatcgccagagtgctgaagctgctgaagatggccgtgggcatgagagccctgctggacaccgtgatgcaggccctgccccaggtgggcaacctgggcctgctgttcatgctgctgttcttcatcttcgccgccctgggcgtggagctgttcggcgacctggagtgcgacgagacccacccctgcgagggcctgggcagacacgccaccttcagaaacttcggcatggccttcctgaccctgttcagagtgagcaccggcgacaactggaacggcatcatgaaggacaccctgagagactgcgaccaggagagcacctgctacaacaccgtgatcagccccatctacttcgtgagcttcgtgctgaccgcccagttcgtgctggtgaacgtggtgatcgccgtgctgatgaagcacctggaggagagcaacaaggaggccaaggaggaggccgagctggaggccgagctggagctggagatgaagaccctgagcccccagccccacagccccctgggcagccccttcctgtggcccggcgtggagggccccgacagccccgacagccccaagcccggcgccctgcaccccgccgcccacgccagaagcgccagccacttcagcctggagcaccccaccatgcagccccaccccaccgagctgcccggccccgacctgctgaccgtgagaaagagcggcgtgagcagaacccacagcctgcccaacgacagctacatgtgcagacacggcagcaccgccgagggccccctgggccacagaggctggggcctgcccaaggcccagagcggcagcgtgctgagcgtgcacagccagcccgccgacaccagctacatcctgcagctgcccaaggacgccccccacctgctgcagccccacagcgcccccacctggggcaccatccccaagctgcccccccccggcagaagccccctggcccagagacccctgagaagacaggccgccatcagaaccgacagcctggacgtgcagggcctgggcagcagagaggacctgctggccgaggtgagcggccccagcccccccctggccagagcctacagcttctggggccagagcagcacccaggcccagcagcacagcagaagccacagcaagatcagcaagcacatgaccccccccgccccctgccccggccccgagcccaactggggcaagggcccccccgagaccagaagcagcctggagctggacaccgagctgagctggatcagcggcgacctgctgccccccggcggccaggaggagccccccagccccagagacctgaagaagtgctacagcgtggaggcccagagctgccagagaagacccaccagctggctggacgagcagagaagacacagcatcgccgtgagctgcctggacagcggcagccagccccacctgggcaccgaccccagcaacctgggcggccagcccctgggcggccccggcagcagacccaagaagaagctgagcccccccagcatcaccatcgacccccccgagagccagggccccagaaccccccccagccccggcatctgcctgagaagaagagcccccagcagcgacagcaaggaccccctggccagcggcccccccgacagcatggccgccagccccagccccaagaaggacgtgctgagcctgagcggcctgagcagcgaccccgccgacctggacccctag

SEQ ID NO: 259715 - DNA, 5262 bp, Artificial Sequence
  derived and/or modified sequence
atggacgaggaggaggacggcgccggcgccgaggagagcggccagcccagaagcttcatgagactgaacgacctgagcggcgccggcggcagacccggccccggcagcgccgagaaggaccccggcagcgccgacagcgaggccgagggcctgccctaccccgccctggcccccgtggtgttcttctacctgagccaggacagcagacccagaagctggtgcctgagaaccgtgtgcaacccctggttcgagagaatcagcatgctggtgatcctgctgaactgcgtgaccctgggcatgttcagaccctgcgaggacatcgcctgcgacagccagagatgcagaatcctgcaggccttcgacgacttcatcttcgccttcttcgccgtggagatggtggtgaagatggtggccctgggcatcttcggcaagaagtgctacctgggcgacacctggaacagactggacttcttcatcgtgatcgccggcatgctggagtacagcctggacctgcagaacgtgagcttcagcgccgtgagaaccgtgagagtgctgagacccctgagagccatcaacagagtgcccagcatgagaatcctggtgaccctgctgctggacaccctgcccatgctgggcaacgtgctgctgctgtgcttcttcgtgttcttcatcttcggcatcgtgggcgtgcagctgtgggccggcctgctgagaaacagatgcttcctgcccgagaacttcagcctgcccctgagcgtggacctggagagatactaccagaccgagaacgaggacgagagccccttcatctgcagccagcccagagagaacggcatgagaagctgcagaagcgtgcccaccctgagaggcgacggcggcggcggccccccctgcggcctggactacgaggcctacaacagcagcagcaacaccacctgcgtgaactggaaccagtactacaccaactgcagcgccggcgagcacaaccccttcaagggcgccatcaacttcgacaacatcggctacgcctggatcgccatcttccaggtgatcaccctggagggctgggtggacatcatgtacttcgtgatggacgcccacagcttctacaacttcatctacttcatcctgctgatcatcgtgggcagcttcttcatgatcaacctgtgcctggtggtgatcgccacccagttcagcgagaccaagcagagagagagccagctgatgagagagcagagagtgagattcctgagcaacgccagcaccctggccagcttcagcgagcccggcagctgctacgaggagctgctgaagtacctggtgtacatcctgagaaaggccgccagaagactggcccaggtgagcagagccgccggcgtgagagtgggcctgctgagcagccccgcccccctgggcggccaggagacccagcccagcagcagctgcagcagaagccacagaagactgagcgtgcaccacctggtgcaccaccaccaccaccaccaccaccactaccacctgggcaacggcaccctgagagcccccagagccagccccgagatccaggacagagacgccaacggcagcagaagactgatgctgcccccccccagcacccccgccctgagcggcgccccccccggcggcgccgagagcgtgcacagcttctaccacgccgactgccacctggagcccgtgagatgccaggcccccccccccagaagccccagcgaggccagcggcagaaccgtgggcagcggcaaggtgtaccccaccgtgcacaccagccccccccccgagaccctgaaggagaaggccctggtggaggtggccgccagcagcggcccccccaccctgaccagcctgaacatcccccccggcccctacagcagcatgcacaagctgctggagacccagagcaccggcgcctgccagagcagctgcaagatcagcagcccctgcctgaaggccgacagcggcgcctgcggccccgacagctgcccctactgcgccagagccggcgccggcgaggtggagctggccgacagagagatgcccgacagcgacagcgaggccgtgtacgagttcacccaggacgcccagcacagcgacctgagagacccccacagcagaagacagagaagcctgggccccgacgccgagcccagcagcgtgctggccttctggagactgatctgcgacaccttcagaaagatcgtggacagcaagtacttcggcagaggcatcatgatcgccatcctggtgaacaccctgagcatgggcatcgagtaccacgagcagcccgaggagctgaccaacgccctggagatcagcaacatcgtgttcaccagcctgttcgccctggagatgctgctgaagctgctggtgtacggccccttcggctacatcaagaacccctacaacatcttcgacggcgtgatcgtggtgatcagcgtgtgggagatcgtgggccagcagggcggcggcctgagcgtgctgagaaccttcagactgatgagagtgctgaagctggtgagattcctgcccgccctgcagagacagctggtggtgctgatgaagaccatggacaacgtggccaccttctgcatgctgctgatgctgttcatcttcatcttcagcatcctgggcatgcacctgttcggctgcaagttcgccagcgagagagacggcgacaccctgcccgacagaaagaacttcgacagcctgctgtgggccatcgtgaccgtgttccagatcctgacccaggaggactggaacaaggtgctgtacaacggcatggccagcaccagcagctgggccgccctgtacttcatcgccctgatgaccttcggcaactacgtgctgttcaacctgctggtggccatcctggtggagggcttccaggccgagggcgacgccaacaagagcgagagcgagcccgacttcttcagccccagcctggacggcgacggcgacagaaagaagtgcctggccctggtgagcctgggcgagcaccccgagctgagaaagagcctgctgccccccctgatcatccacaccgccgccacccccatgagcctgcccaagagcaccagcaccggcctgggcgaggccctgggccccgccagcagaagaaccagcagcagcggcagcgccgagcccggcgccgcccacgagatgaagagcccccccagcgccagaagcagcccccacagcccctggagcgccgccagcagctggaccagcagaagaagcagcagaaacagcctgggcagagcccccagcctgaagagaagaagccccagcggcgagagaagaagcctgctgagcggcgagggccaggagagccaggacgaggaggagagcagcgaggaggagagagccagccccgccggcagcgaccacagacacagaggcagcctggagagagaggccaagagcagcttcgacctgcccgacaccctgcaggtgcccggcctgcacagaaccgccagcggcagaggcagcgccagcgagcaccaggactgcaacggcaagagcgccagcggcagactggccagagccctgagacccgacgacccccccctggacggcgacgacgccgacgacgagggcaacctgagcaagggcgagagagtgagagcctggatcagagccagactgcccgcctgctgcctggagagagacagctggagcgcctacatcttccccccccagagcagattcagactgctgtgccacagaatcatcacccacaagatgttcgaccacgtggtgctggtgatcatcttcctgaactgcatcaccatcgccatggagagacccaagatcgacccccacagcgccgagagaatcttcctgaccctgagcaactacatcttcaccgccgtgttcctggccgagatgaccgtgaaggtggtggccctgggctggtgcttcggcgagcaggcctacctgagaagcagctggaacgtgctggacggcctgctggtgctgatcagcgtgatcgacatcctggtgagcatggtgagcgacagcggcaccaagatcctgggcatgctgagagtgctgagactgctgagaaccctgagacccctgagagtgatcagcagagcccagggcctgaagctggtggtggagaccctgatgagcagcctgaagcccatcggcaacatcgtggtgatctgctgcgccttcttcatcatcttcggcatcctgggcgtgcagctgttcaagggcaagttcttcgtgtgccagggcgaggacaccagaaacatcaccaacaagagcgactgcgccgaggccagctacagatgggtgagacacaagtacaacttcgacaacctgggccaggccctgatgagcctgttcgtgctggccagcaaggacggctgggtggacatcatgtacgacggcctggacgccgtgggcgtggaccagcagcccatcatgaaccacaacccctggatgctgctgtacttcatcagcttcctgctgatcgtggccttcttcgtgctgaacatgttcgtgggcgtggtggtggagaacttccacaagtgcagacagcaccaggaggaggaggaggccagaagaagagaggagaagagactgagaagactggagaagaagagaagaaacctgatgctggacgacgtgatcgccagcggcagcagcgccagcgccgccagcgaggcccagtgcaagccctactacagcgactacagcagattcagactgctggtgcaccacctgtgcaccagccactacctggacctgttcatcaccggcgtgatcggcctgaacgtggtgaccatggccatggagcactaccagcagccccagatcctggacgaggccctgaagatctgcaactacatcttcaccgtgatcttcgtgctggagagcgtgttcaagctggtggccttcggcttcagaagattcttccaggacagatggaaccagctggacctggccatcgtgctgctgagcatcatgggcatcaccctggaggagatcgaggtgaacgccagcctgcccatcaaccccaccatcatcagaatcatgagagtgctgagaatcgccagagtgctgaagctgctgaagatggccgtgggcatgagagccctgctggacaccgtgatgcaggccctgccccagctgtgggcctggagcagcctggagacctggagcgtgaccagacacacccccgtgagagcctgggccgtgatgccccccttcggcaccctggcctggcccagctag

SEQ ID NO: 259716 - DNA, 5241 bp, Artificial Sequence
  derived and/or modified sequence
atggacgaggaggaggacggcgccggcgccgaggagagcggccagcccagaagcttcatgagactgaacgacctgagcggcgccggcggcagacccggccccggcagcgccgagaaggaccccggcagcgccgacagcgaggccgagggcctgccctaccccgccctggcccccgtggtgttcttctacctgagccaggacagcagacccagaagctggtgcctgagaaccgtgtgcaacccctggttcgagagaatcagcatgctggtgatcctgctgaactgcgtgaccctgggcatgttcagaccctgcgaggacatcgcctgcgacagccagagatgcagaatcctgcaggccttcgacgacttcatcttcgccttcttcgccgtggagatggtggtgaagatggtggccctgggcatcttcggcaagaagtgctacctgggcgacacctggaacagactggacttcttcatcgtgatcgccggcatgctggagtacagcctggacctgcagaacgtgagcttcagcgccgtgagaaccgtgagagtgctgagacccctgagagccatcaacagagtgcccagcatgagaatcctggtgaccctgctgctggacaccctgcccatgctgggcaacgtgctgctgctgtgcttcttcgtgttcttcatcttcggcatcgtgggcgtgcagctgtgggccggcctgctgagaaacagatgcttcctgcccgagaacttcagcctgcccctgagcgtggacctggagagatactaccagaccgagaacgaggacgagagccccttcatctgcagccagcccagagagaacggcatgagaagctgcagaagcgtgcccaccctgagaggcgacggcggcggcggccccccctgcggcctggactacgaggcctacaacagcagcagcaacaccacctgcgtgaactggaaccagtactacaccaactgcagcgccggcgagcacaaccccttcaagggcgccatcaacttcgacaacatcggctacgcctggatcgccatcttccaggtgatcaccctggagggctgggtggacatcatgtacttcgtgatggacgcccacagcttctacaacttcatctacttcatcctgctgatcatcgtgggcagcttcttcatgatcaacctgtgcctggtggtgatcgccacccagttcagcgagaccaagcagagagagagccagctgatgagagagcagagagtgagattcctgagcaacgccagcaccctggccagcttcagcgagcccggcagctgctacgaggagctgctgaagtacctggtgtacatcctgagaaaggccgccagaagactggcccaggtgagcagagccgccggcgtgagagtgggcctgctgagcagccccgcccccctgggcggccaggagacccagcccagcagcagctgcagcagaagccacagaagactgagcgtgcaccacctggtgcaccaccaccaccaccaccaccaccactaccacctgggcaacggcaccctgagagcccccagagccagccccgagatccaggacagagacgccaacggcagcagaagactgatgctgcccccccccagcacccccgccctgagcggcgccccccccggcggcgccgagagcgtgcacagcttctaccacgccgactgccacctggagcccgtgagatgccaggcccccccccccagaagccccagcgaggccagcggcagaaccgtgggcagcggcaaggtgtaccccaccgtgcacaccagccccccccccgagaccctgaaggagaaggccctggtggaggtggccgccagcagcggcccccccaccctgaccagcctgaacatcccccccggcccctacagcagcatgcacaagctgctggagacccagagcaccggcgcctgccagagcagctgcaagatcagcagcccctgcctgaaggccgacagcggcgcctgcggccccgacagctgcccctactgcgccagagccggcgccggcgaggtggagctggccgacagagagatgcccgacagcgacagcgaggccgtgtacgagttcacccaggacgcccagcacagcgacctgagagacccccacagcagaagacagagaagcctgggccccgacgccgagcccagcagcgtgctggccttctggagactgatctgcgacaccttcagaaagatcgtggacagcaagtacttcggcagaggcatcatgatcgccatcctggtgaacaccctgagcatgggcatcgagtaccacgagcagcccgaggagctgaccaacgccctggagatcagcaacatcgtgttcaccagcctgttcgccctggagatgctgctgaagctgctggtgtacggccccttcggctacatcaagaacccctacaacatcttcgacggcgtgatcgtggtgatcagcgtgtgggagatcgtgggccagcagggcggcggcctgagcgtgctgagaaccttcagactgatgagagtgctgaagctggtgagattcctgcccgccctgcagagacagctggtggtgctgatgaagaccatggacaacgtggccaccttctgcatgctgctgatgctgttcatcttcatcttcagcatcctgggcatgcacctgttcggctgcaagttcgccagcgagagagacggcgacaccctgcccgacagaaagaacttcgacagcctgctgtgggccatcgtgaccgtgttccagatcctgacccaggaggactggaacaaggtgctgtacaacggcatggccagcaccagcagctgggccgccctgtacttcatcgccctgatgaccttcggcaactacgtgctgttcaacctgctggtggccatcctggtggagggcttccaggccgagggcgacgccaacaagagcgagagcgagcccgacttcttcagccccagcctggacggcgacggcgacagaaagaagtgcctggccctggtgagcctgggcgagcaccccgagctgagaaagagcctgctgccccccctgatcatccacaccgccgccacccccatgagcctgcccaagagcaccagcaccggcctgggcgaggccctgggccccgccagcagaagaaccagcagcagcggcagcgccgagcccggcgccgcccacgagatgaagagcccccccagcgccagaagcagcccccacagcccctggagcgccgccagcagctggaccagcagaagaagcagcagaaacagcctgggcagagcccccagcctgaagagaagaagccccagcggcgagagaagaagcctgctgagcggcgagggccaggagagccaggacgaggaggagagcagcgaggaggagagagccagccccgccggcagcgaccacagacacagaggcagcctggagagagaggccaagagcagcttcgacctgcccgacaccctgcaggtgcccggcctgcacagaaccgccagcggcagaggcagcgccagcgagcaccaggactgcaacggcaagagcgccagcggcagactggccagagccctgagacccgacgacccccccctggacggcgacgacgccgacgacgagggcaacctgagcaagggcgagagagtgagagcctggatcagagccagactgcccgcctgctgcctggagagagacagctggagcgcctacatcttccccccccagagcagattcagactgctgtgccacagaatcatcacccacaagatgttcgaccacgtggtgctggtgatcatcttcctgaactgcatcaccatcgccatggagagacccaagatcgacccccacagcgccgagagaatcttcctgaccctgagcaactacatcttcaccgccgtgttcctggccgagatgaccgtgaaggtggtggccctgggctggtgcttcggcgagcaggcctacctgagaagcagctggaacgtgctggacggcctgctggtgctgatcagcgtgatcgacatcctggtgagcatggtgagcgacagcggcaccaagatcctgggcatgctgagagtgctgagactgctgagaaccctgagacccctgagagtgatcagcagagcccagggcctgaagctggtggtggagaccctgatgagcagcctgaagcccatcggcaacatcgtggtgatctgctgcgccttcttcatcatcttcggcatcctgggcgtgcagctgttcaagggcaagttcttcgtgtgccagggcgaggacaccagaaacatcaccaacaagagcgactgcgccgaggccagctacagatgggtgagacacaagtacaacttcgacaacctgggccaggccctgatgagcctgttcgtgctggccagcaaggacggctgggtggacatcatgtacgacggcctggacgccgtgggcgtggaccagcagcccatcatgaaccacaacccctggatgctgctgtacttcatcagcttcctgctgatcgtggccttcttcgtgctgaacatgttcgtgggcgtggtggtggagaacttccacaagtgcagacagcaccaggaggaggaggaggccagaagaagagaggagaagagactgagaagactggagaagaagagaagaaacctgatgctggacgacgtgatcgccagcggcagcagcgccagcgccgccagcgaggcccagtgcaagccctactacagcgactacagcagattcagactgctggtgcaccacctgtgcaccagccactacctggacctgttcatcaccggcgtgatcggcctgaacgtggtgaccatggccatggagcactaccagcagccccagatcctggacgaggccctgaagatctgcaactacatcttcaccgtgatcttcgtgctggagagcgtgttcaagctggtggccttcggcttcagaagattcttccaggacagatggaaccagctggacctggccatcgtgctgctgagcatcatgggcatcaccctggaggagatcgaggtgaacgccagcctgcccatcaaccccaccatcatcagaatcatgagagtgctgagaatcgccagagtgctgaagctgctgaagatggccgtgggcatgagagccctgctggacaccctgtgggcctggagcagcctggagacctggagcgtgaccagacacacccccgtgagagcctgggccgtgatgccccccttcggcaccctggcctggcccagctag

SEQ ID NO: 259717 - DNA, 6786 bp, Artificial Sequence
  derived and/or modified sequence
atggatgaggaggaagatggagcgggggccgaggaatccggtcagccgcgcagcttcatgagacttaacgacctgagtggagccggaggtcgcccaggtccgggctcggccgagaaagacccagggtccgcagactcagaagccgaggggctgccttaccccgccctggcaccagtagtgtttttttacctctcacaagatagtcgtccacgatcttggtgtctgcgcactgtgtgcaatccctggtttgaacgtataagcatgctagtgatattgctcaactgtgtaacactgggaatgtttaggccatgcgaagacatcgcatgtgattcccagcgatgccgtattctccaggcatttgacgatttcatcttcgcattcttcgcggtggagatggtggtaaaaatggtggctctgggaatcttcgggaaaaaatgttacctcggcgacacatggaaccgcctcgactttttcattgtgattgccggaatgttggagtacagcctggatctgcagaacgtatcattctccgcggtgcgcactgtgcgggtcctgcggcccctgagggccattaaccgcgtgccatccatgcggatcctggtgaccttgctgcttgacacgctgcccatgttgggaaacgtgcttttgctctgtttcttcgtgttctttattttcgggatcgttggggtccagctctgggcagggctgctgcgcaatcgctgcttccttccagagaacttttctttgcctctctccgtggatctggagcggtactaccagactgagaatgaagatgagtctcctttcatctgcagccagccaagagaaaacggcatgcgaagctgtcggagcgttcctaccctgagaggagatggtggcgggggccctccctgcggcctcgactacgaggcttacaacagctcatcaaatacgacatgtgtgaattggaaccagtactacacaaattgttccgccggggaacacaaccctttcaaaggcgccattaacttcgacaatatagggtatgcttggattgccatcttccaagtgatcacattggagggttgggtcgatatcatgtactttgtgatggacgctcacagtttctataactttatctacttcatactgctaatcattgtgggctcttttttcatgattaacctttgcctcgtggtcatcgccacccagtttagcgaaaccaagcagagggagtctcagttaatgagagagcagcgcgtgcgctttttgtccaacgctagtaccctggccagtttttccgagcctggatcctgctacgaggagcttctcaagtatctcgtttatatactcagaaaagccgcgaggcgactcgctcaggtatcacgggccgctggcgtgcgcgttggcctcctttcctcaccagcgcccctggggggccaagaaacgcagccatcttcctcttgtagccggtcacatagacggctatctgtgcatcatctggtgcatcaccaccaccaccatcaccatcattaccacttaggtaacggcaccttaagagccccacgcgcgtcacccgagatccaggacagggacgcgaacggttctcggcgtctcatgttgccaccacctagcactcccgcactgtcaggcgctcctcctggaggtgccgaaagcgtgcattccttctatcacgcagattgccacttggagccggtaagatgccaggctcctcctcctcggtctccgtccgaagcaagtggcagaactgtggggagtggaaaggtgtaccccaccgtacacactagtcctccccccgagactctaaaagaaaaagccctcgttgaggttgccgctagcagcggtccacccaccctgacctcccttaatatccctcctggaccttattccagcatgcataaactgctggagacccagtctaccggcgcatgccaaagctcttgtaagatatccagtccatgtctgaaagccgattctggagcctgtggcccagattcatgtccctactgcgctcgcgcaggtgcaggggaggtggaactcgccgacagggaaatgcccgacagcgactcagaagcggtttatgagtttacccaagatgcgcagcatagcgacctgcgggaccctcattcacgtagacaacggtccctcggacccgacgcggagcccagttccgtgctggccttctggaggctcatatgcgatacttttcgtaagatcgtcgacagcaagtacttcggtcggggcatcatgatcgccatacttgtcaacacattgtctatgggaatcgaatatcatgaacaaccggaggagctgactaatgcattagagatctctaatatagttttcaccagtttgttcgcactcgaaatgctcctgaaacttttagtttacgggccttttggctacatcaagaatccgtataatatttttgatggtgtgatcgtggtcatcagcgtttgggagatcgttggtcagcaggggggggggctgagcgttctgcggaccttcaggttaatgagagtcctgaagctggtccgcttcctaccagccctccagaggcagctggtggttctgatgaagacaatggataacgtggccacattttgtatgttgctgatgctctttatttttattttttctatcctaggcatgcaccttttcggatgtaagttcgcttccgagcgcgacggcgatacactgccagacagaaagaattttgacagcctgttgtgggctatcgtgaccgtgtttcagattctgacccaagaggactggaacaaggtactatataacggaatggcgagtaccagcagttgggctgctctttatttcattgcactcatgacattcggtaattacgtgctgtttaaccttttggtggccattctggttgaaggctttcaggccgagggcgacgctaacaagtctgagtcagagcccgatttcttcagtccaagcctggacggggacggcgacaggaaaaaatgtctcgccctagtgtcccttggggaacaccccgagttacgcaagagcctgctgcccccattaatcattcataccgccgctactcctatgtctttgcccaagagtactagcaccggactgggtgaggccctgggacccgccagtaggagaacctccagttctggctcggctgaacccggggcagcacacgagatgaagtcccccccctcggctcgctcttctccacactctccttggtcagccgcctcatcctggacctcaaggaggagctcccgtaatagcttggggagggctccgtccctcaagcgaaggagtccgagtggagagagaaggagccttctcagcggggaggggcaggagagccaagacgaggaggagagtagcgaagaggaacgtgcttcaccggcaggaagtgatcacagacaccgcggatcactcgaacgcgaggccaaaagttcatttgatttgcccgacaccttacaggtgcctggcctgcacaggacggcctccggccggggttccgcgagtgagcatcaggattgcaatggaaaaagtgccagcggaagactcgcacgggccctacgccctgatgatccaccactagacggggatgatgctgacgacgaggggaacctctcaaagggcgagcgcgtcagggcctggatcagagcacggcttcctgcatgttgcctggagcgcgattcatggagcgcatatatctttcccccccagtcccgtttccgcctcctgtgtcataggataatcacacataagatgttcgaccatgttgtgctggtcattatttttctcaactgcataacaattgccatggagcgcccaaaaatcgaccctcactccgctgaaaggatattcctcacactgtcaaactacatttttaccgctgtcttcttggcagagatgaccgttaaggtcgtggctcttggttggtgttttggagagcaggcttaccttcggtcttcctggaacgtgctggatggcctcctggtgctcatcagcgtgattgatatactcgtgagtatggtcagcgactcagggaccaaaatccttgggatgctgagggttctgagactcttgcgaactcttaggcctttgagagtgattagtcgggcccagggcctgaagctcgtggttgaaaccctcatgagctctttaaaacctattggcaacatcgtggtgatttgttgtgcgtttttcatcattttcgggatcctcggggtccagctgtttaaaggaaagttcttcgtttgtcagggagaggacacaagaaatattacaaataagagcgactgtgccgaagcctcatacagatgggttcgtcataaatacaatttcgataatctcgggcaggcccttatgtctttgtttgtgctcgcctccaaagacggttgggtggatatcatgtatgatggtctcgatgctgtaggtgtggaccaacagccaattatgaatcacaacccttggatgcttctttattttatatccttcctgttgatagttgcttttttcgttttgaacatgtttgtgggggttgtcgtggaaaacttccacaagtgccggcagcatcaagaagaagaagaagctagacggcgagaggagaagagactccggcggctggagaaaaagagaagaaatctcatgctggatgacgtgatcgccagtggttcatccgccagcgcggccagtgaggcccagtgcaagccatattattccgactattcgaggtttcggctgcttgttcaccatctttgtacttctcactacttagacctcttcattactggggtaattgggctaaacgtggttactatggccatggaacactatcaacagccgcagatccttgacgaggctctcaagatttgtaactatatcttcactgtgatttttgtcctggaaagtgtattcaaactcgtggcctttggattccggcggtttttccaagacaggtggaaccagctggaccttgctatcgtgttgctgtcaatcatgggaattaccttagaggagattgaggtgaacgccagcttgccaatcaaccctactattattcggatcatgcgggtgctcaggatcgctagagttttgaagctccttaaaatggctgtaggaatgagggccctactcgatactgtgatgcaggcgttgccgcaagtgggcaaccttggacttttattcatgctgctgttctttatctttgccgccctgggcgtggagctctttggggatttggagtgtgacgaaacacatccttgcgaaggactcggaaggcatgccacctttagaaacttcggcatggccttcctgactctattccgcgtaagcaccggcgacaattggaacggcatcatgaaagataccctccgggattgtgaccaggaatccacatgctacaataccgtgatttccccgatttactttgtgagtttcgtgctgacagcacagttcgtcctcgtgaatgtcgtgattgcagtgctcatgaagcacttggaagagagcaacaaagaggctaaagaagaagccgagctggaagccgaacttgagctggaaatgaaaaccctgagtccacagccgcactcacctctcggttcccccttcctttggcccggcgtggaggggccagactcccctgacagcccaaagcctggtgccctacaccctgccgcccacgctcggtctgcaagtcatttctcactcgaacaccctacaatgcaaccccacccaactgagctccctggcccagacctgctgactgtgcgtaaatccggggtgtctcgcacacactccttgccgaatgactcatatatgtgccgtcacggctcaacagcggaggggcccttaggccacaggggctgggggttacctaaggcgcagagtggatcagtgctgtccgtgcattcgcaacccgccgacacctcctacatcctgcagctgcctaaagacgcccctcatctgttacagccacattcggctccaacctggggaaccatcccgaagctgccaccacccggcagatcccctctggctcagaggccattgcgcaggcaggccgcaatccgcacagactccctagatgtacagggcctgggttccagggaagatctgctggccgaggtgagtggcccaagtcctccactcgccagagcttattcgttttgggggcagagttcaacacaggcccagcagcactcaaggtctcattccaagattagtaaacacatgacccctcctgccccctgccctggaccagagccgaattggggcaagggccccccggagactcgcagtagcctggagctggataccgaactttcctggatctccggagacctgttgccgcctggaggccaggaagagcccccgagcccgagagacttaaaaaagtgttactctgtggaggcccagtcatgtcagagaagacccacgtcttggcttgacgagcagcgtaggcatagtatcgccgtgtcttgtctagactcaggcagccagccccacctggggactgatccctccaatctgggaggccaaccgctgggcggaccaggctcccgacccaaaaagaaactttcacctccctcaatcaccatcgatccccctgagagccagggacccaggacccctccttcacctggaatttgtttacgcagaagggcacctagcagtgactcaaaggatccccttgcatcaggtccaccagactctatggctgctagtccatcccccaaaaaagatgttctgtctcttagcggactttcgtccgaccctgcggacctggatccttag

SEQ ID NO: 259718 - DNA, 5262 bp, Artificial Sequence
  derived and/or modified sequence
atggacgaggaggaagatggtgcaggcgccgaagagtcaggacagccgaggtcttttatgaggctgaacgatcttagtggcgctggtggcaggccaggtcctggaagtgccgaaaaagacccagggagcgcggactcagaagctgaagggttgccttatccggcgctcgcccctgtggtgttcttctacctgtcccaggattcacgaccccgatcctggtgtctgcgcaccgtctgcaacccgtggtttgagcgtatttctatgctggtgattttactgaactgtgttacactcgggatgtttaggccatgcgaggacatcgcctgcgatagccagagatgccgtattttgcaggccttcgacgactttattttcgccttcttcgccgtggagatggtagtgaaaatggttgcgttaggaatattcggtaagaagtgctatttgggcgatacgtggaatagactggatttttttattgtgatcgcaggaatgcttgagtacagtctcgatctacaaaacgtgagcttcagtgcggttcgcacggtgcgggtactgcgtcctctaagggctataaaccgcgtaccttcaatgaggattctagtgaccctgctacttgacacactccctatgcttgggaatgtgctcctgctgtgcttcttcgttttcttcatcttcgggatagtcggcgtccaactctgggctggtttgttacggaaccgctgctttctcccggagaacttcagtctgccactctctgtcgacctggaacgttactaccagactgagaacgaagacgaaagccctttcatatgctcccagccgagagagaatggcatgcgctcgtgccgttccgttcctacccttcgcggggacggcggtgggggacccccatgcgggctggattacgaggcgtataactcttcgtctaatactacttgtgtaaattggaatcagtactatactaactgttcagcgggtgaacacaatccctttaagggtgctataaattttgacaacattggctacgcttggatagcaatcttccaggtcattacattggagggctgggttgacattatgtacttcgtgatggacgcccattcattttacaatttcatatacttcattctgctcattattgtcggcagttttttcatgataaatctttgtctggtcgtcatagccacccaattcagtgagaccaaacagagagagagccaactcatgagggagcaacgtgtgcgcttcctcagcaatgctagcacattagcgagcttctctgaaccaggaagttgctatgaggagctcctgaagtacctcgtctacattctgaggaaagccgccaggcgtctcgcacaagtgtccagagcagccggtgtccgcgtgggcttgctgtcctctccagcgcccctgggggggcaagagacccaaccctcctcttcatgttcccggtcccatcggcgattgagcgtccaccaccttgtccatcatcatcaccaccatcatcaccactaccatctgggcaacggcactctgagggcacccagagcatctcccgaaattcaggaccgcgacgccaacgggagccggcgactgatgctgccccctccgtctacgccagcactgtcaggtgccccccctggaggcgcggagtctgtgcattctttttatcatgccgactgccatctcgaacccgtgcgctgccaagcgccgccaccgaggtcaccttccgaagcaagcggacgaaccgtcggatcaggaaaagtctatcccaccgtgcacacaagtccaccacccgaaacgttaaaggaaaaagccctggttgaggtggccgccagcagcggccctccgacattgacctccctgaacataccacccgggccctattcctcaatgcacaaactcctggagactcagagcaccggggcttgccagagttcttgtaagatatcaagcccctgtctgaaagccgactccggtgcgtgcggtccagattcctgcccctactgtgcccgggctggcgctggtgaagtggagctcgctgaccgtgagatgcccgatagcgactctgaggccgtgtatgaatttacgcaggacgcacaacattcagatttgcgggatcctcactcgaggcgccagaggtcattaggcccagacgcagagccgagttctgtattagccttctggcggctgatctgtgacactttccgtaaaatagtcgacagtaaatatttcggacgaggaattatgattgctatcttggtaaacaccctcagtatgggaatcgaataccacgaacagccggaggagcttacaaacgctctggagatcagtaacatcgttttcacttctctcttcgcgctggagatgctgctaaagctgctggtctatggaccatttggctacattaagaatccttataacatctttgacggtgttatcgttgttatttccgtgtgggagatcgtgggccagcagggcggtgggctttccgtcctgagaactttccgactcatgagggttcttaagctggtgagatttctgcccgctcttcagcgccagctcgtggtcctgatgaaaacaatggacaacgtggccactttctgcatgctgttgatgctgttcatatttatttttagcatcctcggaatgcacctgttcggttgtaagttcgccagcgagagggacggggataccctgcctgatcgcaagaattttgactccctgctgtgggcgattgtcactgtgtttcagatcctgactcaggaggactggaataaagtgctttataacggcatggctagcacatctagctgggcggccttgtactttatcgctttgatgacatttggcaactatgtgctttttaatctgctcgtggccatcctcgtggaaggcttccaggcagaaggtgatgctaataagagtgagagcgagcccgatttcttcagcccgagccttgacggtgatggtgaccgaaagaaatgcttagccctggtaagcctgggggagcaccctgagctcagaaagagtctgcttccccccttgatcattcacaccgctgccacacctatgtccctgcccaaatccacctcaaccgggctcggagaagcacttgggccggcctcacggcggacatcaagctcaggaagtgctgagccgggtgccgctcacgagatgaaatctccaccttccgctaggtcctctccgcacagtccatggtctgcggctagctcttggacaagcagacgaagttcccgcaattctctgggcagggcaccctctctgaaaagacgtagcccctctggcgagaggcggtctctgctcagcggcgagggccaggagtcgcaagatgaggaggagtcctccgaggaagagagagcctcccccgcaggatcagaccatcggcatagggggtccctcgagcgtgaagctaaaagctcgttcgatctgcctgacaccctacaggttcccggcctccacaggaccgcttctgggcgcggatccgcgagcgagcatcaggactgtaacgggaagagtgcttctggacgcctcgcccgtgctcttcgaccggacgaccccccacttgatggcgatgacgcagatgacgaggggaatctatcaaaaggcgagcgggtcagagcctggataagagcccgcctccctgcatgctgtttggaacgcgatagttggtctgcctacattttccctccacagtctaggtttcgactactctgtcaccgtatcatcacgcacaaaatgttcgaccacgtggtgctagttatcattttcctcaattgcattacgatagcaatggaaagacccaaaattgatccacatagcgcagagaggatcttcctcacgttgtcaaactacatttttactgcagtctttctcgctgagatgaccgttaaggtggtggcccttgggtggtgcttcggagaacaggcttacttgcgttctagttggaatgtgcttgacggcctattggtactaattagcgtgatcgacattctggtgtcaatggtttccgatagcggtactaagatcctgggaatgctcagagtgttgagactgctgaggaccttacgcccactcagagttatcagcagagctcagggtctgaagttggtcgtggaaacattgatgtcttctcttaaacccatcggtaatatcgtcgtgatctgttgcgcgtttttcatcatattcggtattctgggtgttcaacttttcaagggaaagttcttcgtgtgccagggggaggatacacgtaacatcacgaacaagtcagactgcgccgaagcgagctataggtgggtgagacacaagtacaatttcgataacttgggacaggctcttatgtctctcttcgtactagcctccaaggatggttgggtcgacattatgtacgatggcctggacgccgtcggggtagaccaacaacctataatgaatcacaatccctggatgctattgtactttatatcgttcctgttgatcgtggcctttttcgtgctgaacatgttcgttggggtcgtagtagagaactttcacaagtgtaggcagcatcaggaggaggaggaagcaaggagacgggaggagaagcggcttcgccggctagagaagaagagacgcaatctgatgctggacgatgtcattgcatctggctctagcgcatcagcagcctccgaggctcagtgcaaaccatattacagcgattattcaaggttcaggctgcttgtgcaccatctgtgcacgtctcattacttggatctgtttatcactggagtcattggactgaatgtggttaccatggccatggagcactaccaacagccccagattctggacgaagcgctgaagatttgcaactacatctttacagtaatatttgtcttggaatccgtgttcaaacttgtggcgttcggcttcagaagatttttccaggataggtggaaccagctggatctggctatcgtcttgctgtccatcatggggatcacgctggaggaaatcgaggtcaatgcgtctctaccaatcaatccaacaataatcagaataatgagagtcctgcggattgctcgggtcctaaaattgttaaagatggcggttgggatgcgcgctctactagacactgtgatgcaggcactcccgcagctctgggcatggtcaagtttagagacctggagtgtgacacgccacacacccgtgcgtgcctgggccgtaatgcccccttttggtacgctcgcttggccttcatag

SEQ ID NO: 259719 - DNA, 5241 bp, Artificial Sequence
  derived and/or modified sequence
atggatgaggaagaggacggcgccggcgccgaggagagcggccagccgagatcatttatgcgactgaacgacctgagcggggccggggggaggcctggaccagggtccgccgagaaagaccccggctctgccgatagcgaggctgagggtttaccctaccctgcattggcaccggtcgtttttttctacctgtcccaagattcaagaccgcgcagctggtgcctgaggaccgtgtgcaacccgtggtttgaaaggattagcatgctagtaattctgcttaattgtgtcaccctggggatgttccgcccgtgtgaagacattgcgtgcgatagtcagcgctgtagaattcttcaggcgtttgatgatttcattttcgccttcttcgccgttgagatggtggtcaagatggtggccctgggaatctttggtaagaaatgctatctgggcgacacctggaataggctggatttttttatagtcatcgccggcatgctcgagtattccctggatctccaaaacgtgtcgttttctgcggtaagaactgttcgtgtgctgcgtccccttagagcgatcaaccgggttcctagcatgcggatcctggtcactctgctgctggatacactccctatgctcgggaatgtcctcctgctgtgtttctttgtcttctttatcttcgggatcgtcggagtccagttatgggccgggttgctgcgtaacaggtgctttctgccagagaacttcagcctaccactgtcagtggacctggagcgttactatcagacagagaatgaggatgaatccccattcatttgttcacagccccgcgagaacgggatgagatcctgcagatcagttccgacactacggggggacggtggggggggacctccttgtggattggactatgaggcttataactcttcttccaataccacgtgtgtgaattggaaccagtattacacaaactgtagtgccggtgagcacaacccttttaaaggggccatcaactttgataatatcgggtacgcctggattgctatattccaggtgataacgttggaagggtgggtggacattatgtacttcgtcatggatgcgcacagcttctacaactttatttacttcatcttgctcattattgtcgggtcattcttcatgatcaacttgtgcctcgtcgtgatcgccactcagttctcagagaccaagcagagagagtcccagctcatgcgggaacagagggtcagattcctcagcaatgcaagtacgctagctagtttctccgagccagggtcttgttacgaggagcttctgaaatatctcgtctatattttacgcaaggcggcacggcgcctcgcccaggtcagtcgcgccgctggtgttcgagttggactcctgtcgagccctgcacccctcggaggtcaggagacccaaccatccagctcctgcagccgctcacatagacgtctgagtgtgcatcatctggtccaccatcatcatcaccaccatcaccattaccatttgggtaacggaacgttgcgggccccaagagcaagtccggaaattcaggatcgcgatgcgaacggcagccgcagacttatgcttccacctccttccaccccagcattgagcggggcgccaccaggcggcgccgaatccgtccactccttttatcatgcagactgtcatcttgagcctgtcaggtgccaggcgccgcccccccgcagcccatccgaggcctctggcagaacagtgggaagcggcaaggtgtatcccacagtgcatacctcacctcctccagaaactcttaaggaaaaagcactcgtggaggtggctgcatcatccggaccgcccacactcacaagcctaaacatccctccaggcccctattccagcatgcataaactccttgagacacagtcgactggcgcgtgccaatcttcttgtaaaatttcaagcccctgtctcaaagccgactcaggagcctgcggcccagatagctgtccctactgtgcccgggcgggcgccggtgaggtcgaattagctgacagggaaatgccagactccgattctgaggccgtgtacgaatttacccaggacgcacagcacagcgatctcagagacccgcactcacgcagacaacgatctctggggccagacgccgagccatcctctgtgcttgctttctggaggctgatttgtgatactttcaggaagatcgtggattccaaatacttcggcaggggcattatgattgcaatattagtcaacaccctctcaatgggaattgagtatcacgaacagcccgaggagctgaccaatgcactggagatttccaatattgttttcactagccttttcgccctggagatgttgttgaagctccttgtgtacggtccatttggatacattaagaatccctacaacatctttgacggcgtgattgtagtgatcagtgtctgggagatagtgggccagcagggaggtggtttgtctgtcctgagaaccttccggctgatgcgcgtgttaaagttagtgagattcttgccagctctccagcggcagctcgttgtgctgatgaagaccatggacaatgtggctaccttttgcatgctcctgatgttgtttatcttcatcttttctatcttgggaatgcatctgtttgggtgtaagtttgccagtgagcgcgacggcgacacactccctgaccggaaaaacttcgactcccttctctgggccatagtcacagttttccagatcctgacacaggaggactggaataaggtgctgtataatggcatggcctccacgtcctcgtgggcagccctctattttatcgctctgatgacatttgggaactacgtcctctttaatctcctagttgccatcctagtggagggatttcaggccgagggagatgcaaacaaatcggagagtgagccagactttttcagccccagtttggacggggatggcgacagaaaaaagtgcttggctctggtgagcctaggagaacacccggaactcaggaagagcctgctgcctccgctaatcattcataccgctgccacaccaatgtctctgcctaagagtacttctaccggactcggagaggctctcggcccagcctcgcgccgtacctcctctagcgggtctgccgaacccggggccgcacacgaaatgaaaagtcctcccagtgcaagatcatctcctcatagcccctggtccgctgcctcatcctggacctcaagaagaagttcccgcaattcattgggcagagctccttcgctgaagcggcgctctccctccggcgagaggagatctctgctcagtggcgagggccaggagtcacaagatgaggaggagagcagcgaggaggaacgcgcttcacctgcaggcagcgaccataggcatcgcggctctttggaaagagaagcgaaatcaagcttcgatctaccagacacgctgcaggtgcccggtctccaccgcactgccagtggtcgaggtagtgcctcagagcatcaggattgcaacgggaaatcagcctctggcagactggctcgcgcacttagaccagacgacccccccttggacggggacgatgccgacgacgaagggaatcttagtaaaggtgagcgagttagggcttggatccgcgcccgccttcctgcctgttgtctggaacgggactcatggtctgcctacatctttcctcctcagtctcggtttcgccttctctgccaccgaatcattactcataaaatgtttgatcatgtagtgctggtaatcatctttctcaattgcattaccatcgctatggagaggccgaagattgatcctcatagtgctgagcggatctttctcacgctctccaattatatatttacggccgtgtttcttgcggaaatgacggttaaagttgtcgctctcggttggtgctttggtgaacaagcgtacctgcggagctcttggaacgtgttggacggattactagtgttgatctcggtcattgacatactggtgagcatggtgagcgactctggtactaagattctgggaatgttgcgggtgttgcgcttacttcggaccttgcggcccctgcgggtgatatctcgagctcagggcctgaagctggttgttgaaacattgatgtcatctctgaaaccaatcggaaacatagtcgtcatttgctgcgcgttttttatcatctttggaatcttgggtgtacagctcttcaagggcaagtttttcgtgtgtcagggggaggacaccaggaatatcacaaataaatcagattgcgcagaagcgagctatcgatgggtcaggcacaaatataacttcgacaacctcggtcaggcattgatgtcgctgtttgttctggcttccaaagacggctgggtggatatcatgtacgacggactggacgcagttggtgtggatcagcagccgatcatgaatcataacccgtggatgttgctgtactttatttccttcctgctaatcgtggcattctttgtcctgaatatgttcgtgggggtggtcgttgagaacttccataagtgcaggcagcaccaggaagaagaggaggcccggaggcgcgaggaaaagcgactgaggaggcttgagaagaagcgtagaaacttgatgctggatgacgtgatagcatcaggctcctccgccagcgcagcaagcgaagcccaatgtaagccatactatagcgattattcacggttcaggctcctggttcatcacctgtgtacctcccattatctcgatcttttcattacaggagttatcggcctaaatgttgttactatggccatggagcattatcaacagcctcaaatactggatgaagccctgaaaatatgcaactacattttcactgtgatcttcgtcctggagtcggtttttaagcttgtggcctttggtttcagacggttcttccaggatcggtggaaccagctggacctcgccatcgtgctgttatccattatgggtattacactggaagagattgaagtaaacgcaagtctgccgattaacccaaccatcatcaggattatgagagtgcttagaattgctagggtcctcaagctgctaaagatggcggtggggatgagggcgcttctcgatacactgtgggcttggtcctcgctggagacttggagtgtgacccgccacactcctgtgcgagcgtgggctgtcatgcctccattcggtacattagcttggccttcgtag

SEQ ID NO: 259720 - DNA, 6786 bp, Artificial Sequence
  derived and/or modified sequence
atggatgaggaggaggatggagctggagctgaggagagcggccagcccaggagcttcatgaggctgaatgacctgagcggggccggcggccggcccggccctggcagcgctgagaaggaccccggcagcgctgacagcgaggccgagggcctgccctacccagccctggcccctgtggtgttcttctacctgagccaggacagccggcccaggtcctggtgcctgaggacagtgtgcaacccctggtttgagcgcatctccatgctggtgatcctgctgaactgtgtgaccctgggcatgttccggccctgtgaagatattgcctgtgacagccagcgctgccgcatcctgcaggcctttgatgacttcatctttgccttctttgctgtggagatggtggtgaagatggtggccctgggcatctttgggaagaagtgctacctgggggacacctggaaccggctggacttcttcatcgtgattgctggcatgctggagtacagcctggacctgcagaatgtgtccttctctgctgtgaggacagtgcgggtgctgcggcccctgcgggccatcaacagagtgcccagcatgaggatcctggtgaccctgctgctggacaccctgcccatgctgggcaatgtgctgctgctgtgcttctttgtgttcttcatctttggaattgtgggcgtgcagctgtgggccggcctgctgaggaaccgctgcttcctgcctgagaacttcagcctgcccctgtctgtggacctggagcgctactaccagacagaaaatgaagatgagagccccttcatctgcagccagccccgggagaatggcatgaggagctgccgctctgtgcccaccctgcggggagatggcggcggcggccccccctgtggcctggactatgaggcctacaacagcagcagcaacaccacctgtgtgaactggaaccagtactacaccaactgcagcgctggggagcacaaccccttcaagggggccatcaactttgacaacatcggctacgcctggatcgccatcttccaggtgatcaccctggagggctgggtggacatcatgtactttgtgatggatgcccacagcttctacaacttcatctacttcatcctgctgatcatcgtgggcagcttcttcatgatcaacctgtgcctggtggtgattgccacccagttcagcgagaccaagcagcgggagagccagctgatgagggagcagagggtgcgcttcctgagcaatgccagcaccctggccagcttcagcgagcccggcagctgctatgaggagctgctgaagtacctggtgtacatcctgaggaaggccgcccggcggctggcccaggtgtccagagctgctggggtgcgggtgggcctgctgagcagccctgcccccctgggcggccaggagacccagcccagcagcagctgcagccgcagccaccggcggctgtctgtgcaccacctggtgcaccaccaccaccaccaccaccaccactaccacctgggcaatggcaccctgcgggccccccgggccagccctgagatccaggacagagatgccaacggcagccggcggctgatgctgcccccacccagcaccccagccctgagcggggcccctcctggaggagctgagagcgtgcacagcttctaccacgccgactgccacctggagcctgtgcgctgccaggcccccccacccaggagccccagcgaggccagcggccgcacagtgggcagcggcaaggtgtaccccaccgtgcacaccagccccccacctgagaccctgaaggagaaggccctggtggaggtggccgccagcagcggcccccccaccctgaccagcctgaacatccccccaggcccctacagctccatgcacaagctgctggagacccagagcactggagcctgccagagcagctgcaagatcagcagcccctgcctgaaggctgacagcggggcctgtggccctgacagctgcccctactgtgcccgggccggggccggggaggtggagctggccgaccgggagatgccagacagcgacagcgaggccgtgtatgagttcacccaggatgcccagcacagcgacctgcgggacccccacagccggcggcagaggagcctgggcccagatgctgagcccagctctgtgctggccttctggaggctcatctgtgacaccttcaggaagatcgtggacagcaagtacttcggccggggcatcatgattgccatcctggtgaacaccctgtccatgggcatcgagtaccacgagcagcctgaggagctgaccaatgccctggagatcagcaacatcgtgttcaccagcctgtttgccctggagatgctgctgaagctgctggtgtatggccccttcggctacatcaagaacccctacaacatctttgatggagtcatcgtggtgatctctgtgtgggagatcgtgggccagcagggcggcggcctgtctgtgctgcggaccttccggctgatgagggtgctgaagctggtgcgcttcctgcctgccctgcagaggcagctggtggtgctgatgaagaccatggacaacgtggccaccttctgcatgctgctgatgctgttcatcttcatcttcagcatcctgggcatgcacctgtttggctgcaagtttgccagcgagagagatggagacaccctgcctgacaggaagaactttgacagcctgctgtgggccatcgtgacagtgttccagatcctgacccaggaggactggaacaaggtgctgtacaacggcatggccagcaccagctcctgggccgccctgtacttcatcgccctgatgaccttcggcaactacgtgctcttcaacctgctggtggccatcctggtggagggcttccaggccgagggagatgccaacaagtctgagagcgagccagacttcttcagccccagcctggatggagatggagacaggaagaagtgcctggccctggtgtccctgggggagcaccctgagctgaggaagagcctgctgcccccactcatcatccacacagctgccacccccatgagcctgcccaagagcaccagcacaggcctgggggaggccctgggccctgccagcaggaggaccagcagcagcggcagcgctgagcccggggccgcccacgagatgaagagccccccatctgcccggagcagcccccacagcccctggagcgctgccagctcctggaccagcagaagaagcagcaggaacagcctgggccgggcccccagcctgaagaggaggagccccagcggggagaggaggagcctgctgagcggggagggccaggagagccaggatgaggaggagagcagcgaggaggagcgggccagccctgctggcagtgaccaccgccaccggggcagcctggagcgggaggccaagagcagctttgacctgcctgacaccctgcaggtgcccggcctgcacaggacagccagcggccggggcagcgccagcgagcaccaggactgcaatggcaagagcgccagcggccgcctggcccgggccctgcggccagatgacccccccctggatggagatgatgctgatgatgagggcaacctgagcaaaggagagcgggtgcgggcctggatccgggcccggctgcctgcctgctgcctggagcgggacagctggagcgcctacatcttccccccccagagccgcttccggctgctgtgccaccgcatcatcacccacaagatgtttgaccacgtggtgctggtgatcatcttcctgaactgcatcaccatcgccatggagcggcccaagattgacccccacagcgctgagcgcatcttcctgaccctgagcaactacatcttcaccgctgtgttcctggccgagatgacagtgaaggtggtggccctgggctggtgctttggagagcaggcctacctgcggagctcctggaatgtgctggatggcctgctggtgctgatcagcgtcatcgacatcctggtgtccatggtgtctgacagcggcaccaagatcctgggcatgctgcgggtgctgcggctgctgcggaccctgcggcccctgcgggtcatcagccgggcccagggcctgaagctggtggtggagaccctgatgagcagcctgaagcccatcggcaacatcgtggtgatctgctgtgccttcttcatcatcttcggcatcctgggcgtgcagctgttcaagggcaagttctttgtgtgccagggcgaggacaccaggaacatcaccaacaagagtgactgtgccgaggccagctaccgctgggtgcgccacaagtacaactttgacaacctgggccaggccctgatgagcctgtttgtgctggccagcaaggatggctgggtggacatcatgtatgatggcctggatgctgtgggcgtggaccagcagcccatcatgaaccacaacccctggatgctgctgtacttcatctccttcctgctgattgtggccttctttgtgctgaacatgtttgtgggcgtggtggtggagaacttccacaagtgccggcagcaccaggaggaggaggaggccaggagaagagaggagaagaggctgcggcggctggagaagaagagaagaaacctgatgctggatgatgtgattgccagcggcagcagcgccagcgctgccagcgaggcccagtgcaagccctactacagcgactacagccgcttccggctgctggtgcaccacctgtgcaccagccactacctggacctcttcatcactggagtcatcggcctgaatgtggtgaccatggccatggagcactaccagcagccccagatcctggatgaggccctgaagatctgcaactacatcttcaccgtcatctttgtgctggagagcgtcttcaagctggtggccttcggcttccgccgcttcttccaggaccgctggaaccagctggacctggccatcgtgctgctgagcatcatgggcatcaccctggaggagattgaggtgaatgccagcctgcccatcaaccccaccatcatccgcatcatgagggtgctgagaattgcccgggtgctgaagctgctgaagatggctgtgggcatgagggccctgctggacacagtgatgcaggccctgccccaggtgggcaacctgggcctgctcttcatgctgctcttcttcatctttgctgccctgggcgtggagctgtttggagacctggagtgtgatgagacccacccctgtgagggcctgggcagacatgccaccttcaggaactttggcatggccttcctgaccctcttccgggtgtccactggagacaactggaatggcatcatgaaggacaccctgcgggactgtgaccaggagagcacctgctacaacacagtcatcagccccatctactttgtgtcctttgtgctgacagcccagtttgtgctggtgaatgtggtgattgctgtgctgatgaagcacctggaggagagcaacaaggaggccaaggaggaggccgagctggaggccgagctggagctggagatgaagaccctgagcccccagccccacagccccctgggcagccccttcctgtggccaggagtggagggccctgacagcccagacagccccaagccaggggccctgcaccctgctgcccacgcccggagcgccagccacttcagcctggagcaccccaccatgcagccccaccccacagagctgcccggccctgacctgctgactgtgaggaagtctggagtgtccaggacccacagcctgcccaatgacagctacatgtgccgccacggcagcacagctgagggccccctgggccaccggggctggggcctgcccaaggcccagagcggctctgtgctgtctgtgcacagccagcctgctgacaccagctacatcctgcagctgcccaaggatgccccccacctgctgcagccccacagcgcccccacctggggcaccatccccaagctgcccccacctggccgcagccccctggcccagaggcccctgcggcggcaggccgccatcagaacagacagcctggatgtgcagggcctgggcagccgggaggacctgctggccgaggtgtctggccccagcccccccctggcccgggcctacagcttctggggccagagcagcacccaggcccagcagcacagccgcagccacagcaagatcagcaagcacatgaccccaccagccccctgccccggccctgagcccaactggggcaagggccccccagagaccaggagcagcctggagctggacacagagctgtcctggatcagcggggacctgctgcccccaggcggccaggaggagccccccagcccccgggacctgaagaagtgctacagcgtggaggcccagagctgccagaggcggcccacctcctggctggatgagcagaggaggcacagcattgctgtgtcctgcctggacagcggcagccagccccacctgggcacagaccccagcaacctgggcggccagcccctgggcggccctggcagccggcccaagaagaagctgagcccccccagcatcaccattgatcctcctgagagccagggccccaggaccccacccagccctggcatctgcctgcggcggcgggcccccagcagtgacagcaaggaccccctggccagcggccccccagacagcatggccgccagccccagccccaagaaggatgtgctgagcctgagcggcctgagcagtgaccctgctgacctggacccctag

SEQ ID NO: 259721 - DNA, 5262 bp, Artificial Sequence
  derived and/or modified sequence
atggatgaggaggaggatggagctggagctgaggagagcggccagcccaggagcttcatgaggctgaatgacctgagcggggccggcggccggcccggccctggcagcgctgagaaggaccccggcagcgctgacagcgaggccgagggcctgccctacccagccctggcccctgtggtgttcttctacctgagccaggacagccggcccaggtcctggtgcctgaggacagtgtgcaacccctggtttgagcgcatctccatgctggtgatcctgctgaactgtgtgaccctgggcatgttccggccctgtgaagatattgcctgtgacagccagcgctgccgcatcctgcaggcctttgatgacttcatctttgccttctttgctgtggagatggtggtgaagatggtggccctgggcatctttgggaagaagtgctacctgggggacacctggaaccggctggacttcttcatcgtgattgctggcatgctggagtacagcctggacctgcagaatgtgtccttctctgctgtgaggacagtgcgggtgctgcggcccctgcgggccatcaacagagtgcccagcatgaggatcctggtgaccctgctgctggacaccctgcccatgctgggcaatgtgctgctgctgtgcttctttgtgttcttcatctttggaattgtgggcgtgcagctgtgggccggcctgctgaggaaccgctgcttcctgcctgagaacttcagcctgcccctgtctgtggacctggagcgctactaccagacagaaaatgaagatgagagccccttcatctgcagccagccccgggagaatggcatgaggagctgccgctctgtgcccaccctgcggggagatggcggcggcggccccccctgtggcctggactatgaggcctacaacagcagcagcaacaccacctgtgtgaactggaaccagtactacaccaactgcagcgctggggagcacaaccccttcaagggggccatcaactttgacaacatcggctacgcctggatcgccatcttccaggtgatcaccctggagggctgggtggacatcatgtactttgtgatggatgcccacagcttctacaacttcatctacttcatcctgctgatcatcgtgggcagcttcttcatgatcaacctgtgcctggtggtgattgccacccagttcagcgagaccaagcagcgggagagccagctgatgagggagcagagggtgcgcttcctgagcaatgccagcaccctggccagcttcagcgagcccggcagctgctatgaggagctgctgaagtacctggtgtacatcctgaggaaggccgcccggcggctggcccaggtgtccagagctgctggggtgcgggtgggcctgctgagcagccctgcccccctgggcggccaggagacccagcccagcagcagctgcagccgcagccaccggcggctgtctgtgcaccacctggtgcaccaccaccaccaccaccaccaccactaccacctgggcaatggcaccctgcgggccccccgggccagccctgagatccaggacagagatgccaacggcagccggcggctgatgctgcccccacccagcaccccagccctgagcggggcccctcctggaggagctgagagcgtgcacagcttctaccacgccgactgccacctggagcctgtgcgctgccaggcccccccacccaggagccccagcgaggccagcggccgcacagtgggcagcggcaaggtgtaccccaccgtgcacaccagccccccacctgagaccctgaaggagaaggccctggtggaggtggccgccagcagcggcccccccaccctgaccagcctgaacatccccccaggcccctacagctccatgcacaagctgctggagacccagagcactggagcctgccagagcagctgcaagatcagcagcccctgcctgaaggctgacagcggggcctgtggccctgacagctgcccctactgtgcccgggccggggccggggaggtggagctggccgaccgggagatgccagacagcgacagcgaggccgtgtatgagttcacccaggatgcccagcacagcgacctgcgggacccccacagccggcggcagaggagcctgggcccagatgctgagcccagctctgtgctggccttctggaggctcatctgtgacaccttcaggaagatcgtggacagcaagtacttcggccggggcatcatgattgccatcctggtgaacaccctgtccatgggcatcgagtaccacgagcagcctgaggagctgaccaatgccctggagatcagcaacatcgtgttcaccagcctgtttgccctggagatgctgctgaagctgctggtgtatggccccttcggctacatcaagaacccctacaacatctttgatggagtcatcgtggtgatctctgtgtgggagatcgtgggccagcagggcggcggcctgtctgtgctgcggaccttccggctgatgagggtgctgaagctggtgcgcttcctgcctgccctgcagaggcagctggtggtgctgatgaagaccatggacaacgtggccaccttctgcatgctgctgatgctgttcatcttcatcttcagcatcctgggcatgcacctgtttggctgcaagtttgccagcgagagagatggagacaccctgcctgacaggaagaactttgacagcctgctgtgggccatcgtgacagtgttccagatcctgacccaggaggactggaacaaggtgctgtacaacggcatggccagcaccagctcctgggccgccctgtacttcatcgccctgatgaccttcggcaactacgtgctcttcaacctgctggtggccatcctggtggagggcttccaggccgagggagatgccaacaagtctgagagcgagccagacttcttcagccccagcctggatggagatggagacaggaagaagtgcctggccctggtgtccctgggggagcaccctgagctgaggaagagcctgctgcccccactcatcatccacacagctgccacccccatgagcctgcccaagagcaccagcacaggcctgggggaggccctgggccctgccagcaggaggaccagcagcagcggcagcgctgagcccggggccgcccacgagatgaagagccccccatctgcccggagcagcccccacagcccctggagcgctgccagctcctggaccagcagaagaagcagcaggaacagcctgggccgggcccccagcctgaagaggaggagccccagcggggagaggaggagcctgctgagcggggagggccaggagagccaggatgaggaggagagcagcgaggaggagcgggccagccctgctggcagtgaccaccgccaccggggcagcctggagcgggaggccaagagcagctttgacctgcctgacaccctgcaggtgcccggcctgcacaggacagccagcggccggggcagcgccagcgagcaccaggactgcaatggcaagagcgccagcggccgcctggcccgggccctgcggccagatgacccccccctggatggagatgatgctgatgatgagggcaacctgagcaaaggagagcgggtgcgggcctggatccgggcccggctgcctgcctgctgcctggagcgggacagctggagcgcctacatcttccccccccagagccgcttccggctgctgtgccaccgcatcatcacccacaagatgtttgaccacgtggtgctggtgatcatcttcctgaactgcatcaccatcgccatggagcggcccaagattgacccccacagcgctgagcgcatcttcctgaccctgagcaactacatcttcaccgctgtgttcctggccgagatgacagtgaaggtggtggccctgggctggtgctttggagagcaggcctacctgcggagctcctggaatgtgctggatggcctgctggtgctgatcagcgtcatcgacatcctggtgtccatggtgtctgacagcggcaccaagatcctgggcatgctgcgggtgctgcggctgctgcggaccctgcggcccctgcgggtcatcagccgggcccagggcctgaagctggtggtggagaccctgatgagcagcctgaagcccatcggcaacatcgtggtgatctgctgtgccttcttcatcatcttcggcatcctgggcgtgcagctgttcaagggcaagttctttgtgtgccagggcgaggacaccaggaacatcaccaacaagagtgactgtgccgaggccagctaccgctgggtgcgccacaagtacaactttgacaacctgggccaggccctgatgagcctgtttgtgctggccagcaaggatggctgggtggacatcatgtatgatggcctggatgctgtgggcgtggaccagcagcccatcatgaaccacaacccctggatgctgctgtacttcatctccttcctgctgattgtggccttctttgtgctgaacatgtttgtgggcgtggtggtggagaacttccacaagtgccggcagcaccaggaggaggaggaggccaggagaagagaggagaagaggctgcggcggctggagaagaagagaagaaacctgatgctggatgatgtgattgccagcggcagcagcgccagcgctgccagcgaggcccagtgcaagccctactacagcgactacagccgcttccggctgctggtgcaccacctgtgcaccagccactacctggacctcttcatcactggagtcatcggcctgaatgtggtgaccatggccatggagcactaccagcagccccagatcctggatgaggccctgaagatctgcaactacatcttcaccgtcatctttgtgctggagagcgtcttcaagctggtggccttcggcttccgccgcttcttccaggaccgctggaaccagctggacctggccatcgtgctgctgagcatcatgggcatcaccctggaggagattgaggtgaatgccagcctgcccatcaaccccaccatcatccgcatcatgagggtgctgagaattgcccgggtgctgaagctgctgaagatggctgtgggcatgagggccctgctggacacagtgatgcaggccctgccccagctgtgggcctggagcagcctggagacctggagcgtgaccaggcacacccctgtgcgggcctgggccgtgatgccacccttcggcaccctggcctggcccagctag

SEQ ID NO: 259722 - DNA, 5241 bp, Artificial Sequence
  derived and/or modified sequence
atggatgaggaggaggatggagctggagctgaggagagcggccagcccaggagcttcatgaggctgaatgacctgagcggggccggcggccggcccggccctggcagcgctgagaaggaccccggcagcgctgacagcgaggccgagggcctgccctacccagccctggcccctgtggtgttcttctacctgagccaggacagccggcccaggtcctggtgcctgaggacagtgtgcaacccctggtttgagcgcatctccatgctggtgatcctgctgaactgtgtgaccctgggcatgttccggccctgtgaagatattgcctgtgacagccagcgctgccgcatcctgcaggcctttgatgacttcatctttgccttctttgctgtggagatggtggtgaagatggtggccctgggcatctttgggaagaagtgctacctgggggacacctggaaccggctggacttcttcatcgtgattgctggcatgctggagtacagcctggacctgcagaatgtgtccttctctgctgtgaggacagtgcgggtgctgcggcccctgcgggccatcaacagagtgcccagcatgaggatcctggtgaccctgctgctggacaccctgcccatgctgggcaatgtgctgctgctgtgcttctttgtgttcttcatctttggaattgtgggcgtgcagctgtgggccggcctgctgaggaaccgctgcttcctgcctgagaacttcagcctgcccctgtctgtggacctggagcgctactaccagacagaaaatgaagatgagagccccttcatctgcagccagccccgggagaatggcatgaggagctgccgctctgtgcccaccctgcggggagatggcggcggcggccccccctgtggcctggactatgaggcctacaacagcagcagcaacaccacctgtgtgaactggaaccagtactacaccaactgcagcgctggggagcacaaccccttcaagggggccatcaactttgacaacatcggctacgcctggatcgccatcttccaggtgatcaccctggagggctgggtggacatcatgtactttgtgatggatgcccacagcttctacaacttcatctacttcatcctgctgatcatcgtgggcagcttcttcatgatcaacctgtgcctggtggtgattgccacccagttcagcgagaccaagcagcgggagagccagctgatgagggagcagagggtgcgcttcctgagcaatgccagcaccctggccagcttcagcgagcccggcagctgctatgaggagctgctgaagtacctggtgtacatcctgaggaaggccgcccggcggctggcccaggtgtccagagctgctggggtgcgggtgggcctgctgagcagccctgcccccctgggcggccaggagacccagcccagcagcagctgcagccgcagccaccggcggctgtctgtgcaccacctggtgcaccaccaccaccaccaccaccaccactaccacctgggcaatggcaccctgcgggccccccgggccagccctgagatccaggacagagatgccaacggcagccggcggctgatgctgcccccacccagcaccccagccctgagcggggcccctcctggaggagctgagagcgtgcacagcttctaccacgccgactgccacctggagcctgtgcgctgccaggcccccccacccaggagccccagcgaggccagcggccgcacagtgggcagcggcaaggtgtaccccaccgtgcacaccagccccccacctgagaccctgaaggagaaggccctggtggaggtggccgccagcagcggcccccccaccctgaccagcctgaacatccccccaggcccctacagctccatgcacaagctgctggagacccagagcactggagcctgccagagcagctgcaagatcagcagcccctgcctgaaggctgacagcggggcctgtggccctgacagctgcccctactgtgcccgggccggggccggggaggtggagctggccgaccgggagatgccagacagcgacagcgaggccgtgtatgagttcacccaggatgcccagcacagcgacctgcgggacccccacagccggcggcagaggagcctgggcccagatgctgagcccagctctgtgctggccttctggaggctcatctgtgacaccttcaggaagatcgtggacagcaagtacttcggccggggcatcatgattgccatcctggtgaacaccctgtccatgggcatcgagtaccacgagcagcctgaggagctgaccaatgccctggagatcagcaacatcgtgttcaccagcctgtttgccctggagatgctgctgaagctgctggtgtatggccccttcggctacatcaagaacccctacaacatctttgatggagtcatcgtggtgatctctgtgtgggagatcgtgggccagcagggcggcggcctgtctgtgctgcggaccttccggctgatgagggtgctgaagctggtgcgcttcctgcctgccctgcagaggcagctggtggtgctgatgaagaccatggacaacgtggccaccttctgcatgctgctgatgctgttcatcttcatcttcagcatcctgggcatgcacctgtttggctgcaagtttgccagcgagagagatggagacaccctgcctgacaggaagaactttgacagcctgctgtgggccatcgtgacagtgttccagatcctgacccaggaggactggaacaaggtgctgtacaacggcatggccagcaccagctcctgggccgccctgtacttcatcgccctgatgaccttcggcaactacgtgctcttcaacctgctggtggccatcctggtggagggcttccaggccgagggagatgccaacaagtctgagagcgagccagacttcttcagccccagcctggatggagatggagacaggaagaagtgcctggccctggtgtccctgggggagcaccctgagctgaggaagagcctgctgcccccactcatcatccacacagctgccacccccatgagcctgcccaagagcaccagcacaggcctgggggaggccctgggccctgccagcaggaggaccagcagcagcggcagcgctgagcccggggccgcccacgagatgaagagccccccatctgcccggagcagcccccacagcccctggagcgctgccagctcctggaccagcagaagaagcagcaggaacagcctgggccgggcccccagcctgaagaggaggagccccagcggggagaggaggagcctgctgagcggggagggccaggagagccaggatgaggaggagagcagcgaggaggagcgggccagccctgctggcagtgaccaccgccaccggggcagcctggagcgggaggccaagagcagctttgacctgcctgacaccctgcaggtgcccggcctgcacaggacagccagcggccggggcagcgccagcgagcaccaggactgcaatggcaagagcgccagcggccgcctggcccgggccctgcggccagatgacccccccctggatggagatgatgctgatgatgagggcaacctgagcaaaggagagcgggtgcgggcctggatccgggcccggctgcctgcctgctgcctggagcgggacagctggagcgcctacatcttccccccccagagccgcttccggctgctgtgccaccgcatcatcacccacaagatgtttgaccacgtggtgctggtgatcatcttcctgaactgcatcaccatcgccatggagcggcccaagattgacccccacagcgctgagcgcatcttcctgaccctgagcaactacatcttcaccgctgtgttcctggccgagatgacagtgaaggtggtggccctgggctggtgctttggagagcaggcctacctgcggagctcctggaatgtgctggatggcctgctggtgctgatcagcgtcatcgacatcctggtgtccatggtgtctgacagcggcaccaagatcctgggcatgctgcgggtgctgcggctgctgcggaccctgcggcccctgcgggtcatcagccgggcccagggcctgaagctggtggtggagaccctgatgagcagcctgaagcccatcggcaacatcgtggtgatctgctgtgccttcttcatcatcttcggcatcctgggcgtgcagctgttcaagggcaagttctttgtgtgccagggcgaggacaccaggaacatcaccaacaagagtgactgtgccgaggccagctaccgctgggtgcgccacaagtacaactttgacaacctgggccaggccctgatgagcctgtttgtgctggccagcaaggatggctgggtggacatcatgtatgatggcctggatgctgtgggcgtggaccagcagcccatcatgaaccacaacccctggatgctgctgtacttcatctccttcctgctgattgtggccttctttgtgctgaacatgtttgtgggcgtggtggtggagaacttccacaagtgccggcagcaccaggaggaggaggaggccaggagaagagaggagaagaggctgcggcggctggagaagaagagaagaaacctgatgctggatgatgtgattgccagcggcagcagcgccagcgctgccagcgaggcccagtgcaagccctactacagcgactacagccgcttccggctgctggtgcaccacctgtgcaccagccactacctggacctcttcatcactggagtcatcggcctgaatgtggtgaccatggccatggagcactaccagcagccccagatcctggatgaggccctgaagatctgcaactacatcttcaccgtcatctttgtgctggagagcgtcttcaagctggtggccttcggcttccgccgcttcttccaggaccgctggaaccagctggacctggccatcgtgctgctgagcatcatgggcatcaccctggaggagattgaggtgaatgccagcctgcccatcaaccccaccatcatccgcatcatgagggtgctgagaattgcccgggtgctgaagctgctgaagatggctgtgggcatgagggccctgctggacaccctgtgggcctggagcagcctggagacctggagcgtgaccaggcacacccctgtgcgggcctgggccgtgatgcccccatttggcaccctggcctggcccagctag

SEQ ID NO: 259723 - DNA, 6786 bp, Artificial Sequence
  derived and/or modified sequence
atggacgaggaggaggacggcgccggcgccgaggagagcggccagccccgttcctttatgcggcttaatgacttatcgggtgctggtggcaggccaggtccggggtccgctgaaaaggaccccggctccgccgactccgaggcggagggcctcccttaccccgcactcgctccagtcgtgtttttttacctgtctcaggacagtcgaccccggtcctggtgtcttagaacggtatgcaatccttggtttgagagaatttcaatgttggtgatccttttaaattgcgttacattgggcatgtttagaccgtgcgaagatatagcttgcgactcacaaagatgtaggatactgcaggcatttgacgacttcatcttcgctttcttcgccgtcgagatggtcgtgaagatggtggccctgggcatcttcggcaaaaagtgttacttgggtgatacttggaaccggctcgatttttttatcgtgatagctggcatgcttgagtacagcctggacctccagaacgtgagcttctcagccgttcgcaccgtcagagtgctacgacccctgcgagccatcaatcgggtcccgagcatgcgaatattagtcacgctgttacttgacacgctacccatgttgggcaatgtgttgcttctctgcttttttgtattctttatattcggcattgtgggcgtccagctttgggccggactactacggaatcgctgctttcttcctgagaatttctcgttgccactttctgttgatctggagagatattatcagactgagaatgaggatgaatcacctttcatctgctcgcagccgcgggagaacggcatgagatcttgtcgctctgtccctaccctgcggggcgacggtggaggtggacccccatgtggcttggactacgaggcttataacagctcgagtaataccacttgtgtaaattggaatcagtattacacgaactgcagcgcaggcgagcataacccctttaagggggctataaattttgacaacatcggatacgcctggattgccatattccaggtgattaccttggagggctgggtcgatattatgtacttcgtgatggacgcccatagtttctacaactttatttactttatactgctgattatcgtggggtcctttttcatgatcaacctgtgtctggtcgtgattgccacacagtttagcgagaccaagcagcgtgagtcccagctaatgcgcgagcagagagtgcgtttcctttccaatgcttctaccctggccagcttcagcgaaccaggctcgtgctacgaagagctactcaagtacctggtgtatatcttgcgaaaggccgctaggcggctcgctcaagtctcaagagcagcaggtgttagagttgggttgctatccagtccagcgcctctgggcggtcaagagacgcagcccagctcctcgtgtagcaggtcacatcggagactgtcagtgcaccatctggttcatcatcatcaccatcatcatcaccattatcatctgggcaatggcacactgagggccccgagagcttcccctgagatacaagaccgggacgcaaatggatcaaggagactgatgctgccaccgcccagtacgccggcccttagcggagcccctcccggcggcgccgagtcagtgcacagcttctaccatgcagactgtcatctggaaccagtgagatgccaggccccacctccccgctcaccgtccgaggctagcgggagaacggttggaagcggtaaagtctatcccaccgtccatacaagccccccgccagaaactctaaaggaaaaggcccttgtggaagtcgctgcttcttccggcccgcctactctgacctcactgaacatacctccgggaccctattcctctatgcacaagttgctcgaaactcagagtacaggggcctgtcagtcctcttgcaagataagctctccttgtctgaaggctgacagcggggcatgcggccccgatagttgcccttattgcgcccgcgccggggctggggaggtcgagctcgcggacagagagatgcccgactccgactccgaggccgtttacgaattcacccaggatgctcagcacagtgatcttagggacccccactcacgtcgccagagatccttaggccccgatgccgaacccagttccgtccttgcgttctggcgtctgatatgcgatactttcaggaaaatcgttgatagcaaatacttcggccgaggaatcatgatcgcaattctcgtaaatacattgtctatgggcatcgagtaccacgaacagccagaagagttgaccaacgccctggaaattagcaacatcgtgtttacaagtctgtttgccttggaaatgctcctgaaactcctcgtttatgggccgtttggatacatcaagaacccctacaatatcttcgacggggtgattgtagtcatttcagtgtgggagatcgttgggcagcagggtgggggccttagtgtactgaggaccttccgactcatgagggtcctcaagctggtgcggttcctgcccgccttgcaacggcagctggtcgtgctgatgaagactatggacaatgtcgcaacattctgtatgttgctgatgctgtttatcttcatcttctctatcctgggcatgcatttgttcggttgcaaattcgcatctgaacgggacggagacactttgccagaccgtaaaaattttgactcattgctgtgggcaatcgttacagtgtttcagattcttacccaggaggactggaataaggtactctacaatggaatggccagtacctctagctgggctgccctttattttattgccctcatgacctttggcaattacgtgctcttcaacttgctggtcgcaattctggttgagggcttccaggccgagggcgacgccaacaagagtgaatccgagcccgattttttctcgccctccttggatggggatggcgacaggaagaagtgcctggcgctcgtgagtcttggggaacatcccgagctgagaaagtctcttctgcctccgctgatcatccacaccgcagcaactcctatgagccttcctaagagtacctctactggtcttggtgaggctttgggaccagcgtcgcggcgaacctcttccagcggaagcgctgaacccggagctgcacacgaaatgaagagcccccccagcgcacggtctagccctcacagtccatggtcggcggcctcatcttggacatctagaagatcatcccgaaactccttgggtagagcccccagtttgaagaggagaagcccatcaggggagaggagatccctgctgtccggtgagggacaggaaagtcaagacgaggaggagagctctgaggaggaacgtgcatcgcccgctggaagtgatcacaggcatcgcgggtctctggagagagaagccaaaagctcttttgatctcccagatactctgcaggtcccaggccttcaccggactgcaagtgggcggggttccgcatcagaacatcaggactgcaacggaaagagcgcgagcggccggctcgcgagagctctgcggccagacgatcctccccttgatggtgacgacgcagatgatgaaggaaacctttccaaaggtgagagggtacgcgcatggattagggctcggttgcctgcatgttgcctggaacgggattcctggagtgcctacattttccctccacagtctcgctttcggctactctgccacagaatcattacacacaagatgttcgatcatgtagtgctcgtgatcatattcctgaactgtattaccatagctatggagcggccaaaaattgacccccatagcgcagagcgcatctttctgaccttgagcaattacatatttaccgcagtgtttcttgctgagatgactgtaaaagtggtcgccctgggatggtgttttggagaacaggcttacctcaggagttcttggaatgttctggacggcctgctcgtgctgatcagtgtgatagacattctagtgagtatggtgtccgacagtggtaccaagatccttggtatgttgagagtgctgaggctgctcagaaccctccgccccctgagggtgatttcacgtgcacagggtctgaagctcgtcgtagagacactgatgagcagcctaaaacctattggcaatattgtggtaatctgctgtgccttcttcattatctttggcatccttggtgtgcagctgtttaaggggaaatttttcgtgtgccagggagaggatacccgcaatatcaccaataagtcagactgcgcagaagcctcctaccgatgggtccgacacaaatataatttcgataacctcgggcaggccttaatgagtctctttgtgcttgcatctaaagatggctgggtcgacatcatgtacgatggtctggacgccgtgggcgttgatcagcagcctattatgaaccataatccatggatgttgctgtattttatcagcttcctgcttatcgtggccttctttgttttgaacatgtttgtgggtgtggtggtagagaattttcacaaatgtagacaacaccaggaggaggaagaggcccggcggcgagaggaaaagagactgcgtcgactggagaagaagcggcgcaatttgatgctagatgacgtgatagcatcagggtcctccgcgtccgcagcctctgaggcgcagtgcaagccctattactctgactacagcaggttccggctcctggtgcaccatctctgtacctcccactacttggatcttttcattacaggcgttatcggcctcaatgtcgtgacaatggcaatggaacactatcagcagccccaaatcttggacgaagcacttaagatttgcaattacatttttactgtgatctttgtgctcgaatctgtgtttaaactcgtcgctttcggtttccgccgcttctttcaggatcgctggaatcaactagatttggctatcgtgctgctttctatcatgggtatcaccttagaagagatcgaggtgaacgcgtccctaccgatcaaccccacgattataaggatcatgagagttctacgaatcgctagggtgctgaagctcctgaaaatggcagtcggcatgcgagctttattggacacagtcatgcaggccctgccccaggtgggcaacctggggctgctttttatgttattatttttcatctttgccgcccttggggtggagctgttcggcgacttggagtgtgacgagacccatccttgcgagggactgggaaggcacgctacgtttcggaactttggaatggcctttttgacactttttagagtaagcaccggggacaattggaacggaatcatgaaggatactttacgagactgtgatcaggaaagtacgtgttacaatacagtgatcagccccatctactttgtcagctttgtgctgacggcccagtttgtgctcgttaacgtcgttattgccgttctcatgaaacatctcgaagagagcaataaggaggccaaggaggaggcggagctggaagccgaattagaactggagatgaagacactaagccctcagccccacagccccctgggctccccttttctttggccgggcgtggagggccctgacagccctgattctcctaagcccggcgccctgcaccctgccgcccatgcgcgcagcgcaagccatttttctctggagcatccgaccatgcagccacatcctacagaactgcccggacccgatctcctgacggttcggaaatcgggagtgtcaaggacccatagtctccccaacgacagctacatgtgcaggcacggctccaccgctgagggacccttgggccaccggggatgggggctgcctaaagcccagagcggttcggttttgtctgtccactctcagccagcggataccagttatatattgcagctgccgaaggacgccccccacttacttcaacctcatagtgcgcctacgtggggcactatccccaaactcccgcctcctggccgtagccccctggcacagcggcccctgcggaggcaggcagcaattcgcactgactcactggatgttcagggtcttgggtctcgcgaggatttattggccgaggtgtccggtccttcccctccacttgccagagcctattcgttttgggggcagagctccacccaggcacaacagcacagtcggtcacactctaaaattagcaagcacatgacacccccagccccctgtcccggaccagaacctaattgggggaaaggcccccccgaaacacgtagtagtctggagctggatacagagcttagctggattagtggggaccttttgcctccaggggggcaggaggaacccccatcccccagagatctgaagaagtgttacagtgtcgaagcacaaagctgtcagcgccgccccactagttggttggacgaacagcggcgacacagtatcgccgtgtcctgccttgattcgggctctcagccacacctgggcacagatccatctaatttagggggccagccgctgggaggcccaggcagtagaccaaaaaaaaagctctctcccccttcaattactatcgacccaccagagtcccagggaccacgcacacccccctcaccaggaatctgcctaaggcgtcgtgcccctagctcggattccaaggaccctctggcgtcaggaccgccggactcaatggcagctagtccgtcgccgaagaaagacgtcttgtctctatccggcctctcatcagatcccgccgatttggacccctag

SEQ ID NO: 259724 - DNA, 5262 bp, Artificial Sequence
  derived and/or modified sequence
atggacgaggaggaggacggcgccggcgccgaggagagcggccagcctaggtctttcatgagactcaatgatctgagtggcgcagggggaagacccggacctgggtctgcggagaaggatcctggctccgcagactcagaagcagaaggacttccctacccagccctcgccccagtggtgtttttttacttaagccaggactcccgccctagatcttggtgccttaggacagtgtgcaacccctggtttgagcgtatctcgatgctggtcatcctgctgaactgtgtgactctgggtatgtttcgcccgtgcgaggatatcgcatgcgatagtcagcggtgtaggatcctgcaggccttcgatgactttattttcgccttcttcgctgtggagatggtggttaagatggtcgctctcggcatatttggaaagaaatgttacctaggtgatacttggaacagactggatttctttattgtcatcgcgggtatgctggaatactctctcgatctgcagaacgtgtcattctcagccgtgaggactgtgcgtgtcctgagaccacttcgggcaataaaccgagtgccctccatgaggatccttgttaccttgctgctggacactctcccaatgctcggaaacgttctactgctttgcttcttcgtgtttttcatcttcggcattgtgggcgtacagctatgggccggactcctgaggaaccgctgtttcctgccggaaaatttttcactccccctgtcggtcgacctggaaaggtactaccagacagagaacgaagacgaatcgccttttatttgcagtcagccgcgcgagaatggcatgcgatcatgtagatcagtccccacactgcgcggcgatggggggggggggccaccttgtggactcgactacgaagcatacaactcttccagtaacacaacctgcgttaattggaaccaatactacactaactgctccgctggcgagcataacccctttaagggcgctatcaacttcgataatatcggctacgcttggattgccatcttccaggttattactttggagggctgggtcgatatcatgtactttgtgatggatgctcactccttctacaattttatttacttcatcctgctgattatcgtcggcagtttttttatgataaacctatgtctagtggtgatcgccacccagttctctgaaaccaaacaaagagagtcccagttgatgagagagcagcgtgtacgattcctatccaacgcatcaacgctggcttctttttcagaacctggaagctgttatgaggagctgctgaagtacctggtttatatcttaaggaaagcggcgaggaggctggcccaggtgtcgcgcgctgccggcgtgcgggtgggattgctcagtagtccagctcctctgggcgggcaggagactcagccatcttccagctgctcaaggtcccaccggcggctctctgtgcaccatttggtgcatcaccaccaccaccaccatcatcattaccatctcgggaatggcacgctacgggccccccgcgcttcaccagaaattcaggatcgtgatgcaaatgggtccaggcggttgatgctcccccccccgagtacacctgcgttgtccggagcaccacctggcggagccgaaagtgtccacagcttttaccacgcagactgccatctggagccagtccgatgtcaggctccaccccctagatctccatcagaagcctcaggtagaacagtggggagcggcaaggtctatccaacagttcacacaagcccgccccctgaaaccctcaaagagaaggccctagttgaagtggctgcctcaagcgggccgccaacgctcacatcgctgaacattccacctggcccatacagttcgatgcacaaactgctggagacccagtccactggggcctgccagagctcttgcaagatatcgagtccatgtttgaaagctgactccggggcatgcgggccagattcatgtccttattgtgcaagggctggggctggcgaggttgaactagccgacagagagatgcccgattctgactctgaggccgtgtatgagtttactcaggacgctcagcatagtgatctaagggatccccactctagacgccagcgcagcttaggtcccgacgcagaacccagttccgttctcgccttctggaggttaatatgtgacacgttccgaaaaatcgtagatagtaagtactttggacgcgggattatgatcgctatactggtcaacaccctgagcatgggcatcgagtaccatgagcagcccgaagagctgaccaacgcattggaaataagtaatatagtgttcacatcgctcttcgctttggaaatgctgctgaagttgctagtttacggtccatttgggtacattaagaatccctataatatttttgatggggtgattgtcgtaatcagtgtgtgggagatcgttggccagcagggcggcggtctgagcgtcctgcgcacatttcgcctgatgagagtgcttaagctggtgaggttccttcctgctctgcagcggcagctcgttgtcctaatgaaaactatggacaatgtcgccacattttgcatgctgctgatgctcttcatctttatctttagcatcctcggcatgcacctgttcggatgtaaatttgcgtcggagagggacggggatacccttcccgatcggaagaattttgactccttgctttgggccatcgtcaccgtctttcagatattgacgcaggaagactggaacaaggtgttgtacaacggcatggccagtacttcgtcctgggccgcattgtatttcatcgcattgatgaccttcggaaattatgtgttgttcaatctgctagtcgcgattctggtagagggatttcaggctgaaggcgacgcgaataagtcagaatctgaaccggacttcttctcaccctcactggacggagatggggaccgcaagaagtgcctcgcattggtctctctcggtgaacatccggaattgcgcaaatccttgctgccccctttaatcatccacaccgccgccacgcccatgtctctgcccaagtctacctccacaggtctgggcgaagcccttggtccggctagtcggcgtacaagctctagcggcagcgccgagccaggagcggctcacgaaatgaagtcaccgcctagtgctcgttcttctcctcactcgccgtggagtgcggcatcttcctggacatctaggcgctcatcacggaacagccttgggagagccccctcactgaaaagacgctctccttcaggtgagagacgaagcctgctgtcaggcgagggacaagaatctcaggacgaagaggagtcgtctgaagaggagcgggccagtccagcaggctccgaccatcgtcaccgcggttcactagagcgtgaagcaaagtcatcttttgatctgccggatactctgcaggtcccagggctgcaccggacagcctcaggcagagggagcgcatccgagcatcaggattgcaacggcaagtcagcctcaggtcgtctggcacgagcattacgaccagatgatcctcccctggacggcgatgacgccgacgacgaaggcaatctgagcaaaggcgagcgggtaagagcctggatccgggcaaggctgccagcctgctgcctggagagggattcttggagtgcctatatattcccacctcagtccagatttcgcctgctctgtcaccgcatcatcacgcataagatgtttgaccacgttgtcctggtcatcatattccttaattgtatcacaatcgcaatggaaagacccaagattgatccacattcagcagagcgcatcttcctgactctttccaactacatcttcacagccgtcttcctcgctgagatgacagttaaggtggtggccctcgggtggtgttttggagagcaggcttacctgagatctagctggaatgtcctggatggactgctggtgctgattagcgtcatcgacatactggtgagcatggtgtcagatagcggcacaaagatcttgggcatgctgagggtgctaaggctcctcagaacactgcggcctttacgggtgatttctcgagctcaaggcttgaagcttgtagtggagacacttatgtcttcgctgaagcctatcggaaacatcgtggtcatttgctgtgccttttttattatctttggtattctcggagtacagctattcaaaggaaaattctttgtgtgtcagggtgaggatacacgtaatatcacaaacaaaagtgattgtgccgaagcgagttaccggtgggttagacacaaatacaatttcgataatcttggacaagccctgatgtcgctgttcgttttagcaagcaaagatgggtgggtggatattatgtatgatggtttggatgcagtcggggtagaccaacagcctataatgaatcacaacccctggatgctgctctattttatctctttcctgctaatcgtcgcattctttgtgttgaatatgtttgtcggtgtagtcgtggagaactttcacaagtgtcggcagcatcaggaagaagaggaggcgcggaggagggaggagaaacgactgagacgattggaaaaaaaaaggcgcaatctgatgttggatgacgttatcgccagcggtagctctgcctcggccgcctcagaagcccagtgtaagccctattacagtgactatagtcgcttccgcctgctggtgcatcacttatgtacgtcacactatttggacctcttcatcactggtgtgattggactgaacgtggtgactatggccatggaacattaccagcaaccccagatcctggacgaggccctaaagatttgcaattacatctttacagttattttcgtcctcgagtcagtcttcaaattagtcgcgtttgggttccgacggttcttccaggacagatggaatcaactggaccttgccatcgtgctcctctcaatcatggggatcaccctcgaggaaatagaggtgaacgcctcgctgccaattaacccgacgatcatcaggattatgcgcgtgctccgaatcgcacgagtgctgaaacttctgaaaatggccgtcgggatgagggccctccttgataccgtcatgcaggctctgccccagctgtgggcttggtcttccctggagacctggtcagtaactcgccacactcccgtgagggcctgggccgtgatgccccccttcggcacgctggcttggccgtcatag

SEQ ID NO: 259725 - DNA, 5241 bp, Artificial Sequence
  derived and/or modified sequence
atggacgaggaggaggacggcgccggcgccgaggagagcggccagcctaggagcttcatgagactcaatgaccttagtggagccggcgggaggcccggccctggaagtgctgaaaaagatcccggaagcgcagactcagaggcagaaggtctgccctatcccgccctggcccctgtggtgttcttctatctgtcacaggacagccgaccacgttcatggtgcctccggacagtttgcaatccgtggtttgagcgcatctccatgctggtaatcttgttgaactgtgttaccctgggtatgttccgcccctgcgaagatatagcatgcgacagccagcgatgcagaattcttcaagctttcgatgatttcatcttcgcctttttcgcagttgagatggttgtaaaaatggtcgctttgggaatcttcgggaagaaatgctaccttggggatacttggaacaggcttgactttttcatcgtgatcgcgggcatgctggaatatagtttagatttgcagaacgtgtctttttctgccgtcaggaccgttcgggtgcttcggcccctgagggcaatcaatcgcgtaccgtctatgcgcatcctggtcactctccttctagatactctcccaatgctgggtaacgttctgctcctgtgtttttttgtgttttttatttttggcattgtgggcgtgcagctgtgggcaggactgctgcggaaccggtgctttctcccagagaacttcagcctcccgctgagcgtagatctggagaggtactatcaaaccgaaaacgaagacgaaagtcccttcatctgctcccagccccgcgaaaacggaatgaggtcttgtaggagcgtgcctacactgcgaggcgacggtgggggggggcctccctgcggcctcgactatgaggcctacaacagcagctctaacactacgtgtgtgaattggaaccagtattacacaaactgtagcgcgggagagcacaatccattcaaaggcgcgattaactttgataatatcggatacgcttggatagcaatattccaggtgatcacactcgagggctgggttgatataatgtacttcgtgatggatgcgcactccttctacaacttcatctatttcatactcctgataattgtcggtagcttttttatgattaacctctgcctcgtagtgattgcaacgcagttctcagagactaagcagagagagagccagctcatgagagaacagcgagtgcggttcctgtcaaatgccagtactttggcctcattctcagagccggggtcctgttacgaggagctgcttaagtacttggtttacatactgaggaaggcagcccgccgtttggcccaagtaagccgtgctgccggagttagagtggggctcctctcctccccggcaccactgggtgggcaggagacccagccgtcgtctagttgttcaaggtcacaccgtagactgtctgtccaccacctcgtccatcaccatcaccaccatcaccatcattaccatttagggaacggcacgcttcgggccccccgggctagtcctgagatccaggacagagacgcaaacggatcgaggcgtctgatgctgccgccaccttccacgcctgccctgagcggcgccccacccggtggggccgaatctgtccactcattttaccatgcagactgccacctcgaaccagttcgctgccaggctcctccaccaaggagtcccagcgaggcttccgggaggacagttggcagtgggaaggtctatcccactgtgcacacctcacctccgcccgagaccctgaaggagaaggctctcgtggaggtggccgcaagtagcgggcctcctaccttgaccagtttgaatatacctccaggaccctactcttctatgcacaagcttcttgagacccagagcacgggcgcttgtcagtcttcatgcaagatcagtagcccttgcctgaaggctgatagtggagcgtgtggtccagacagctgcccttattgcgcccgtgctggggccggcgaggtggagctggcggacagagagatgcccgactctgactccgaggccgtgtatgaattcacccaggatgcccaacattccgatctgagagaccctcactctcggagacagcgtagcttaggacctgatgctgaaccctcgtcagtactagccttttggcggctgatatgtgatacatttcgcaaaatcgtggatagcaagtattttggaagggggataatgatcgctatcctggtcaatacactttcgatgggtatcgagtaccacgagcagcctgaggagctgaccaatgctctggaaatttctaatatcgtgttcacaagcctctttgcactcgagatgctattaaagctgctggtgtacgggcctttcgggtatatcaaaaacccctataacatttttgacggcgttattgtagtcattagcgtctgggagatagtgggtcagcaaggcggcggattgtcagtcctgagaacttttcgactcatgagggtcttgaagcttgtcaggttcttgccggcccttcagcggcagttagttgtgctcatgaagactatggataacgtggccaccttctgtatgcttctcatgttgttcatcttcattttttccatcctggggatgcatctctttggctgcaagtttgcctctgaacgggatggcgataccctgcccgatcggaagaacttcgactcattgctgtgggccatagtcacagtattccaaattctgacccaggaggactggaacaaggttctgtacaatggcatggcgagcacctcttcttgggcggctctgtactttatcgcgcttatgacctttggtaactatgttctgttcaacctgctggtcgcaattctagtggaagggttccaagccgagggggacgccaataagtcagaaagtgagcccgacttcttcagcccttccttagacggtgatggcgatcgaaagaaatgcttggctttggttagcctcggtgaacaccctgagttaaggaagagtttactcccaccgctgattatccacaccgctgcaacccccatgtcgctgcccaagtcaacatctaccgggttgggcgaggcgctgggacccgcaagcaggagaactagcagctcgggttccgccgaacccggcgctgcccacgagatgaaaagtccaccctcggcacgctcaagccctcattcaccttggtcagctgcgagtagctggaccagccggcgcagctcccggaattcactgggccgggcgccatcactgaaacgccgatctcccagcggggaaagacggtctctgctgtcaggagaggggcaagagagtcaggatgaggaggaatctagtgaagaggagcgagcatctccagcaggcagcgatcaccggcataggggctccctggagagagaggctaaatccagctttgacctacccgatactcttcaggtgcccggattgcaccgtaccgcttccggccgtgggagcgcatctgaacaccaggactgcaacggcaagagtgctagtggaaggctggcccgcgcgttgcggccagacgatcctcctttagacggcgatgacgcagacgatgagggtaatctttcgaagggagaacgagtgcgggcctggatcagggctaggctacccgcctgttgcctcgagagggacagttggtcagcctatattttccccccacagagtcggtttaggttgctgtgtcatcggatcattacccataagatgttcgaccacgttgtgcttgtcattatctttctgaattgcattactatcgcaatggaacgacctaaaatcgatccacatagcgccgagagaattttccttaccctgtcgaactatatcttcactgctgtgtttcttgcggagatgacggttaaggtggtcgcactcggttggtgcttcggggagcaggcttacctccggtcatcatggaatgtactggacggcctactggtactgattagtgtgatcgacatactggtgtcaatggtatcagactcaggcacaaagattctggggatgctgagagtgctgcgcctgctgcgaactttacggccacttcgggtgattagccgcgcccaaggcctgaagctggtggtggaaaccttgatgtcctcactgaagccaatcggaaatatcgtggttatatgctgcgctttctttatcattttcggtattttgggggttcaactgtttaagggcaagttctttgtctgtcagggagaggacacccgaaacatcacgaataaatctgactgcgctgaggctagttaccggtgggtcagacacaagtacaatttcgataatctgggtcaagcactcatgtccctgttcgtgctcgcctccaaagacgggtgggtagacatcatgtacgacggtttggacgctgttggcgttgaccagcagcccattatgaaccataacccctggatgctgctgtactttatctcatttctgttgatcgtggccttcttcgtcctcaatatgtttgtgggcgtcgtggtggaaaatttccacaagtgtaggcagcatcaagaggaagaagaggcgcgccgtcgtgaggagaagcgcctgcgtcgcctggagaaaaagcggcggaatttaatgctggacgacgtgatcgcaagcgggtcttccgcaagcgctgcctcagaagcccagtgtaaaccgtattatagcgactactctcgctttagactgctggtgcaccacctctgtacatcacattatttagatctctttatcaccggggtgattggactgaacgtggtaaccatggccatggaacactatcagcagccacagattttagatgaagcgttaaagatttgcaactatatctttactgtaatcttcgtgctggagtcagttttcaaactcgttgccttcgggttccgaaggtttttccaagatcggtggaaccagctggatttggcaattgtgctcctctctatcatggggatcacactagaagagattgaagtcaacgctagcctaccaatcaatcccaccatcatccgtatcatgcgggttctgcgtattgcccgagtgttaaaactcctgaagatggctgttgggatgcgggcgctcctggatacactctgggcctggtctagcctcgagacctggtccgtgacacgccacacaccagtaagagcctgggcagtgatgcctccctttggtacattagcctggccctcttag

SEQ ID NO: 259726 - DNA, 6785 bp, Artificial Sequence
  derived and/or modified sequence
atggacgaggaggaagacggcgcaggggctgaagaaagcggacagccgcgttcctttatgaggcttaacgatctgagtggcgctggaggtaggccaggacccggtagcgctgagaaggaccctggctctgctgatagtgaggcggaggggctgccttatcccgctctcgcccctgtagtgttcttttacttatcacaagactcgcggccacggtcttggtgtctgcgcaccgtatgtaacccttggttcgagcggattagcatgcttgtgatactactgaactgcgttacactcggcatgttccggccatgcgaggacattgcatgcgattcacagaggtgcaggattcttcaagctttcgacgattttatcttcgccttcttcgccgtggaaatggtcgtcaaaatggtcgcccttgggattttcggcaagaagtgttacctcggtgatacgtggaacaggctcgatttcttcatcgtaatcgctgggatgctagagtactctctggatcttcagaatgtttcattcagcgctgtgcggactgttcgtgtgttgaggcccttaagagctatcaatcgtgttccaagtatgcgaattctcgtcacactcctgttagacacactgcccatgctcgggaatgttcttttgctttgtttctttgttttctttatttttgggattgtcggggtccaactgtgggctgggctgctgcgaaacaggtgcttcctaccagagaacttctcactgcccttatccgtagacttggagcgttactatcagacagagaatgaagatgagagcccttttatctgcagtcagccaagggagaacggcatgaggagttgccgttccgtccccacactgcgcggtgatggaggtgggggtccgccatgtggtctggactatgaggcatataactccagcagcaacacaacttgcgtgaactggaatcaatactatacgaattgctctgccggtgagcataacccctttaaaggggctatcaatttcgataacatcggctatgcctggatcgccatttttcaggtcattacgctggagggatgggtcgacattatgtactttgtcatggacgcgcactcattttataactttatctatttcattctactaattatcgtgggatccttttttatgataaacctctgtctcgtggtgatcgcaacccagttttccgagacgaagcagcgagaatctcagcttatgagggagcagcgagtgcggtttctgtccaacgcatccacattggcttccttctccgagcctggaagttgttacgaggaactgctgaaatacctcgtttatatactcagaaaagcggctagacgcttagcccaggtctcccgcgcagctggagtccgggtgggacttctttccagtcccgcaccactcggcggtcaggagactcaaccatcctctagctgttctcgaagtcatcgtaggctttcagtccaccatctggtgcatcaccatcaccatcaccatcaccattaccatctgggcaacggcacccttcgagccccacgcgctagcccagagatccaggacagggatgcaaatggttctagaagactgatgctaccacctccgtcaactcctgcgctgtcaggcgctcctccaggaggcgctgagtcagtccactccttctaccatgctgattgccatctggaacccgtccggtgtcaggccccaccccctaggtccccatcggaggcctccggaaggaccgtaggtagtggaaaagtatacccgacagtccacacaagtcctcctcctgagaccctaaaggaaaaggccttggttgaagtcgctgcgtcttcaggccctcctaccctaacgtccctgaacattccgccaggaccctacagcagcatgcacaagctgcttgagacacagagcacaggggcttgccagtcaagctgcaaaatcagctctccatgtctgaaagcggactctggggcatgcggcccagacagctgcccctattgcgccagggctggcgcaggggaagtcgagttggctgatagagagatgccagattctgactcagaagcggtctacgagttcacacaagacgcgcaacactctgatctccgggacccacactcaagaagacaacgtagtttaggacccgacgccgagccctcatcagtgctggctttctggcggttgatctgcgacacctttcggaagatcgtagatagcaagtactttggcaggggcatcatgatcgcaattttagtgaatacccttagcatgggcattgagtaccacgagcagccggaagaactgaccaacgcccttgagatctcaaacatcgtatttacttccctgtttgccctggaaatgctgctgaagcttttagtgtatggccctttcggctatataaaaaatccatataacatctttgatggcgtgatagtggtcatttctgtgtgggagatcgtaggccagcaggggggagggcttagtgtgctccggactttccggcttatgagagtgttgaagctcgtgcggtttctcccggcactgcaacggcaattagtagtgttgatgaaaacgatggataatgtggctaccttttgcatgctgctgatgctgtttattttcatcttctccattttagggatgcacctgttcggctgcaagtttgctagcgagcgggacggtgacactctgcccgaccgaaagaatttcgacagtctgctgtgggcgattgtcactgtgttccagatcctgactcaggaggactggaacaaagtcctatataacggaatggcttcaacaagctcgtgggcagccctttatttcattgccctgatgaccttcggcaactacgtgttgttcaatctcctcgtggctatcctggtcgagggattccaggccgaaggcgacgccaataagtcagaatccgaacccgactttttctctccctcgttagacggagatggagaccgtaagaaatgtttggccctggtgtccctcggcgagcatccagaacttaggaagtctctgctcccccctctgattattcacacagcagccaccccaatgtcactcccaaaatctacttctacaggccttggcgaggcattaggacctgcgtccaggcgtaccagttcgagtgggtcagcagaacccggagcagcccacgaaatgaagtcgcctcccagcgcaaggtcttctcctcattcgccctggtctgctgcttcaagctggactagcagacggtcttcacggaacagtctgggcagagccccatcacttaaacgccgttcaccctcgggagaaagaaggtctctcctcagcggcgaagggcaggaatcacaggacgaggaagaatccagcgaggaagagcgtgcatctcccgctggatccgatcacagacaccgcggatctctggagcgcgaagccaagagctcatttgacctccccgacaccctgcaggtgcctggccttcacaggacggccagtgggaggggcagtgccagcgaacatcaggactgtaacggaaaaagcgcttcgggccgactcgcccgagcactgagaccagatgaccctcctctggatggtgatgatgcagacgacgaaggcaatttgtccaaaggtgaaagagtacgagcgtggattcgggctcggctcccagcatgttgcctggagagggacagttggagcgcctacattttcccaccacagtcaaggttccgcctgctgtgtcacagaattatcacccataagatgtttgaccacgtggtacttgtgatcattttcctaaattgcatcaccatcgctatggaacggcctaagattgaccctcacagcgcggagcgaatcttcttaacccttagtaactatatctttactgcagtgttcttggcggagatgaccgtgaaagtagttgctttgggttggtgcttcggcgagcaggcttacttacgcagtagctggaacgtcttggatggactgctggtactgatcagcgtgattgatatcctcgttagcatggtgagcgatagcggcaccaagatcctgggtatgctcagggtcctgcgcctgcttcgtacactgcgccctttgagggtgatcagccgggcacagggcctgaaactggttgtggaaacacttatgagttccctcaaaccgatcgggaacattgtcgtaatatgctgtgcattctttataattttcgggattctgggcgtgcagctgttcaaaggaaagttttttgtgtgtcaaggcgaggacacccggaacatcacaaacaaatctgattgtgcagaggcctcctacaggtgggtgagacacaagtataacttcgataatctgggacaggctctgatgtctctattcgttcttgcctccaaagatgggtgggtggacattatgtacgacggcctcgacgctgtaggtgtagatcaacagccaattatgaaccataatccctggatgttgctgtactttatcagtttcctattgatcgtggctttcttcgttctgaatatgttcgtgggtgtcgtggtggaaaattttcataagtgcaggcaacaccaagaggaggaagaggcaagaagacgggaggagaagaggttgcgacgtcttgaaaagaagaggagaaatttgatgctggatgatgtgatagcctctggatcttcggcctcagcagcttcggaggctcaatgtaagccttattattcagattacagccgattccgcctcctcgtccaccatctatgcacatcgcattacttagacctgtttattaccggggtcataggactgaacgtcgtgactatggctatggaacactaccaacaaccacagatattggatgaggctctgaagatttgtaactatatttttacggtcatcttcgtgctggagtccgtgtttaagttagtggctttcgggttccgaagattttttcaagatcgctggaaccagctagatctcgcgattgtgttactcagcatcatgggtattaccctggaagagatcgaagtgaacgccagcctgccgatcaaccccaccattatcagaattatgcgcgtgcttagaatagcaagggttctgaagctcctgaagatggctgtgggaatgcgcgcactgctcgatactgtgatgcaagctttaccccaggtcggaaatctgggactactgtttatgctgttgttctttatattcgccgcactgggtgtcgaattgtttggcgaccttgaatgtgatgagacccacccctgcgagggactcggcaggcatgccaccttcaggaattttggtatggcattccttactctgttcagggtgtcgaccggcgacaattggaacgggatcatgaaggataccctgcgcgattgtgaccaagagagcacctgctacaatactgtgatttcccctatctacttcgtgtccttcgtcctgactgcgcaattcgtactggtgaacgtagtcattgcagtgctgatgaagcatcttgaagagagcaataaggaagcaaaggaagaagccgaacttgaagcagaactcgagttggaaatgaaaaccctttcccctcagccacatagcccactcggtagtccatttttatggccaggggtggagggcccagatagtccggactccccgaaaccaggcgcattgcaccccgctgcccacgcacggagtgcatctcacttttcgttagagcaccctactatgcagcctcacccgacagaactccccggacccgacctactgactgttcgcaagtccggggtttctaggacccacagtctccccaacgattcctacatgtgcagacacggctccactgctgaaggtcccctggggcatagaggatggggtcttccgaaggcccagtctggcagtgttctgagcgtccacagccaaccggctgacacctcctacatcctacagttacccaaagatgctcctcatttattacagccacattcggcccctacttggggcaccattcccaagcttccccctccgggtaggtctccacttgcccagagacctcttaggcggcaggccgctattagaaccgatagcctcgatgtccaaggcctcggatcccgtgaagacttactggccgaagtttcaggcccatctccccctctggcaagagcatactccttctggggccagtcctccacgcaggctcaacagcattctaggagccattctaaaatatctaagcatatgacacctcccgcaccttgtccaggcccagagccgaactgggggaaggggcctcctgagacaaggagcagccttgagttagacacggaactttcatggatttccggggatctcctgcccccaggtgggcaggaggagcccccatcgccacgtgatctcaaaaagtgctacagcgttgaagctcagagctgccagcggagacccacatcctggctagacgaacaacggaggcacagcatcgccgtttcctgtctggactcaggctcccagccgcatctcggaacagatccatccaaccttggaggccagcctctgggcggaccaggatctcgcccaaagaagaagctatcaccgccttcgattacgatcgaccctccggagtcgcaaggcccacggacacccccttccccgggaatatgtcttcgacggagagcgccttccagcgactccaaggaccccttagcaagtggaccgccagattccatggctgcatctccatcacccaaaaaggacgtcctgagcttgtccggattatcaagcgacccagcagacttagaccctta

SEQ ID NO: 259727 - DNA, 5261 bp, Artificial Sequence
  derived and/or modified sequence
atggacgaggaggaggacggagctggggctgaggaaagtggccagccaaggagtttcatgcgcttaaacgacctgagcggggcaggcggaagacccggacctgggtcagctgaaaaagacccgggttctgccgatagtgaggccgaaggtctcccttatcctgccttggccccagtcgtcttcttctatctgagccaggattctcgtccacgtagttggtgcctgcggaccgtatgcaacccctggtttgagagaatctcaatgctagtgatcctcctgaactgtgtgacactgggcatgttcagaccatgtgaagatattgcatgtgacagccaaagatgtcgcatattgcaagccttcgatgattttatcttcgcatttttcgccgtcgagatggtggttaaaatggtggcgttgggcatcttcgggaagaagtgctatctcggcgatacctggaaccggctcgatttctttattgttattgcgggaatgctcgagtatagcttggatctccagaacgtgagcttttccgctgtgagaaccgtccgtgtactaagacccctgcgggctatcaacagggtaccatccatgaggatattggtgaccttgctgttagacaccctccctatgctcggcaacgtgctgctgctttgttttttcgtctttttcatctttgggattgtgggggtgcagctgtgggcaggtctgctgcgtaacagatgctttttgcccgaaaacttctctctgccattgtcagtggacctggagcgatattaccagacggaaaatgaggacgagagccctttcatttgttcacagccccgagaaaatggaatgaggagttgccgcagcgtccccacattgcgaggagatgggggtggtggccctccctgtggcctggattatgaagcctacaactcttcatctaatacaacctgtgtgaattggaatcagtattatactaactgttccgcaggcgaacacaatccctttaagggggctatcaattttgacaatattgggtatgcatggattgcgattttccaggtcattactctggagggatgggtggatataatgtacttcgtgatggatgcacattctttctacaacttcatttactttatcctgctgataatcgtcgggtccttcttcatgattaacctgtgtcttgtggtcattgccacacagttcagcgaaaccaagcaacgagaatcacagctcatgcgggaacagcgcgtgcgtttcttgagtaacgcgagcactttagcctcattctctgagccaggcagttgctacgaagaactcctgaagtatctagtgtacatcctcaggaaagccgctcggaggctggcccaggtgtcaagagccgcaggagtcagagtggggctcttatccagtcctgctcctctgggcggacaagagacgcagccctcgagctcctgcagtcgctcccatcgcagactatctgtacaccatttggtgcaccaccatcatcaccatcatcaccactaccacctgggcaacggtaccttgcgagcccctcgcgcttcacccgaaattcaagatcgagacgccaacggctcaaggagactcatgctgcctccccctagtactccagcattgtccggagctccacccggtggcgcagaaagcgtccacagtttctatcacgccgattgccatctcgaaccagttagatgccaagcccctcccccacgtagcccttctgaggcgtcgggccgaacagttggctctggcaaggtttacccaaccgtgcacacctcacctcccccagaaaccctgaaagagaaggccttggtagaggtggccgcttccagcggaccgcctacacttacgtcattaaatataccacctggcccttatagcagtatgcacaagctattagagacacaatctactggtgcttgtcagagctcctgcaaaataagtagcccgtgtctcaaggctgactctggggcatgtggccctgatagttgcccatattgcgcccgtgcaggcgcaggggaagtcgagctggccgatagggagatgcctgacagcgattccgaggccgtatacgaatttacccaagatgcccagcactctgatctccgggacccacatagtaggcgccagagaagcctggggcctgatgccgaaccatcttcagttctcgctttttggagactgatctgcgacaccttcagaaaaatcgtcgattcgaaatacttcggcagggggatcatgatcgccatcctggtcaataccctgtccatgggaatagagtatcacgagcagcctgaggaattgactaatgccctagaaattagtaacatagtcttcaccagcctgttcgcgttggaaatgctcctgaagctcttagtctacgggccatttggatacattaaaaatccctataatatctttgatggagtaatagttgtgataagtgtgtgggagatcgtcgggcagcagggagggggattaagcgtgctcagaaccttcaggctgatgagggttttaaagctggtgcgcttcctgccagcactgcagagacagctggtcgttcttatgaagacaatggataacgtcgccaccttttgcatgttgctgatgctttttatattcattttttccatcctgggcatgcatctgttcggatgtaaattcgcctcggagcgtgacggcgacacactgccggaccggaagaatttcgattctttgctgtgggctatcgtgactgtgttccagatcctgactcaggaagattggaataaggtcctgtacaacggcatggcttccacctcatcctgggccgctctgtacttcatcgccctgatgaccttcggaaattacgtcctttttaacttactggtagcaatactggtggagggtttccaggcagagggtgacgcgaacaaatccgaaagcgaacccgatttcttctccccctctctcgacggtgatggggacagaaaaaagtgccttgcactggtgagcctgggcgagcaccccgaactgcgcaagagccttctccctcccctgatcatacacacagctgccacaccgatgagcctccctaaatcaactagcacaggcctgggtgaggccctggggcctgcttccaggaggacctcaagcagcggctccgccgaaccgggtgcagcccatgaaatgaagagccccccaagtgcacgttcctcaccccacagtccttggtcagctgcatccagctggactagccgcagaagctcgcgaaactccctaggtcgagcgccttctctgaagaggagaagtcctagcggcgagcgtaggtcactgctttccggagaggggcaggaatcacaggacgaggaggaaagcagcgaggaagagagagctagcccagcaggctcagaccatcggcacaggggctccctggaaagagaggcaaaaagctcattcgatctgcctgataccctgcaggtcccgggtctccacagaacggccagcgggagaggctctgctagtgagcatcaggattgtaacggcaaaagcgccagtggtcggctagcacgagcacttaggcctgacgaccctcctctcgacggcgatgacgctgacgacgagggtaacttgtccaaaggcgaaagagtgcgggcttggatcagagcaaggctgccagcttgttgccttgaaagagacagttggtcagcttatatctttcccccacagagcagattcaggttgctgtgtcaccgaataattactcacaaaatgttcgatcacgtggttttggtgatcatttttcttaattgtattaccattgcaatggaaaggcctaaaattgacccacactccgcagagcgcatctttctaactctcagcaattacatcttcacagcggtgttcctcgccgagatgaccgttaaggtggtggctcttgggtggtgttttggcgagcaagcatatctgcgcagttcctggaatgtcctagatgggcttctggtcctgatttctgttattgacatcctggtttctatggtgtcagattccgggactaagatcctcggtatgcttagagtgttaaggctgctcagaacattgagacccctacgtgttatatcacgtgcccagggtctgaagctggtggtcgaaacactgatgtccagcctgaaacccatcggaaatatcgtggttatctgttgtgcctttttcatcatcttcgggattctcggcgtccagctgttcaaaggcaaattttttgtatgtcagggcgaggacactcgaaatatcaccaataagagcgactgcgctgaggcatcataccgatgggtcaggcacaagtacaatttcgacaatctgggccaggccctgatgtcactgtttgtactcgcgtccaaggacggttgggtggatatcatgtatgatgggctagatgcagtgggcgtcgaccagcagcctatcatgaaccataacccctggatgctcttgtacttcatctccttcctcttgatagtcgctttcttcgttcttaacatgtttgtgggggtggtggtggaaaacttccacaagtgtcggcagcatcaggaagaggaagaggctcgccgaagggaggaaaagcgccttaggcgactggaaaagaaaaggcgcaatctgatgctggacgacgtcattgcatccggctccagtgcatccgccgctagcgaggcccaatgtaaaccttactacagcgactactctaggttccgcctgctggtgcaccatctctgcaccagccactatctggatctgttcataacgggagtaatcggcttgaacgtggtgactatggctatggagcactaccagcaaccgcagatactggatgaggcattgaagatatgcaattatatcttcacggttatattcgttttggagtccgtcttcaagctagtggcatttgggtttagaagattcttccaggacagatggaaccagctcgaccttgccattgtgctgctgtcaatcatggggattacccttgaggaaatagaagtcaacgcttcactgccgatcaaccctacaatcatccgtatcatgagagttttgcggatcgctagagtgctcaagctgttgaaaatggcagtcggcatgagggcacttttagacaccgtgatgcaggctttgccccagctttgggcttggagcagcctggagacctggtcagttacccgacatacccctgttagagcatgggcagtcatgcccccattcgggaccctcgcgtggcccagtta

SEQ ID NO: 259728 - DNA, 5240 bp, Artificial Sequence
  derived and/or modified sequence
atggacgaggaagaggacggggcaggagctgaggaatcaggccagccgaggtcttttatgcgtcttaacgacctgtctggcgctggtggtcgtccaggtcctggcagcgccgaaaaggaccccggaagcgcagactccgaagccgagggactcccttaccctgccctcgcccctgtggttttcttctatcttagccaggattcaaggccgcgatcttggtgtctgcgcactgtgtgcaacccatggttcgaacggatttctatgcttgtgatattgctgaattgcgtcacccttgggatgttccggccttgcgaagacatcgcttgtgattctcaacgttgtagaatcctgcaagcattcgacgatttcatctttgcgttttttgcagtggagatggttgttaagatggtggctctgggaatatttgggaaaaaatgctacctcggagatacttggaataggctcgatttcttcatcgtcattgccggtatgttggagtattcccttgacctgcagaatgtgtctttttccgctgttcggaccgtgagggtactgaggcccttgcgggctattaatcgagtaccttcaatgcggattctggtaacactgcttctcgacacgctgcctatgctagggaacgttttgcttttgtgtttcttcgtgtttttcattttcggaattgtgggggttcaactgtgggcagggcttctcaggaatcgctgttttcttccagagaacttcagcctgcccctcagcgtggatctcgaaagatattatcaaacggagaacgaagatgaatctcctttcatctgtagccagccacgtgaaaacggtatgagatcatgcaggtcagtgccaaccctgcgcggagatggagggggaggcccaccgtgcggtctagattacgaagcctataactcatcatctaatactacttgcgtaaattggaaccaatactatacgaattgctccgccggagaacataacccctttaagggcgcaatcaactttgacaacataggttatgcgtggattgccatctttcaggtaataacgctggaagggtgggtggacattatgtatttcgtgatggatgctcactctttctataactttatttatttcatacttctcattattgtaggcagcttcttcatgattaatctgtgcctcgtggtgatagctactcagttcagcgaaactaaacaacgagagtcccaacttatgcgcgaacagcgcgtaaggtttctttccaatgcaagcacactggctagcttctccgagcccggttcctgttatgaagagctccttaaatatctcgtatatatcttgcgtaaggccgctagaagactggcgcaagtcagcagagccgctggagtgagggttgggttgctgagcagtccagcaccactcggaggtcaggagactcagccctcatcttcatgtagtcggtcccaccgccgactcagcgtgcaccacttagtgcatcaccaccatcaccatcatcaccactatcacctgggcaatggcaccctgcgtgccccacgggcaagccctgagatacaggatagagacgccaacgggtccaggcgcctcatgctgccaccacctagtacacccgctctttcgggtgctccgccaggcggagcagagagcgtgcatagcttttatcatgctgactgtcatctcgaacctgtccgctgccaagccccaccacccaggagtccctccgaagcatcaggacgtactgtgggctccggaaaggtttatcctactgtccacacctccccgcctcctgagacattgaaagagaaggccctggtcgaggtagccgcatccagcggaccccctactctcaccagcctgaatatacctccgggaccctatagctccatgcataagttgttggagacgcagagtaccggagcatgccagtcttcatgtaagattagctcaccttgtctgaaggccgattcaggggcatgtggtccagatagctgtccatattgtgccagagctggggctggtgaagttgaactcgctgatagagaaatgcccgactcagattcagaggccgtgtatgagtttacgcaggatgctcagcactctgatctgagagacccccattctaggcgacagaggagtctagggcctgacgccgagccctcctccgtcctggccttctggcgcctcatctgtgacacgttccgcaaaatcgtcgactcaaagtacttcggacgcggtatcatgatagctattctggtcaatacacttagtatgggtatcgagtatcatgagcagccagaagagctgaccaacgcccttgagatctccaacatcgtttttactagcctgttcgcattggagatgctgctgaagcttctggtgtacggaccatttggatacattaaaaacccctataacatctttgacggtgttatagttgtgatttcagtgtgggaaatcgtcgggcaacagggcggaggactctccgtgttgaggacctttagacttatgcgcgtgctgaagctcgttaggtttttacccgctctgcaacgacagctggtcgttctaatgaagaccatggacaacgtggctactttctgtatgttgctaatgttgttcatttttatattctcgatcctgggaatgcatttatttggctgcaagttcgcgagtgaacgcgacggcgacactctacctgatcgaaagaatttcgactctctgttatgggccatcgtgaccgtgttccaaatcttaacccaggaagattggaacaaagtcctctataacggaatggctagtacgagttcatgggcagctctttactttatagcactcatgacattcggaaactatgttctgtttaatcttctggttgccatcctggtagaaggcttccaagccgaaggagatgctaataaatctgagtccgaacccgacttcttcagccctagtctggacggcgatggggacagaaagaagtgtctcgctttagtgagcctaggtgaacatcccgagctgcgcaaatccctgctgccaccgctaattatacacaccgccgcaactccaatgtcgctccctaaaagtacatctacaggcctaggagaggctctggggcctgcctcacgcaggacaagttcaagcggcagcgccgagcccggtgctgcacacgaaatgaaatctcctcctagtgcaagatcctctccccacagcccttggagcgctgctagcagctggacaagccggcgaagcagcagaaatagtctgggtcgcgcaccttcattaaaacggcgaagcccttccggcgagaggcgttctttgctgtcaggagagggacaagaatcccaggatgaagaagagtcctcagaagaggaaagagccagccctgcgggaagcgatcacagacaccgaggtagcctggaaagagaagcaaaatcttccttcgacctaccggatactttgcaggtgcccggtctccacagaaccgcaagcgggaggggatccgcttccgagcatcaggactgcaatggcaaaagcgctagtgggcgtctggccagggccctgcggcctgatgatcccccactcgacggggatgacgcagatgatgagggaaacctgtctaagggtgaacgagtgcgagcttggattcgtgcacgactccccgcatgctgtttggagagagatagctggtcggcctacattttcccgcctcagagccggttccggttgttatgccaccgaataatcactcacaagatgttcgaccacgtcgtgctggtgattatattccttaactgcatcaccatcgctatggagcggccaaagatcgacccacactccgctgagagaatatttctgacactcagcaactatattttcaccgctgtgttcctggctgaaatgacagtcaaggtggtcgccctcggctggtgtttcggagaacaggcctacctccgctcatcatggaacgtgcttgacgggttactcgtcctcattagtgtcatagatatcctggtgtcaatggtcagcgattccggaaccaaaattctcggtatgctgcgggtgctgagactgctgaggacactgcgaccgctgcgagtgataagcagggcccagggcctgaagctcgtggtggaaacgctcatgtcctcactcaagcctatcggtaatattgtagtaatctgttgtgcatttttcatcatcttcggaatcctgggggtccagttatttaaaggcaagttcttcgtgtgtcagggcgaagacacaaggaacatcactaacaagagtgattgtgcagaggctagttatcgctgggttcgccataagtacaacttcgacaacttgggacaggctctgatgtccctctttgtcttagcgagtaaagatggttgggtggacataatgtacgatgggctggacgctgttggcgttgatcagcagcccatcatgaaccacaacccctggatgctactctattttatcagctttctcctgattgttgcctttttcgttttaaatatgtttgtaggcgtggtggtggagaactttcacaaatgcagacagcaccaggaggaagaggaggccaggcgcagagaggaaaaacgtttacgtcggctcgaaaagaagcgcaggaacctaatgctggacgacgtaatagcttcaggatccagtgcatcagcagctagcgaagcccagtgtaaaccgtactattccgattactctagattcagattgctcgtacatcatctgtgtaccagccactatcttgatcttttcattacaggggtgattggcctgaatgttgtcaccatggccatggaacattatcagcagccgcaaatcctggatgaggctctgaagatatgcaactatatctttacagtaatttttgtgctggagtccgtgtttaagcttgtggcattcggcttccgccgattcttccaagaccggtggaatcaactggatctggccattgttctgctcagcatcatgggcattacactggaggaaatcgaggtgaatgcgtcactaccaatcaacccgacgatcatcaggatcatgcgtgttttgcgcatcgcgagagtcctcaagctgctgaaaatggccgtaggtatgcgcgctctgcttgatactctgtgggcctggtccagtttggagacttggtctgtcacgagacatacccctgtccgggcatgggctgtcatgcccccattcggcacattagcttggccctcata

SEQ ID NO: 259729 - DNA, 7497 bp, Artificial Sequence
  derived and/or modified sequence
ccgccctccgccgctgccccccttttcgttcgccctctcggggcggcttcgccgaaggtagcgccgaatccggcaaccggagcctgggcgcgaagcgaagaagccggaacaaagtgagggggagccggccggctggcccgggaagccccaggggcgcaggggaagcgggactcgcgccgggcggggtttccctgcgccccggcgccccgcgggcagcatgcccctgcgggcagggggagctgggctgaactggccctcccgggggctcagcttgcgccctagagcccaccagatgtgcccccgccggggcccccgggttgcgtgaggacacctcctctgaggggcgccgcttgcccctctccggatcgcccggggccccggctggccagaggatggacgaggaggaggatggagcgggcgccgaggagtcgggacagccccggagcttcatgcggctcaacgacctgtcgggggccgggggccggccggggccggggtcagcagaaaaggacccgggcagcgcggactccgaggcggaggggctgccgtacccggcgctggccccggtggttttcttctacttgagccaggacagccgcccgcggagctggtgtctccgcacggtctgtaacccctggtttgagcgcatcagcatgttggtcatccttctcaactgcgtgaccctgggcatgttccggccatgcgaggacatcgcctgtgactcccagcgctgccggatcctgcaggcctttgatgacttcatctttgccttctttgccgtggagatggtggtgaagatggtggccttgggcatctttgggaaaaagtgttacctgggagacacttggaaccggcttgactttttcatcgtcatcgcagggatgctggagtactcgctggacctgcagaacgtcagcttctcagctgtcaggacagtccgtgtgctgcgaccgctcagggccattaaccgggtgcccagcatgcgcatccttgtcacgttgctgctggatacgctgcccatgctgggcaacgtcctgctgctctgcttcttcgtcttcttcatcttcggcatcgtcggcgtccagctgtgggcagggctgcttcggaaccgatgcttcctacctgagaatttcagcctccccctgagcgtggacctggagcgctattaccagacagagaacgaggatgagagccccttcatctgctcccagccacgcgagaacggcatgcggtcctgcagaagcgtgcccacgctgcgcggggacgggggcggtggcccaccttgcggtctggactatgaggcctacaacagctccagcaacaccacctgtgtcaactggaaccagtactacaccaactgctcagcgggggagcacaaccccttcaagggcgccatcaactttgacaacattggctatgcctggatcgccatcttccaggtcatcacgctggagggctgggtcgacatcatgtactttgtgatggatgctcattccttctacaatttcatctacttcatcctcctcatcatcgtgggctccttcttcatgatcaacctgtgcctggtggtgattgccacgcagttctcagagaccaagcagcgggaaagccagctgatgcgggagcagcgtgtgcggttcctgtccaacgccagcaccctggctagcttctctgagcccggcagctgctatgaggagctgctcaagtacctggtgtacatccttcgtaaggcagcccgcaggctggctcaggtctctcgggcagcaggtgtgcgggttgggctgctcagcagcccagcacccctcgggggccaggagacccagcccagcagcagctgctctcgctcccaccgccgcctatccgtccaccacctggtgcaccaccaccaccaccatcaccaccactaccacctgggcaatgggacgctcagggccccccgggccagcccggagatccaggacagggatgccaatgggtcccgccggctcatgctgccaccaccctcgacgcctgccctctccggggccccccctggtggcgcagagtctgtgcacagcttctaccatgccgactgccacttagagccagtccgctgccaggcgccccctcccaggtccccatctgaggcatccggcaggactgtgggcagcgggaaggtgtatcccaccgtgcacaccagccctccaccggagacgctgaaggagaaggcactagtagaggtggctgccagctctgggcccccaaccctcaccagcctcaacatcccacccgggccctacagctccatgcacaagctgctggagacacagagtacaggtgcctgccaaagctcttgcaagatctccagcccttgcttgaaagcagacagtggagcctgtggtccagacagctgcccctactgtgcccgggccggggcaggggaggtggagctcgccgaccgtgaaatgcctgactcagacagcgaggcagtttatgagttcacacaggatgcccagcacagcgacctccgggacccccacagccggcggcaacggagcctgggcccagatgcagagcccagctctgtgctggccttctggaggctaatctgtgacaccttccgaaagattgtggacagcaagtactttggccggggaatcatgatcgccatcctggtcaacacactcagcatgggcatcgaataccacgagcagcccgaggagcttaccaacgccctagaaatcagcaacatcgtcttcaccagcctctttgccctggagatgctgctgaagctgcttgtgtatggtccctttggctacatcaagaatccctacaacatcttcgatggtgtcattgtggtcatcagcgtgtgggagatcgtgggccagcaggggggcggcctgtcggtgctgcggaccttccgcctgatgcgtgtgctgaagctggtgcgcttcctgccggcgctgcagcggcagctggtggtgctcatgaagaccatggacaacgtggccaccttctgcatgctgcttatgctcttcatcttcatcttcagcatcctgggcatgcatctcttcggctgcaagtttgcctctgagcgggatggggacaccctgccagaccggaagaattttgactccttgctctgggccatcgtcactgtctttcagatcctgacccaggaggactggaacaaagtcctctacaatggtatggcctccacgtcgtcctgggcggccctttatttcattgccctcatgaccttcggcaactacgtgctcttcaatttgctggtcgccattctggtggagggcttccaggcggagggagatgccaacaagtccgaatcagagcccgatttcttctcacccagcctggatggtgatggggacaggaagaagtgcttggccttggtgtccctgggagagcacccggagctgcggaagagcctgctgccgcctctcatcatccacacggccgccacacccatgtcgctgcccaagagcaccagcacgggcctgggcgaggcgctgggccctgcgtcgcgccgcaccagcagcagcgggtcggcagagcctggggcggcccacgagatgaagtcaccgcccagcgcccgcagctctccgcacagcccctggagcgctgcaagcagctggaccagcaggcgctccagccggaacagcctcggccgtgcacccagcctgaagcggagaagcccaagtggagagcggcggtccctgttgtcgggagaaggccaggagagccaggatgaagaggagagctcagaagaggagcgggccagccctgcgggcagtgaccatcgccacagggggtccctggagcgggaggccaagagttcctttgacctgccagacacactgcaggtgccagggctgcatcgcactgccagtggccgagggtctgcttctgagcaccaggactgcaatggcaagtcggcttcagggcgcctggcccgggccctgcggcctgatgaccccccactggatggggatgacgccgatgacgagggcaacctgagcaaaggggaacgggtccgcgcgtggatccgagcccgactccctgcctgctgcctcgagcgagactcctggtcagcctacatcttccctcctcagtccaggttccgcctcctgtgtcaccggatcatcacccacaagatgttcgaccacgtggtccttgtcatcatcttccttaactgcatcaccatcgccatggagcgccccaaaattgacccccacagcgctgaacgcatcttcctgaccctctccaattacatcttcaccgcagtctttctggctgaaatgacagtgaaggtggtggcactgggctggtgcttcggggagcaggcgtacctgcggagcagttggaacgtgctggacgggctgttggtgctcatctccgtcatcgacattctggtgtccatggtctctgacagcggcaccaagatcctgggcatgctgagggtgctgcggctgctgcggaccctgcgcccgctcagggtgatcagccgggcgcaggggctgaagctggtggtggagacgctgatgtcctcactgaaacccatcggcaacattgtagtcatctgctgtgccttcttcatcattttcggcatcttgggggtgcagctcttcaaagggaagtttttcgtgtgccagggcgaggataccaggaacatcaccaataaatcggactgtgccgaggccagttaccggtgggtccggcacaagtacaactttgacaaccttggccaggccctgatgtccctgttcgttttggcctccaaggatggttgggtggacatcatgtacgatgggctggatgctgtgggcgtggaccagcagcccatcatgaaccacaacccctggatgctgctgtacttcatctcgttcctgctcattgtggccttctttgtcctgaacatgtttgtgggtgtggtggtggagaacttccacaagtgtcggcagcaccaggaggaagaggaggcccggcggcgggaggagaagcgcctacgaagactggagaaaaagagaaggaatctaatgctggacgatgtaattgcttccggcagctcagccagcgctgcgtcagaagcccagtgcaaaccttactactccgactactcccgcttccggctcctcgtccaccacttgtgcaccagccactacctggacctcttcatcacaggtgtcatcgggctgaacgtggtcaccatggccatggagcactaccagcagccccagattctggatgaggctctgaagatctgcaactacatcttcactgtcatctttgtcttggagtcagttttcaaacttgtggcctttggtttccgtcggttcttccaggacaggtggaaccagctggacctggccattgtgctgctgtccatcatgggcatcacgctggaggaaatcgaggtcaacgcctcgctgcccatcaaccccaccatcatccgcatcatgagggtgctgcgcattgcccgagtgctgaagctgctgaagatggctgtgggcatgcgggcgctgctggacacggtgatgcaggccctgccccaggtggggaacctgggacttctcttcatgttgttgtttttcatctttgcagctctgggcgtggagctctttggagacctggagtgtgacgagacacacccctgtgagggcctgggccgtcatgccacctttcggaactttggcatggccttcctaaccctcttccgagtctccacaggtgacaattggaatggcattatgaaggacaccctccgggactgtgaccaggagtccacctgctacaacacggtcatctcgcctatctactttgtgtccttcgtgctgacggcccagttcgtgctagtcaacgtggtgatcgccgtgctgatgaagcacctggaggagagcaacaaggaggccaaggaggaggccgagctagaggctgagctggagctggagatgaagaccctcagcccccagccccactcgccactgggcagccccttcctctggcctggggtcgagggccccgacagccccgacagccccaagcctggggctctgcacccagcggcccacgcgagatcagcctcccacttttccctggagcaccccacgatgcagccccaccccacggagctgccaggaccagacttactgactgtgcggaagtctggggtcagccgaacgcactctctgcccaatgacagctacatgtgtcggcatgggagcactgccgaggggcccctgggacacaggggctgggggctccccaaagctcagtcaggctccgtcttgtccgttcactcccagccagcagataccagctacatcctgcagcttcccaaagatgcacctcatctgctccagccccacagcgccccaacctggggcaccatccccaaactgcccccaccaggacgctcccctttggctcagaggccactcaggcgccaggcagcaataaggactgactccttggacgttcagggtctgggcagccgggaagacctgctggcagaggtgagtgggccctccccgcccctggcccgggcctactctttctggggccagtcaagtacccaggcacagcagcactcccgcagccacagcaagatctccaagcacatgaccccgccagccccttgcccaggcccagaacccaactggggcaagggccctccagagaccagaagcagcttagagttggacacggagctgagctggatttcaggagacctcctgccccctggcggccaggaggagcccccatccccacgggacctgaagaagtgctacagcgtggaggcccagagctgccagcgccggcctacgtcctggctggatgagcagaggagacactctatcgccgtcagctgcctggacagcggctcccaaccccacctgggcacagacccctctaaccttgggggccagcctcttggggggcctgggagccggcccaagaaaaaactcagcccgcctagtatcaccatagacccccccgagagccaaggtcctcggaccccgcccagccctggtatctgcctccggaggagggctccgtccagcgactccaaggatcccttggcctctggcccccctgacagcatggctgcctcgccctccccaaagaaagatgtgctgagtctctccggtttatcctctgacccagcagacctggacccctgagtcctgccccactttcccactcacctttctccactgggtgccaagtcctagctcctcctcctgggctatattcctgacaaaagttccatatagacaccaaggaggcggaggcgctcctccctgcctcagtggctctgggtacctgcaagcagaacttccaaagagagttaaaagcagcagccccggcaactctggctccaggcagaaggagaggcccggtgcagctgaggttcccgacaccagaagctgttgggagaaagcaatacgtttgtgcagaatctctatgtatattctattttattaaattaattgaatctag

SEQ ID NO: 259730 - DNA, 6752 bp, Artificial Sequence
  derived and/or modified sequence
atggacgaggaggaggatggagcgggcgccgaggagtcgggacagccccggagcttcatgcggctcaacgacctgtcgggggccgggggccggccggggccggggtcagcagaaaaggacccgggcagcgcggactccgaggcggaggggctgccgtacccggcgctggccccggtggttttcttctacttgagccaggacagccgcccgcggagctggtgtctccgcacggtctgtaacccctggtttgagcgcatcagcatgttggtcatccttctcaactgcgtgaccctgggcatgttccggccatgcgaggacatcgcctgtgactcccagcgctgccggatcctgcaggcctttgatgacttcatctttgccttctttgccgtggagatggtggtgaagatggtggccttgggcatctttgggaaaaagtgttacctgggagacacttggaaccggcttgactttttcatcgtcatcgcagggatgctggagtactcgctggacctgcagaacgtcagcttctcagctgtcaggacagtccgtgtgctgcgaccgctcagggccattaaccgggtgcccagcatgcgcatccttgtcacgttgctgctggatacgctgcccatgctgggcaacgtcctgctgctctgcttcttcgtcttcttcatcttcggcatcgtcggcgtccagctgtgggcagggctgcttcggaaccgatgcttcctacctgagaatttcagcctccccctgagcgtggacctggagcgctattaccagacagagaacgaggatgagagccccttcatctgctcccagccacgcgagaacggcatgcggtcctgcagaagcgtgcccacgctgcgcggggacgggggcggtggcccaccttgcggtctggactatgaggcctacaacagctccagcaacaccacctgtgtcaactggaaccagtactacaccaactgctcagcgggggagcacaaccccttcaagggcgccatcaactttgacaacattggctatgcctggatcgccatcttccaggtcatcacgctggagggctgggtcgacatcatgtactttgtgatggatgctcattccttctacaatttcatctacttcatcctcctcatcatcgtgggctccttcttcatgatcaacctgtgcctggtggtgattgccacgcagttctcagagaccaagcagcgggaaagccagctgatgcgggagcagcgtgtgcggttcctgtccaacgccagcaccctggctagcttctctgagcccggcagctgctatgaggagctgctcaagtacctggtgtacatccttcgtaaggcagcccgcaggctggctcaggtctctcgggcagcaggtgtgcgggttgggctgctcagcagcccagcacccctcgggggccaggagacccagcccagcagcagctgctctcgctcccaccgccgcctatccgtccaccacctggtgcaccaccaccaccaccatcaccaccactaccacctgggcaatgggacgctcagggccccccgggccagcccggagatccaggacagggatgccaatgggtcccgccggctcatgctgccaccaccctcgacgcctgccctctccggggccccccctggtggcgcagagtctgtgcacagcttctaccatgccgactgccacttagagccagtccgctgccaggcgccccctcccaggtccccatctgaggcatccggcaggactgtgggcagcgggaaggtgtatcccaccgtgcacaccagccctccaccggagacgctgaaggagaaggcactagtagaggtggctgccagctctgggcccccaaccctcaccagcctcaacatcccacccgggccctacagctccatgcacaagctgctggagacacagagtacaggtgcctgccaaagctcttgcaagatctccagcccttgcttgaaagcagacagtggagcctgtggtccagacagctgcccctactgtgcccgggccggggcaggggaggtggagctcgccgaccgtgaaatgcctgactcagacagcgaggcagtttatgagttcacacaggatgcccagcacagcgacctccgggacccccacagccggcggcaacggagcctgggcccagatgcagagcccagctctgtgctggccttctggaggctaatctgtgacaccttccgaaagattgtggacagcaagtactttggccggggaatcatgatcgccatcctggtcaacacactcagcatgggcatcgaataccacgagcagcccgaggagcttaccaacgccctagaaatcagcaacatcgtcttcaccagcctctttgccctggagatgctgctgaagctgcttgtgtatggtccctttggctacatcaagaatccctacaacatcttcgatggtgtcattgtggtcatcagcgtgtgggagatcgtgggccagcaggggggcggcctgtcggtgctgcggaccttccgcctgatgcgtgtgctgaagctggtgcgcttcctgccggcgctgcagcggcagctggtggtgctcatgaagaccatggacaacgtggccaccttctgcatgctgcttatgctcttcatcttcatcttcagcatcctgggcatgcatctcttcggctgcaagtttgcctctgagcgggatggggacaccctgccagaccggaagaattttgactccttgctctgggccatcgtcactgtctttcagatcctgacccaggaggactggaacaaagtcctctacaatggtatggcctccacgtcgtcctgggcggccctttatttcattgccctcatgaccttcggcaactacgtgctcttcaatttgctggtcgccattctggtggagggcttccaggcggagggagatgccaacaagtccgaatcagagcccgatttcttctcacccagcctggatggtgatggggacaggaagaagtgcttggccttggtgtccctgggagagcacccggagctgcggaagagcctgctgccgcctctcatcatccacacggccgccacacccatgtcgctgcccaagagcaccagcacgggcctgggcgaggcgctgggccctgcgtcgcgccgcaccagcagcagcgggtcggcagagcctggggcggcccacgagatgaagtcaccgcccagcgcccgcagctctccgcacagcccctggagcgctgcaagcagctggaccagcaggcgctccagccggaacagcctcggccgtgcacccagcctgaagcggagaagcccaagtggagagcggcggtccctgttgtcgggagaaggccaggagagccaggatgaagaggagagctcagaagaggagcgggccagccctgcgggcagtgaccatcgccacagggggtccctggagcgggaggccaagagttcctttgacctgccagacacactgcaggtgccagggctgcatcgcactgccagtggccgagggtctgcttctgagcaccaggactgcaatggcaagtcggcttcagggcgcctggcccgggccctgcggcctgatgaccccccactggatggggatgacgccgatgacgagggcaacctgagcaaaggggaacgggtccgcgcgtggatccgagcccgactccctgcctgctgcctcgagcgagactcctggtcagcctacatcttccctcctcagtccaggttccgcctcctgtgtcaccggatcatcacccacaagatgttcgaccacgtggtccttgtcatcatcttccttaactgcatcaccatcgccatggagcgccccaaaattgacccccacagcgctgaacgcatcttcctgaccctctccaattacatcttcaccgcagtctttctggctgaaatgacagtgaaggtggtggcactgggctggtgcttcggggagcaggcgtacctgcggagcagttggaacgtgctggacgggctgttggtgctcatctccgtcatcgacattctggtgtccatggtctctgacagcggcaccaagatcctgggcatgctgagggtgctgcggctgctgcggaccctgcgcccgctcagggtgatcagccgggcgcaggggctgaagctggtggtggagacgctgatgtcctcactgaaacccatcggcaacattgtagtcatctgctgtgccttcttcatcattttcggcatcttgggggtgcagctcttcaaagggaagtttttcgtgtgccagggcgaggataccaggaacatcaccaataaatcggactgtgccgaggccagttaccggtgggtccggcacaagtacaactttgacaaccttggccaggccctgatgtccctgttcgttttggcctccaaggatggttgggtggacatcatgtacgatgggctggatgctgtgggcgtggaccagcagcccatcatgaaccacaacccctggatgctgctgtacttcatctcgttcctgctcattgtggccttctttgtcctgaacatgtttgtgggtgtggtggtggagaacttccacaagtgtcggcagcaccaggaggaagaggaggcccggcggcgggaggagaagcgcctacgaagactggagaaaaagagaaggaatctaatgctggacgatgtaattgcttccggcagctcagccagcgctgcgtcagaagcccagtgcaaaccttactactccgactactcccgcttccggctcctcgtccaccacttgtgcaccagccactacctggacctcttcatcacaggtgtcatcgggctgaacgtggtcaccatggccatggagcactaccagcagccccagattctggatgaggctctgaagatctgcaactacatcttcactgtcatctttgtcttggagtcagttttcaaacttgtggcctttggtttccgtcggttcttccaggacaggtggaaccagctggacctggccattgtgctgctgtccatcatgggcatcacgctggaggaaatcgaggtcaacgcctcgctgcccatcaaccccaccatcatccgcatcatgagggtgctgcgcattgcccgagtgctgaagctgctgaagatggctgtgggcatgcgggcgctgctggacacggtgatgcaggccctgccccagctctgggcgtggagctctttggagacctggagtgtgacgagacacacccctgtgagggcctgggccgtcatgccacctttcggaactttggcatggccttcctaaccctcttccgagtctccacaggtgacaattggaatggcattatgaaggacaccctccgggactgtgaccaggagtccacctgctacaacacggtcatctcgcctatctactttgtgtccttcgtgctgacggcccagttcgtgctagtcaacgtggtgatcgccgtgctgatgaagcacctggaggagagcaacaaggaggccaaggaggaggccgagctagaggctgagctggagctggagatgaagaccctcagcccccagccccactcgccactgggcagccccttcctctggcctggggtcgagggccccgacagccccgacagccccaagcctggggctctgcacccagcggcccacgcgagatcagcctcccacttttccctggagcaccccacgatgcagccccaccccacggagctgccaggaccagacttactgactgtgcggaagtctggggtcagccgaacgcactctctgcccaatgacagctacatgtgtcggcatgggagcactgccgaggggcccctgggacacaggggctgggggctccccaaagctcagtcaggctccgtcttgtccgttcactcccagccagcagataccagctacatcctgcagcttcccaaagatgcacctcatctgctccagccccacagcgccccaacctggggcaccatccccaaactgcccccaccaggacgctcccctttggctcagaggccactcaggcgccaggcagcaataaggactgactccttggacgttcagggtctgggcagccgggaagacctgctggcagaggtgagtgggccctccccgcccctggcccgggcctactctttctggggccagtcaagtacccaggcacagcagcactcccgcagccacagcaagatctccaagcacatgaccccgccagccccttgcccaggcccagaacccaactggggcaagggccctccagagaccagaagcagcttagagttggacacggagctgagctggatttcaggagacctcctgccccctggcggccaggaggagcccccatccccacgggacctgaagaagtgctacagcgtggaggcccagagctgccagcgccggcctacgtcctggctggatgagcagaggagacactctatcgccgtcagctgcctggacagcggctcccaaccccacctgggcacagacccctctaaccttgggggccagcctcttggggggcctgggagccggcccaagaaaaaactcagcccgcctagtatcaccatagacccccccgagagccaaggtcctcggaccccgcccagccctggtatctgcctccggaggagggctccgtccagcgactccaaggatcccttggcctctggcccccctgacagcatggctgcctcgccctccccaaagaaagatgtgctgagtctctccggtttatcctctgacccagcagacctggacccctgagtcctgccccacttt

SEQ ID NO: 259731 - DNA, 6731 bp, Artificial Sequence
  derived and/or modified sequence
atggacgaggaggaggatggagcgggcgccgaggagtcgggacagccccggagcttcatgcggctcaacgacctgtcgggggccgggggccggccggggccggggtcagcagaaaaggacccgggcagcgcggactccgaggcggaggggctgccgtacccggcgctggccccggtggttttcttctacttgagccaggacagccgcccgcggagctggtgtctccgcacggtctgtaacccctggtttgagcgcatcagcatgttggtcatccttctcaactgcgtgaccctgggcatgttccggccatgcgaggacatcgcctgtgactcccagcgctgccggatcctgcaggcctttgatgacttcatctttgccttctttgccgtggagatggtggtgaagatggtggccttgggcatctttgggaaaaagtgttacctgggagacacttggaaccggcttgactttttcatcgtcatcgcagggatgctggagtactcgctggacctgcagaacgtcagcttctcagctgtcaggacagtccgtgtgctgcgaccgctcagggccattaaccgggtgcccagcatgcgcatccttgtcacgttgctgctggatacgctgcccatgctgggcaacgtcctgctgctctgcttcttcgtcttcttcatcttcggcatcgtcggcgtccagctgtgggcagggctgcttcggaaccgatgcttcctacctgagaatttcagcctccccctgagcgtggacctggagcgctattaccagacagagaacgaggatgagagccccttcatctgctcccagccacgcgagaacggcatgcggtcctgcagaagcgtgcccacgctgcgcggggacgggggcggtggcccaccttgcggtctggactatgaggcctacaacagctccagcaacaccacctgtgtcaactggaaccagtactacaccaactgctcagcgggggagcacaaccccttcaagggcgccatcaactttgacaacattggctatgcctggatcgccatcttccaggtcatcacgctggagggctgggtcgacatcatgtactttgtgatggatgctcattccttctacaatttcatctacttcatcctcctcatcatcgtgggctccttcttcatgatcaacctgtgcctggtggtgattgccacgcagttctcagagaccaagcagcgggaaagccagctgatgcgggagcagcgtgtgcggttcctgtccaacgccagcaccctggctagcttctctgagcccggcagctgctatgaggagctgctcaagtacctggtgtacatccttcgtaaggcagcccgcaggctggctcaggtctctcgggcagcaggtgtgcgggttgggctgctcagcagcccagcacccctcgggggccaggagacccagcccagcagcagctgctctcgctcccaccgccgcctatccgtccaccacctggtgcaccaccaccaccaccatcaccaccactaccacctgggcaatgggacgctcagggccccccgggccagcccggagatccaggacagggatgccaatgggtcccgccggctcatgctgccaccaccctcgacgcctgccctctccggggccccccctggtggcgcagagtctgtgcacagcttctaccatgccgactgccacttagagccagtccgctgccaggcgccccctcccaggtccccatctgaggcatccggcaggactgtgggcagcgggaaggtgtatcccaccgtgcacaccagccctccaccggagacgctgaaggagaaggcactagtagaggtggctgccagctctgggcccccaaccctcaccagcctcaacatcccacccgggccctacagctccatgcacaagctgctggagacacagagtacaggtgcctgccaaagctcttgcaagatctccagcccttgcttgaaagcagacagtggagcctgtggtccagacagctgcccctactgtgcccgggccggggcaggggaggtggagctcgccgaccgtgaaatgcctgactcagacagcgaggcagtttatgagttcacacaggatgcccagcacagcgacctccgggacccccacagccggcggcaacggagcctgggcccagatgcagagcccagctctgtgctggccttctggaggctaatctgtgacaccttccgaaagattgtggacagcaagtactttggccggggaatcatgatcgccatcctggtcaacacactcagcatgggcatcgaataccacgagcagcccgaggagcttaccaacgccctagaaatcagcaacatcgtcttcaccagcctctttgccctggagatgctgctgaagctgcttgtgtatggtccctttggctacatcaagaatccctacaacatcttcgatggtgtcattgtggtcatcagcgtgtgggagatcgtgggccagcaggggggcggcctgtcggtgctgcggaccttccgcctgatgcgtgtgctgaagctggtgcgcttcctgccggcgctgcagcggcagctggtggtgctcatgaagaccatggacaacgtggccaccttctgcatgctgcttatgctcttcatcttcatcttcagcatcctgggcatgcatctcttcggctgcaagtttgcctctgagcgggatggggacaccctgccagaccggaagaattttgactccttgctctgggccatcgtcactgtctttcagatcctgacccaggaggactggaacaaagtcctctacaatggtatggcctccacgtcgtcctgggcggccctttatttcattgccctcatgaccttcggcaactacgtgctcttcaatttgctggtcgccattctggtggagggcttccaggcggagggagatgccaacaagtccgaatcagagcccgatttcttctcacccagcctggatggtgatggggacaggaagaagtgcttggccttggtgtccctgggagagcacccggagctgcggaagagcctgctgccgcctctcatcatccacacggccgccacacccatgtcgctgcccaagagcaccagcacgggcctgggcgaggcgctgggccctgcgtcgcgccgcaccagcagcagcgggtcggcagagcctggggcggcccacgagatgaagtcaccgcccagcgcccgcagctctccgcacagcccctggagcgctgcaagcagctggaccagcaggcgctccagccggaacagcctcggccgtgcacccagcctgaagcggagaagcccaagtggagagcggcggtccctgttgtcgggagaaggccaggagagccaggatgaagaggagagctcagaagaggagcgggccagccctgcgggcagtgaccatcgccacagggggtccctggagcgggaggccaagagttcctttgacctgccagacacactgcaggtgccagggctgcatcgcactgccagtggccgagggtctgcttctgagcaccaggactgcaatggcaagtcggcttcagggcgcctggcccgggccctgcggcctgatgaccccccactggatggggatgacgccgatgacgagggcaacctgagcaaaggggaacgggtccgcgcgtggatccgagcccgactccctgcctgctgcctcgagcgagactcctggtcagcctacatcttccctcctcagtccaggttccgcctcctgtgtcaccggatcatcacccacaagatgttcgaccacgtggtccttgtcatcatcttccttaactgcatcaccatcgccatggagcgccccaaaattgacccccacagcgctgaacgcatcttcctgaccctctccaattacatcttcaccgcagtctttctggctgaaatgacagtgaaggtggtggcactgggctggtgcttcggggagcaggcgtacctgcggagcagttggaacgtgctggacgggctgttggtgctcatctccgtcatcgacattctggtgtccatggtctctgacagcggcaccaagatcctgggcatgctgagggtgctgcggctgctgcggaccctgcgcccgctcagggtgatcagccgggcgcaggggctgaagctggtggtggagacgctgatgtcctcactgaaacccatcggcaacattgtagtcatctgctgtgccttcttcatcattttcggcatcttgggggtgcagctcttcaaagggaagtttttcgtgtgccagggcgaggataccaggaacatcaccaataaatcggactgtgccgaggccagttaccggtgggtccggcacaagtacaactttgacaaccttggccaggccctgatgtccctgttcgttttggcctccaaggatggttgggtggacatcatgtacgatgggctggatgctgtgggcgtggaccagcagcccatcatgaaccacaacccctggatgctgctgtacttcatctcgttcctgctcattgtggccttctttgtcctgaacatgtttgtgggtgtggtggtggagaacttccacaagtgtcggcagcaccaggaggaagaggaggcccggcggcgggaggagaagcgcctacgaagactggagaaaaagagaaggaatctaatgctggacgatgtaattgcttccggcagctcagccagcgctgcgtcagaagcccagtgcaaaccttactactccgactactcccgcttccggctcctcgtccaccacttgtgcaccagccactacctggacctcttcatcacaggtgtcatcgggctgaacgtggtcaccatggccatggagcactaccagcagccccagattctggatgaggctctgaagatctgcaactacatcttcactgtcatctttgtcttggagtcagttttcaaacttgtggcctttggtttccgtcggttcttccaggacaggtggaaccagctggacctggccattgtgctgctgtccatcatgggcatcacgctggaggaaatcgaggtcaacgcctcgctgcccatcaaccccaccatcatccgcatcatgagggtgctgcgcattgcccgagtgctgaagctgctgaagatggctgtgggcatgcgggcgctgctggacacgctctgggcgtggagctctttggagacctggagtgtgacgagacacacccctgtgagggcctgggccgtcatgccacctttcggaactttggcatggccttcctaaccctcttccgagtctccacaggtgacaattggaatggcattatgaaggacaccctccgggactgtgaccaggagtccacctgctacaacacggtcatctcgcctatctactttgtgtccttcgtgctgacggcccagttcgtgctagtcaacgtggtgatcgccgtgctgatgaagcacctggaggagagcaacaaggaggccaaggaggaggccgagctagaggctgagctggagctggagatgaagaccctcagcccccagccccactcgccactgggcagccccttcctctggcctggggtcgagggccccgacagccccgacagccccaagcctggggctctgcacccagcggcccacgcgagatcagcctcccacttttccctggagcaccccacgatgcagccccaccccacggagctgccaggaccagacttactgactgtgcggaagtctggggtcagccgaacgcactctctgcccaatgacagctacatgtgtcggcatgggagcactgccgaggggcccctgggacacaggggctgggggctccccaaagctcagtcaggctccgtcttgtccgttcactcccagccagcagataccagctacatcctgcagcttcccaaagatgcacctcatctgctccagccccacagcgccccaacctggggcaccatccccaaactgcccccaccaggacgctcccctttggctcagaggccactcaggcgccaggcagcaataaggactgactccttggacgttcagggtctgggcagccgggaagacctgctggcagaggtgagtgggccctccccgcccctggcccgggcctactctttctggggccagtcaagtacccaggcacagcagcactcccgcagccacagcaagatctccaagcacatgaccccgccagccccttgcccaggcccagaacccaactggggcaagggccctccagagaccagaagcagcttagagttggacacggagctgagctggatttcaggagacctcctgccccctggcggccaggaggagcccccatccccacgggacctgaagaagtgctacagcgtggaggcccagagctgccagcgccggcctacgtcctggctggatgagcagaggagacactctatcgccgtcagctgcctggacagcggctcccaaccccacctgggcacagacccctctaaccttgggggccagcctcttggggggcctgggagccggcccaagaaaaaactcagcccgcctagtatcaccatagacccccccgagagccaaggtcctcggaccccgcccagccctggtatctgcctccggaggagggctccgtccagcgactccaaggatcccttggcctctggcccccctgacagcatggctgcctcgccctccccaaagaaagatgtgctgagtctctccggtttatcctctgacccagcagacctggacccctgagtcctgccccacttt

SEQ ID NO: 259732 - protein, 2306 aa, Artificial Sequence
  derived and/or modified sequence
MDEEEDGAGAEESGQPRSFMRLNDLSGAGGRPGPGSAEKDPGSADSEAEGLPYPALAPVVFFYLSQDSRPRSWCLRTVCNPWFERISMLVILLNCVTLGMFRPCEDIACDSQRCRILQAFDDFIFAFFAVEMVVKMVALGIFGKKCYLGDTWNRLDFFIVIAGMLEYSLDLQNVSFSAVRTVRVLRPLRAINRVPSMRILVTLLLDTLPMLGNVLLLCFFVFFIFGIVGVQLWAGLLRNRCFLPENFSLPLSVDLERYYQTENEDESPFICSQPRENGMRSCRSVPTLRGDGGGGPPCGLDYEAYNSSSNTTCVNWNQYYTNCSAGEHNPFKGAINFDNIGYAWIAIFQVITLEGWVDIMYFVMDAHSFYNFIYFILLIIVGSFFMINLCLVVIATQFSETKQRESQLMREQRVRFLSNASTLASFSEPGSCYEELLKYLVYILRKAARRLAQVSRAAGVRVGLLSSPAPLGGQETQPSSSCSRSHRRLSVHHLVHHHHHHHHHYHLGNGTLRAPRASPEIQDRDANGSRRLMLPPPSTPALSGAPPGGAESVHSFYHADCHLEPVRCQAPPPRSPSEASGRTVGSGKVYPTVHTSPPPETLKEKALVEVAASSGPPTLTSLNIPPGPYSSMHKLLETQSTGACQSSCKISSPCLKADSGACGPDSCPYCARAGAGEVELADREMPDSDSEAVYEFTQDAQHSDLRDPHSRRQRSLGPDAEPSSVLAFWRLICDTFRKIVDSKYFGRGIMIAILVNTLSMGIEYHEQPEELTNALEISNIVFTSLFALEMLLKLLVYGPFGYIKNPYNIFDGVIVVISVWEIVGQQGGGLSVLRTFRLMRVLKLVRFLPALQRQLVVLMKTMDNVATFCMLLMLFIFIFSILGMHLFGCKFASERDGDTLPDRKNFDSLLWAIVTVFQILTQEDWNKVLYNGMASTSSWAALYFIALMTFGNYVLFNLLVAILVEGFQAEGDANKSESEPDFFSPSLDGDGDRKKCLALVSLGEHPELRKSLLPPLIIHTAATPMSLPKSTSTGLGEALGPASRRTSSSGSAEPGAAHEMKSPPSARSSPHSPWSAASSWTSRRSSRNSLGRAPSLKRRSPSGERRSLLSGEGQESQDEEESSEEERASPAGSDHRHRGSLEREAKSSFDLPDTLQVPGLHRTASGRGSASEHQDCNGKSASGRLARALRPDDPPLDGDDADDEGNLSKGERVRAWIRARLPACCLERDSWSAYIFPPQSRFRLLCHRIITHKMFDHVVLVIIFLNCITIAMERPKIDPHSAERIFLTLSNYIFTAVFLAEMTVKVVALGWCFGEQAYLRSSWNVLDGLLVLISVIDILVSMVSDSGTKILGMLRVLRLLRTLRPLRVISRAQGLKLVVETLMSSLKPIGNIVVICCAFFIIFGILGVQLFKGKFFVCQGEDTRNITNKSDCAEASYRWVRHKYNFDNLGQALMSLFVLASKDGWVDIMYDGLDAVGVDQQPIMNHNPWMLLYFISFLLIVAFFVLNMFVGVVVENFHKCRQHQEEEEARRREEKRLRRLEKKRRNLMLDDVIASGSSASAASEAQCKPYYSDYSRFRLLVHHLCTSHYLDLFITGVIGLNVVTMAMEHYQQPQILDEALKICNYIFTVIFVLESVFKLVAFGFRRFFQDRWNQLDLAIVLLSIMGITLEEIEVNASLPINPTIIRIMRVLRIARVLKLLKMAVGMRALLDTVMQALPQVGNLGLLFMLLFFIFAALGVELFGDLECDETHPCEGLGRHATFRNFGMAFLTLFRVSTGDNWNGIMKDTLRDCDQESTCYNTVISPIYFVSFVLTAQFVLVNVVIAVLMKHLEESNKEAKEEAELEAELELEMKTLSPQPHSPLGSPFLWPGVEGPDSPDSPKPGALHPAAHARSASHFSLEHPTIPLAEMEALSLTSEIVSEPSCSLALTDDSLPDDMHTLLLSALESNMQPHPTELPGPDLLTVRKSGVSRTHSLPNDSYMCRHGSTAEGPLGHRGWGLPKAQSGSVLSVHSQPADTSYILQLPKDAPHLLQPHSAPTWGTIPKLPPPGRSPLAQRPLRRQAAIRTDSLDVQGLGSREDLLAEVSGPSPPLARAYSFWGQSSTQAQQHSRSHSKISKHMTPPAPCPGPEPNWGKGPPETRSSLELDTELSWISGDLLPPGGQEEPPSPRDLKKCYSVEAQSCQRRPTSWLDEQRRHSIAVSCLDSGSQPHLGTDPSNLGGQPLGGPGSRPKKKLSPPSITIDPPESQGPRTPPSPGICLRRRAPSSDSKDPLASGPPDSMAASPSPKKDVLSLSGLSSDPADLDP

SEQ ID NO: 259733 - protein, 1753 aa, Artificial Sequence
  derived and/or modified sequence
MDEEEDGAGAEESGQPRSFMRLNDLSGAGGRPGPGSAEKDPGSADSEAEGLPYPALAPVVFFYLSQDSRPRSWCLRTVCNPWFERISMLVILLNCVTLGMFRPCEDIACDSQRCRILQAFDDFIFAFFAVEMVVKMVALGIFGKKCYLGDTWNRLDFFIVIAGMLEYSLDLQNVSFSAVRTVRVLRPLRAINRVPSMRILVTLLLDTLPMLGNVLLLCFFVFFIFGIVGVQLWAGLLRNRCFLPENFSLPLSVDLERYYQTENEDESPFICSQPRENGMRSCRSVPTLRGDGGGGPPCGLDYEAYNSSSNTTCVNWNQYYTNCSAGEHNPFKGAINFDNIGYAWIAIFQVITLEGWVDIMYFVMDAHSFYNFIYFILLIIVGSFFMINLCLVVIATQFSETKQRESQLMREQRVRFLSNASTLASFSEPGSCYEELLKYLVYILRKAARRLAQVSRAAGVRVGLLSSPAPLGGQETQPSSSCSRSHRRLSVHHLVHHHHHHHHHYHLGNGTLRAPRASPEIQDRDANGSRRLMLPPPSTPALSGAPPGGAESVHSFYHADCHLEPVRCQAPPPRSPSEASGRTVGSGKVYPTVHTSPPPETLKEKALVEVAASSGPPTLTSLNIPPGPYSSMHKLLETQSTGACQSSCKISSPCLKADSGACGPDSCPYCARAGAGEVELADREMPDSDSEAVYEFTQDAQHSDLRDPHSRRQRSLGPDAEPSSVLAFWRLICDTFRKIVDSKYFGRGIMIAILVNTLSMGIEYHEQPEELTNALEISNIVFTSLFALEMLLKLLVYGPFGYIKNPYNIFDGVIVVISVWEIVGQQGGGLSVLRTFRLMRVLKLVRFLPALQRQLVVLMKTMDNVATFCMLLMLFIFIFSILGMHLFGCKFASERDGDTLPDRKNFDSLLWAIVTVFQILTQEDWNKVLYNGMASTSSWAALYFIALMTFGNYVLFNLLVAILVEGFQAEGDANKSESEPDFFSPSLDGDGDRKKCLALVSLGEHPELRKSLLPPLIIHTAATPMSLPKSTSTGLGEALGPASRRTSSSGSAEPGAAHEMKSPPSARSSPHSPWSAASSWTSRRSSRNSLGRAPSLKRRSPSGERRSLLSGEGQESQDEEESSEEERASPAGSDHRHRGSLEREAKSSFDLPDTLQVPGLHRTASGRGSASEHQDCNGKSASGRLARALRPDDPPLDGDDADDEGNLSKGERVRAWIRARLPACCLERDSWSAYIFPPQSRFRLLCHRIITHKMFDHVVLVIIFLNCITIAMERPKIDPHSAERIFLTLSNYIFTAVFLAEMTVKVVALGWCFGEQAYLRSSWNVLDGLLVLISVIDILVSMVSDSGTKILGMLRVLRLLRTLRPLRVISRAQGLKLVVETLMSSLKPIGNIVVICCAFFIIFGILGVQLFKGKFFVCQGEDTRNITNKSDCAEASYRWVRHKYNFDNLGQALMSLFVLASKDGWVDIMYDGLDAVGVDQQPIMNHNPWMLLYFISFLLIVAFFVLNMFVGVVVENFHKCRQHQEEEEARRREEKRLRRLEKKRRNLMLDDVIASGSSASAASEAQCKPYYSDYSRFRLLVHHLCTSHYLDLFITGVIGLNVVTMAMEHYQQPQILDEALKICNYIFTVIFVLESVFKLVAFGFRRFFQDRWNQLDLAIVLLSIMGITLEEIEVNASLPINPTIIRIMRVLRIARVLKLLKMAVGMRALLDTVMQALPQLWAWSSLETWSVTRHTPVRAWAVMPPFGTLAWPS

SEQ ID NO: 259734 - protein, 1746 aa, Artificial Sequence
  derived and/or modified sequence
MDEEEDGAGAEESGQPRSFMRLNDLSGAGGRPGPGSAEKDPGSADSEAEGLPYPALAPVVFFYLSQDSRPRSWCLRTVCNPWFERISMLVILLNCVTLGMFRPCEDIACDSQRCRILQAFDDFIFAFFAVEMVVKMVALGIFGKKCYLGDTWNRLDFFIVIAGMLEYSLDLQNVSFSAVRTVRVLRPLRAINRVPSMRILVTLLLDTLPMLGNVLLLCFFVFFIFGIVGVQLWAGLLRNRCFLPENFSLPLSVDLERYYQTENEDESPFICSQPRENGMRSCRSVPTLRGDGGGGPPCGLDYEAYNSSSNTTCVNWNQYYTNCSAGEHNPFKGAINFDNIGYAWIAIFQVITLEGWVDIMYFVMDAHSFYNFIYFILLIIVGSFFMINLCLVVIATQFSETKQRESQLMREQRVRFLSNASTLASFSEPGSCYEELLKYLVYILRKAARRLAQVSRAAGVRVGLLSSPAPLGGQETQPSSSCSRSHRRLSVHHLVHHHHHHHHHYHLGNGTLRAPRASPEIQDRDANGSRRLMLPPPSTPALSGAPPGGAESVHSFYHADCHLEPVRCQAPPPRSPSEASGRTVGSGKVYPTVHTSPPPETLKEKALVEVAASSGPPTLTSLNIPPGPYSSMHKLLETQSTGACQSSCKISSPCLKADSGACGPDSCPYCARAGAGEVELADREMPDSDSEAVYEFTQDAQHSDLRDPHSRRQRSLGPDAEPSSVLAFWRLICDTFRKIVDSKYFGRGIMIAILVNTLSMGIEYHEQPEELTNALEISNIVFTSLFALEMLLKLLVYGPFGYIKNPYNIFDGVIVVISVWEIVGQQGGGLSVLRTFRLMRVLKLVRFLPALQRQLVVLMKTMDNVATFCMLLMLFIFIFSILGMHLFGCKFASERDGDTLPDRKNFDSLLWAIVTVFQILTQEDWNKVLYNGMASTSSWAALYFIALMTFGNYVLFNLLVAILVEGFQAEGDANKSESEPDFFSPSLDGDGDRKKCLALVSLGEHPELRKSLLPPLIIHTAATPMSLPKSTSTGLGEALGPASRRTSSSGSAEPGAAHEMKSPPSARSSPHSPWSAASSWTSRRSSRNSLGRAPSLKRRSPSGERRSLLSGEGQESQDEEESSEEERASPAGSDHRHRGSLEREAKSSFDLPDTLQVPGLHRTASGRGSASEHQDCNGKSASGRLARALRPDDPPLDGDDADDEGNLSKGERVRAWIRARLPACCLERDSWSAYIFPPQSRFRLLCHRIITHKMFDHVVLVIIFLNCITIAMERPKIDPHSAERIFLTLSNYIFTAVFLAEMTVKVVALGWCFGEQAYLRSSWNVLDGLLVLISVIDILVSMVSDSGTKILGMLRVLRLLRTLRPLRVISRAQGLKLVVETLMSSLKPIGNIVVICCAFFIIFGILGVQLFKGKFFVCQGEDTRNITNKSDCAEASYRWVRHKYNFDNLGQALMSLFVLASKDGWVDIMYDGLDAVGVDQQPIMNHNPWMLLYFISFLLIVAFFVLNMFVGVVVENFHKCRQHQEEEEARRREEKRLRRLEKKRRNLMLDDVIASGSSASAASEAQCKPYYSDYSRFRLLVHHLCTSHYLDLFITGVIGLNVVTMAMEHYQQPQILDEALKICNYIFTVIFVLESVFKLVAFGFRRFFQDRWNQLDLAIVLLSIMGITLEEIEVNASLPINPTIIRIMRVLRIARVLKLLKMAVGMRALLDTLWAWSSLETWSVTRHTPVRAWAVMPPFGTLAWPS

SEQ ID NO: 259735 - DNA, 6921 bp, Artificial Sequence
  derived and/or modified sequence
atggacgaggaggaggacggcgccggcgccgaggagagcggccagcccagaagcttcatgagactgaacgacctgagcggcgccggcggcagacccggccccggcagcgccgagaaggaccccggcagcgccgacagcgaggccgagggcctgccctaccccgccctggcccccgtggtgttcttctacctgagccaggacagcagacccagaagctggtgcctgagaaccgtgtgcaacccctggttcgagagaatcagcatgctggtgatcctgctgaactgcgtgaccctgggcatgttcagaccctgcgaggacatcgcctgcgacagccagagatgcagaatcctgcaggccttcgacgacttcatcttcgccttcttcgccgtggagatggtggtgaagatggtggccctgggcatcttcggcaagaagtgctacctgggcgacacctggaacagactggacttcttcatcgtgatcgccggcatgctggagtacagcctggacctgcagaacgtgagcttcagcgccgtgagaaccgtgagagtgctgagacccctgagagccatcaacagagtgcccagcatgagaatcctggtgaccctgctgctggacaccctgcccatgctgggcaacgtgctgctgctgtgcttcttcgtgttcttcatcttcggcatcgtgggcgtgcagctgtgggccggcctgctgagaaacagatgcttcctgcccgagaacttcagcctgcccctgagcgtggacctggagagatactaccagaccgagaacgaggacgagagccccttcatctgcagccagcccagagagaacggcatgagaagctgcagaagcgtgcccaccctgagaggcgacggcggcggcggccccccctgcggcctggactacgaggcctacaacagcagcagcaacaccacctgcgtgaactggaaccagtactacaccaactgcagcgccggcgagcacaaccccttcaagggcgccatcaacttcgacaacatcggctacgcctggatcgccatcttccaggtgatcaccctggagggctgggtggacatcatgtacttcgtgatggacgcccacagcttctacaacttcatctacttcatcctgctgatcatcgtgggcagcttcttcatgatcaacctgtgcctggtggtgatcgccacccagttcagcgagaccaagcagagagagagccagctgatgagagagcagagagtgagattcctgagcaacgccagcaccctggccagcttcagcgagcccggcagctgctacgaggagctgctgaagtacctggtgtacatcctgagaaaggccgccagaagactggcccaggtgagcagagccgccggcgtgagagtgggcctgctgagcagccccgcccccctgggcggccaggagacccagcccagcagcagctgcagcagaagccacagaagactgagcgtgcaccacctggtgcaccaccaccaccaccaccaccaccactaccacctgggcaacggcaccctgagagcccccagagccagccccgagatccaggacagagacgccaacggcagcagaagactgatgctgcccccccccagcacccccgccctgagcggcgccccccccggcggcgccgagagcgtgcacagcttctaccacgccgactgccacctggagcccgtgagatgccaggcccccccccccagaagccccagcgaggccagcggcagaaccgtgggcagcggcaaggtgtaccccaccgtgcacaccagccccccccccgagaccctgaaggagaaggccctggtggaggtggccgccagcagcggcccccccaccctgaccagcctgaacatcccccccggcccctacagcagcatgcacaagctgctggagacccagagcaccggcgcctgccagagcagctgcaagatcagcagcccctgcctgaaggccgacagcggcgcctgcggccccgacagctgcccctactgcgccagagccggcgccggcgaggtggagctggccgacagagagatgcccgacagcgacagcgaggccgtgtacgagttcacccaggacgcccagcacagcgacctgagagacccccacagcagaagacagagaagcctgggccccgacgccgagcccagcagcgtgctggccttctggagactgatctgcgacaccttcagaaagatcgtggacagcaagtacttcggcagaggcatcatgatcgccatcctggtgaacaccctgagcatgggcatcgagtaccacgagcagcccgaggagctgaccaacgccctggagatcagcaacatcgtgttcaccagcctgttcgccctggagatgctgctgaagctgctggtgtacggccccttcggctacatcaagaacccctacaacatcttcgacggcgtgatcgtggtgatcagcgtgtgggagatcgtgggccagcagggcggcggcctgagcgtgctgagaaccttcagactgatgagagtgctgaagctggtgagattcctgcccgccctgcagagacagctggtggtgctgatgaagaccatggacaacgtggccaccttctgcatgctgctgatgctgttcatcttcatcttcagcatcctgggcatgcacctgttcggctgcaagttcgccagcgagagagacggcgacaccctgcccgacagaaagaacttcgacagcctgctgtgggccatcgtgaccgtgttccagatcctgacccaggaggactggaacaaggtgctgtacaacggcatggccagcaccagcagctgggccgccctgtacttcatcgccctgatgaccttcggcaactacgtgctgttcaacctgctggtggccatcctggtggagggcttccaggccgagggcgacgccaacaagagcgagagcgagcccgacttcttcagccccagcctggacggcgacggcgacagaaagaagtgcctggccctggtgagcctgggcgagcaccccgagctgagaaagagcctgctgccccccctgatcatccacaccgccgccacccccatgagcctgcccaagagcaccagcaccggcctgggcgaggccctgggccccgccagcagaagaaccagcagcagcggcagcgccgagcccggcgccgcccacgagatgaagagcccccccagcgccagaagcagcccccacagcccctggagcgccgccagcagctggaccagcagaagaagcagcagaaacagcctgggcagagcccccagcctgaagagaagaagccccagcggcgagagaagaagcctgctgagcggcgagggccaggagagccaggacgaggaggagagcagcgaggaggagagagccagccccgccggcagcgaccacagacacagaggcagcctggagagagaggccaagagcagcttcgacctgcccgacaccctgcaggtgcccggcctgcacagaaccgccagcggcagaggcagcgccagcgagcaccaggactgcaacggcaagagcgccagcggcagactggccagagccctgagacccgacgacccccccctggacggcgacgacgccgacgacgagggcaacctgagcaagggcgagagagtgagagcctggatcagagccagactgcccgcctgctgcctggagagagacagctggagcgcctacatcttccccccccagagcagattcagactgctgtgccacagaatcatcacccacaagatgttcgaccacgtggtgctggtgatcatcttcctgaactgcatcaccatcgccatggagagacccaagatcgacccccacagcgccgagagaatcttcctgaccctgagcaactacatcttcaccgccgtgttcctggccgagatgaccgtgaaggtggtggccctgggctggtgcttcggcgagcaggcctacctgagaagcagctggaacgtgctggacggcctgctggtgctgatcagcgtgatcgacatcctggtgagcatggtgagcgacagcggcaccaagatcctgggcatgctgagagtgctgagactgctgagaaccctgagacccctgagagtgatcagcagagcccagggcctgaagctggtggtggagaccctgatgagcagcctgaagcccatcggcaacatcgtggtgatctgctgcgccttcttcatcatcttcggcatcctgggcgtgcagctgttcaagggcaagttcttcgtgtgccagggcgaggacaccagaaacatcaccaacaagagcgactgcgccgaggccagctacagatgggtgagacacaagtacaacttcgacaacctgggccaggccctgatgagcctgttcgtgctggccagcaaggacggctgggtggacatcatgtacgacggcctggacgccgtgggcgtggaccagcagcccatcatgaaccacaacccctggatgctgctgtacttcatcagcttcctgctgatcgtggccttcttcgtgctgaacatgttcgtgggcgtggtggtggagaacttccacaagtgcagacagcaccaggaggaggaggaggccagaagaagagaggagaagagactgagaagactggagaagaagagaagaaacctgatgctggacgacgtgatcgccagcggcagcagcgccagcgccgccagcgaggcccagtgcaagccctactacagcgactacagcagattcagactgctggtgcaccacctgtgcaccagccactacctggacctgttcatcaccggcgtgatcggcctgaacgtggtgaccatggccatggagcactaccagcagccccagatcctggacgaggccctgaagatctgcaactacatcttcaccgtgatcttcgtgctggagagcgtgttcaagctggtggccttcggcttcagaagattcttccaggacagatggaaccagctggacctggccatcgtgctgctgagcatcatgggcatcaccctggaggagatcgaggtgaacgccagcctgcccatcaaccccaccatcatcagaatcatgagagtgctgagaatcgccagagtgctgaagctgctgaagatggccgtgggcatgagagccctgctggacaccgtgatgcaggccctgccccaggtgggcaacctgggcctgctgttcatgctgctgttcttcatcttcgccgccctgggcgtggagctgttcggcgacctggagtgcgacgagacccacccctgcgagggcctgggcagacacgccaccttcagaaacttcggcatggccttcctgaccctgttcagagtgagcaccggcgacaactggaacggcatcatgaaggacaccctgagagactgcgaccaggagagcacctgctacaacaccgtgatcagccccatctacttcgtgagcttcgtgctgaccgcccagttcgtgctggtgaacgtggtgatcgccgtgctgatgaagcacctggaggagagcaacaaggaggccaaggaggaggccgagctggaggccgagctggagctggagatgaagaccctgagcccccagccccacagccccctgggcagccccttcctgtggcccggcgtggagggccccgacagccccgacagccccaagcccggcgccctgcaccccgccgcccacgccagaagcgccagccacttcagcctggagcaccccaccatccccctggccgagatggaggccctgagcctgaccagcgagatcgtgagcgagcccagctgcagcctggccctgaccgacgacagcctgcccgacgacatgcacaccctgctgctgagcgccctggagagcaacatgcagccccaccccaccgagctgcccggccccgacctgctgaccgtgagaaagagcggcgtgagcagaacccacagcctgcccaacgacagctacatgtgcagacacggcagcaccgccgagggccccctgggccacagaggctggggcctgcccaaggcccagagcggcagcgtgctgagcgtgcacagccagcccgccgacaccagctacatcctgcagctgcccaaggacgccccccacctgctgcagccccacagcgcccccacctggggcaccatccccaagctgcccccccccggcagaagccccctggcccagagacccctgagaagacaggccgccatcagaaccgacagcctggacgtgcagggcctgggcagcagagaggacctgctggccgaggtgagcggccccagcccccccctggccagagcctacagcttctggggccagagcagcacccaggcccagcagcacagcagaagccacagcaagatcagcaagcacatgaccccccccgccccctgccccggccccgagcccaactggggcaagggcccccccgagaccagaagcagcctggagctggacaccgagctgagctggatcagcggcgacctgctgccccccggcggccaggaggagccccccagccccagagacctgaagaagtgctacagcgtggaggcccagagctgccagagaagacccaccagctggctggacgagcagagaagacacagcatcgccgtgagctgcctggacagcggcagccagccccacctgggcaccgaccccagcaacctgggcggccagcccctgggcggccccggcagcagacccaagaagaagctgagcccccccagcatcaccatcgacccccccgagagccagggccccagaaccccccccagccccggcatctgcctgagaagaagagcccccagcagcgacagcaaggaccccctggccagcggcccccccgacagcatggccgccagccccagccccaagaaggacgtgctgagcctgagcggcctgagcagcgaccccgccgacctggacccctag

SEQ ID NO: 259736 - DNA, 6921 bp, Artificial Sequence
  derived and/or modified sequence
atggatgaggaagaggatggcgccggtgcggaagagagtggtcagcctcgatcgttcatgagactaaatgacctttccggagccggggggcgtcctggtccaggctcagctgaaaaggaccctgggtctgccgattccgaggcagaaggcctcccctaccctgccctggcgcccgtcgtcttcttttatctcagtcaagacagccggcctaggtcttggtgcttgaggactgtttgcaacccctggtttgaaagaatctcaatgttggttatcctcctaaattgtgttactttgggaatgttccgaccatgtgaagacatcgcctgtgattcgcagcggtgtcggatccttcaggcatttgacgattttattttcgccttcttcgcggtggaaatggtggtgaagatggtcgccctggggatatttggaaagaagtgttacctcggagacacttggaaccgcctagattttttcatcgtcattgctgggatgctggaatactctttagacctccagaacgtttccttttccgccgtgagaaccgtgcgagtcctcaggcccctccgagctatcaatagggtcccttctatgcgaattttagtgactctcttattggatacgctcccaatgctagggaacgtcctgcttttatgtttttttgtctttttcatatttggtattgtgggcgtgcagctatgggctgggctgctgcggaatcggtgcttcctccccgaaaattttagcctgccactgagtgtggacttggagaggtattatcagacagagaatgaggatgagagcccttttatctgctcccagcccagggagaacggtatgcgaagctgccgcagtgtgccaactctgaggggtgatggagggggcgggcccccctgcggcctggactacgaggcttacaactcttcctctaatacaacttgcgtgaactggaaccagtattacaccaactgcagcgcgggagaacacaacccttttaaaggggcgattaattttgacaatatcggctacgcctggatagctatctttcaagtgattactctggaaggctgggtcgatatcatgtacttcgtgatggacgcccatagcttttataatttcatttacttcattctcctgatcattgtagggtcattcttcatgatcaatctgtgcttagtcgtgatcgcaacccagttttctgagacaaaacagcgcgagagccaactgatgagggagcaacgcgttcgctttctgagtaacgcgtctactctggcaagcttcagcgagcccgggagttgctatgaagaactactgaagtatctagtgtacattctgcgaaaggcagcgagaaggctagcacaggtcagtcgggccgccggtgttcgggttggactgctgtccagcccagcgccgctaggggggcaggagactcagccatcttcctcttgtagccgcagtcaccgccgcctctctgtccaccacctagtacaccaccaccatcaccatcatcatcactaccacctgggtaacgggaccctgcgcgctccacgtgcaagtccagagatccaggaccgtgatgcgaacggctctaggcgcttgatgctgcccccgccatcaactccagcattgtccggagccccacccggcggggcggagagcgttcatagcttctaccatgccgattgtcacctggagcccgttcgctgccaagcacctcccccgaggagtccatccgaagcctccggccggacagtggggtccggcaaggtgtaccctacagttcacaccagtcctccacctgagacacttaaagaaaaagctcttgtggaagttgccgcctcaagcggtcctccaacattaactagcttaaatattccaccgggtccctattcttcaatgcacaagctgttggagacacagagcactggagcttgccagtcctcttgcaagattagctccccctgcttgaaggccgattctggagcctgtggaccagacagctgcccctattgtgccagggccggcgccggtgaagtggaactagctgacagagagatgccagactcagactccgaggcagtgtatgaatttacccaggacgcgcagcacagcgacctgcgtgatccccattcgcggcgacagcgtagcttgggtcctgacgctgaaccgtcttcagtgttggcgttttggaggctgatttgtgatacctttaggaaaattgtggactctaaatacttcgggcggggaataatgattgccatcctggtgaacacattatccatggggatagagtatcacgagcaaccggaggaactcaccaatgctctggagatatccaatattgtattcactagcctttttgcactcgagatgctgctgaaattactggtgtatgggccttttggttacatcaaaaacccctacaacatttttgatggcgttattgtggtgatcagcgtgtgggaaattgtggggcagcaaggaggcggcctgtccgtgcttcgtacgttccgcctgatgcgggtgttaaagcttgtgcgcttcctccctgcactgcaacgccagctggttgtgctgatgaagaccatggataatgtggctacattttgtatgcttctaatgttatttatctttatcttctccatcctgggcatgcatctcttcggttgcaagtttgcttccgagcgggatggcgacactctgcccgatagaaagaacttcgatagcctgttatgggctatcgtgactgtgtttcagattttgacacaggaagattggaacaaagtgctgtacaacgggatggcctccacatcctcctgggctgctctctatttcattgccctgatgacctttggtaattatgtactgtttaatctgctcgttgctatactagtggagggtttccaagcagaaggtgatgctaacaagtcagagtctgagcctgatttttttagcccgtcccttgacggggacggagaccgcaagaagtgcctggcgctggtaagtctgggggaacaccccgagttgcggaagtccctgttgcctccacttattatccatacagctgcaacccccatgagtctgcccaagagtacaagcacaggactgggcgaggccctcggccccgcctctagacgtactagtagctccgggtctgccgagcctggtgccgcacacgagatgaagagcccgccatcagcccgtagctccccacacagtccatggagcgccgcttcaagctggacaagtcggagaagctcacgaaacagtctcggcagggcacctagcctcaagagaaggtcaccctctggtgaaaggcggtctctcctcagcggagagggccaggaatcacaggacgaggaagagagcagtgaggaagagagggcatccccagccgggagtgatcaccgacatagaggtagtcttgagcgggaggccaaatcgtcattcgatctccctgataccctgcaagtgcctgggctacacagaactgcaagcggacgtgggagcgcttcagagcatcaagattgtaatgggaaaagcgcatccggcagattggctcgcgccctccgaccagatgacccgccactcgatggcgacgacgccgacgacgagggtaatttgagtaaaggcgaacgcgtgcgagcctggatacgcgcacggctgcccgcttgttgcctggagcgcgactcctggtctgcctacatcttccccccccagagcagattcaggctattgtgtcatagaatcattacacacaagatgttcgaccatgttgtcctggttattattttcctgaattgcataacaattgccatggagaggccaaagattgatcctcactcagccgagcggattttcctcacactcagcaattacatattcacggcggttttcctcgccgaaatgacggtcaaggtggtggccttaggctggtgcttcggcgagcaggcatacctccgcagtagctggaacgtcctcgatggcttactggtcctgatcagcgtaatagatattctggtgagtatggtgtctgacagcggaacaaagatactggggatgttgagagtcctgcggctcttacgaacactccgcccccttcgcgttatttcccgggcccagggactgaagctggtggtcgagactctgatgagctcccttaaacccattggtaatatcgtcgtaatatgttgtgcattttttatcatctttggcatcctgggcgttcagcttttcaaaggaaaattcttcgtttgccaaggggaagacacgaggaacatcacaaataagtccgactgcgctgaggcatcgtaccggtgggtacgccacaaatacaactttgataaccttggacaggctttgatgtctttatttgtgttagcgagtaaggatggctgggtggacattatgtacgacggtctcgatgcagttggcgtggaccagcaaccaatcatgaaccataacccttggatgttgttatatttcatcagctttctgctcattgtggctttcttcgttctaaatatgttcgtaggcgtggtggttgagaatttccataaatgcagacaacatcaagaagaggaggaggcccgacggcgggaggagaagcgtctgagacggctcgagaaaaagcgccgcaatttgatgctggacgatgtgatcgcctcgggttccagtgcgagtgccgcctccgaagcgcagtgtaagccctattattcagactactctagatttaggttacttgttcaccacctgtgcaccagtcactatttggatctattcatcacgggtgtaattggattaaacgtcgtgaccatggctatggaacattaccagcagccgcagatcttagacgaggcactcaagatttgcaattacatctttaccgtgatcttcgtattggagtcggtgttcaaactggtggctttcggcttccgacggttctttcaggatcggtggaaccagctagatcttgcaatcgtgctgttgtctattatgggcattaccctagaggagatcgaggtgaacgcctccctgcccattaaccctactattattcggatcatgcgggttctgcgcatcgcgagggtactcaaattacttaagatggccgtcgggatgcgtgccttacttgataccgttatgcaggctctgcctcaggtcgggaatctggggcttctgtttatgctgctgttctttatctttgccgccctgggcgtggaactgtttggtgacctggagtgcgatgagacccatccctgtgagggtctagggaggcacgcgacctttagaaactttgggatggccttcttaaccctctttcgggtttctactggagataactggaacgggattatgaaggatacgctgagagattgtgatcaggaatccacttgctataacactgtgattagtcctatctatttcgtgagcttcgtgctgacagcccagttcgtactggtgaacgtcgttattgctgtgcttatgaagcatctggaggagagtaataaagaagcaaaagaggaggctgaactggaagctgagctagaactcgagatgaaaacgctgtccccccaacctcactccccattgggcagtcccttcctgtggcccggtgtcgagggccccgacagtccagactcccctaaacctggggccctgcatcctgcagctcatgctcgtagcgcctctcacttcagcctggaacaccccacaattcccctggcagagatggaggccctttctctgacctccgaaatcgttagtgagccaagttgctcattggcactgacagacgactcgctgcccgatgatatgcacacgttgcttttatcagccctggagagcaacatgcagccccaccccaccgagctacctggtcctgatctccttacagtgaggaagtcaggggtaagccgcactcattctctcccaaacgacagctacatgtgtcgccacggtagcactgcggaaggccctctagggcaccggggctggggtcttcctaaggcgcaaagcggctccgtgctgtcagtgcatagccagcccgccgatacatcctatattctacaacttcctaaggacgccccccacctccttcagccgcattctgcccccacctgggggaccatccccaagctacctccaccaggcagatcgcctcttgcacaaagaccactgagacgacaggcagcaattagaaccgattccctagatgtacaggggctgggctcgagggaggatctgcttgccgaagtatcaggcccctctcctccgctggcacgagcttattctttctggggtcagagttccacccaggcccagcagcactcaagatcccattctaaaatatcgaaacacatgactccgcctgcgccatgtccgggccctgaacctaactggggaaaagggccccctgagacccgcagttctctggagctggacaccgagcttagctggatttctggagatttactgccccctggcggacaggaagagcccccctcaccccgggatctgaagaagtgctactccgtcgaagcccaatcctgccaacgacgccccacatcctggttggacgagcaaaggagacactccatcgctgtctcttgtctggactctggttcccagccacatctggggacagacccatcaaatctgggcgggcagccgcttggcggacctggtagtcgcccaaagaagaagctgtccccaccgtccataactattgatcccccagagtctcagggccctcgcacacccccatcccctggcatctgtcttcgcaggagagccccctcaagtgactcaaaggacccactcgccagtggcccccccgactccatggccgcatcaccatcgccgaagaaagatgtgctctcgctgtctgggttatctagtgacccggccgacttggatccatag

SEQ ID NO: 259737 - DNA, 6921 bp, Artificial Sequence
  derived and/or modified sequence
atggatgaggaggaggatggagctggagctgaggagagcggccagcccaggagcttcatgaggctgaatgacctgagcggggccggcggccggcccggccctggcagcgctgagaaggaccccggcagcgctgacagcgaggccgagggcctgccctacccagccctggcccctgtggtgttcttctacctgagccaggacagccggcccaggtcctggtgcctgaggacagtgtgcaacccctggtttgagcgcatctccatgctggtgatcctgctgaactgtgtgaccctgggcatgttccggccctgtgaagatattgcctgtgacagccagcgctgccgcatcctgcaggcctttgatgacttcatctttgccttctttgctgtggagatggtggtgaagatggtggccctgggcatctttgggaagaagtgctacctgggggacacctggaaccggctggacttcttcatcgtgattgctggcatgctggagtacagcctggacctgcagaatgtgtccttctctgctgtgaggacagtgcgggtgctgcggcccctgcgggccatcaacagagtgcccagcatgaggatcctggtgaccctgctgctggacaccctgcccatgctgggcaatgtgctgctgctgtgcttctttgtgttcttcatctttggaattgtgggcgtgcagctgtgggccggcctgctgaggaaccgctgcttcctgcctgagaacttcagcctgcccctgtctgtggacctggagcgctactaccagacagaaaatgaagatgagagccccttcatctgcagccagccccgggagaatggcatgaggagctgccgctctgtgcccaccctgcggggagatggcggcggcggccccccctgtggcctggactatgaggcctacaacagcagcagcaacaccacctgtgtgaactggaaccagtactacaccaactgcagcgctggggagcacaaccccttcaagggggccatcaactttgacaacatcggctacgcctggatcgccatcttccaggtgatcaccctggagggctgggtggacatcatgtactttgtgatggatgcccacagcttctacaacttcatctacttcatcctgctgatcatcgtgggcagcttcttcatgatcaacctgtgcctggtggtgattgccacccagttcagcgagaccaagcagcgggagagccagctgatgagggagcagagggtgcgcttcctgagcaatgccagcaccctggccagcttcagcgagcccggcagctgctatgaggagctgctgaagtacctggtgtacatcctgaggaaggccgcccggcggctggcccaggtgtccagagctgctggggtgcgggtgggcctgctgagcagccctgcccccctgggcggccaggagacccagcccagcagcagctgcagccgcagccaccggcggctgtctgtgcaccacctggtgcaccaccaccaccaccaccaccaccactaccacctgggcaatggcaccctgcgggccccccgggccagccctgagatccaggacagagatgccaacggcagccggcggctgatgctgcccccacccagcaccccagccctgagcggggcccctcctggaggagctgagagcgtgcacagcttctaccacgccgactgccacctggagcctgtgcgctgccaggcccccccacccaggagccccagcgaggccagcggccgcacagtgggcagcggcaaggtgtaccccaccgtgcacaccagccccccacctgagaccctgaaggagaaggccctggtggaggtggccgccagcagcggcccccccaccctgaccagcctgaacatccccccaggcccctacagctccatgcacaagctgctggagacccagagcactggagcctgccagagcagctgcaagatcagcagcccctgcctgaaggctgacagcggggcctgtggccctgacagctgcccctactgtgcccgggccggggccggggaggtggagctggccgaccgggagatgccagacagcgacagcgaggccgtgtatgagttcacccaggatgcccagcacagcgacctgcgggacccccacagccggcggcagaggagcctgggcccagatgctgagcccagctctgtgctggccttctggaggctcatctgtgacaccttcaggaagatcgtggacagcaagtacttcggccggggcatcatgattgccatcctggtgaacaccctgtccatgggcatcgagtaccacgagcagcctgaggagctgaccaatgccctggagatcagcaacatcgtgttcaccagcctgtttgccctggagatgctgctgaagctgctggtgtatggccccttcggctacatcaagaacccctacaacatctttgatggagtcatcgtggtgatctctgtgtgggagatcgtgggccagcagggcggcggcctgtctgtgctgcggaccttccggctgatgagggtgctgaagctggtgcgcttcctgcctgccctgcagaggcagctggtggtgctgatgaagaccatggacaacgtggccaccttctgcatgctgctgatgctgttcatcttcatcttcagcatcctgggcatgcacctgtttggctgcaagtttgccagcgagagagatggagacaccctgcctgacaggaagaactttgacagcctgctgtgggccatcgtgacagtgttccagatcctgacccaggaggactggaacaaggtgctgtacaacggcatggccagcaccagctcctgggccgccctgtacttcatcgccctgatgaccttcggcaactacgtgctcttcaacctgctggtggccatcctggtggagggcttccaggccgagggagatgccaacaagtctgagagcgagccagacttcttcagccccagcctggatggagatggagacaggaagaagtgcctggccctggtgtccctgggggagcaccctgagctgaggaagagcctgctgcccccactcatcatccacacagctgccacccccatgagcctgcccaagagcaccagcacaggcctgggggaggccctgggccctgccagcaggaggaccagcagcagcggcagcgctgagcccggggccgcccacgagatgaagagccccccatctgcccggagcagcccccacagcccctggagcgctgccagctcctggaccagcagaagaagcagcaggaacagcctgggccgggcccccagcctgaagaggaggagccccagcggggagaggaggagcctgctgagcggggagggccaggagagccaggatgaggaggagagcagcgaggaggagcgggccagccctgctggcagtgaccaccgccaccggggcagcctggagcgggaggccaagagcagctttgacctgcctgacaccctgcaggtgcccggcctgcacaggacagccagcggccggggcagcgccagcgagcaccaggactgcaatggcaagagcgccagcggccgcctggcccgggccctgcggccagatgacccccccctggatggagatgatgctgatgatgagggcaacctgagcaaaggagagcgggtgcgggcctggatccgggcccggctgcctgcctgctgcctggagcgggacagctggagcgcctacatcttccccccccagagccgcttccggctgctgtgccaccgcatcatcacccacaagatgtttgaccacgtggtgctggtgatcatcttcctgaactgcatcaccatcgccatggagcggcccaagattgacccccacagcgctgagcgcatcttcctgaccctgagcaactacatcttcaccgctgtgttcctggccgagatgacagtgaaggtggtggccctgggctggtgctttggagagcaggcctacctgcggagctcctggaatgtgctggatggcctgctggtgctgatcagcgtcatcgacatcctggtgtccatggtgtctgacagcggcaccaagatcctgggcatgctgcgggtgctgcggctgctgcggaccctgcggcccctgcgggtcatcagccgggcccagggcctgaagctggtggtggagaccctgatgagcagcctgaagcccatcggcaacatcgtggtgatctgctgtgccttcttcatcatcttcggcatcctgggcgtgcagctgttcaagggcaagttctttgtgtgccagggcgaggacaccaggaacatcaccaacaagagtgactgtgccgaggccagctaccgctgggtgcgccacaagtacaactttgacaacctgggccaggccctgatgagcctgtttgtgctggccagcaaggatggctgggtggacatcatgtatgatggcctggatgctgtgggcgtggaccagcagcccatcatgaaccacaacccctggatgctgctgtacttcatctccttcctgctgattgtggccttctttgtgctgaacatgtttgtgggcgtggtggtggagaacttccacaagtgccggcagcaccaggaggaggaggaggccaggagaagagaggagaagaggctgcggcggctggagaagaagagaagaaacctgatgctggatgatgtgattgccagcggcagcagcgccagcgctgccagcgaggcccagtgcaagccctactacagcgactacagccgcttccggctgctggtgcaccacctgtgcaccagccactacctggacctcttcatcactggagtcatcggcctgaatgtggtgaccatggccatggagcactaccagcagccccagatcctggatgaggccctgaagatctgcaactacatcttcaccgtcatctttgtgctggagagcgtcttcaagctggtggccttcggcttccgccgcttcttccaggaccgctggaaccagctggacctggccatcgtgctgctgagcatcatgggcatcaccctggaggagattgaggtgaatgccagcctgcccatcaaccccaccatcatccgcatcatgagggtgctgagaattgcccgggtgctgaagctgctgaagatggctgtgggcatgagggccctgctggacacagtgatgcaggccctgccccaggtgggcaacctgggcctgctcttcatgctgctcttcttcatctttgctgccctgggcgtggagctgtttggagacctggagtgtgatgagacccacccctgtgagggcctgggcagacatgccaccttcaggaactttggcatggccttcctgaccctcttccgggtgtccactggagacaactggaatggcatcatgaaggacaccctgcgggactgtgaccaggagagcacctgctacaacacagtcatcagccccatctactttgtgtcctttgtgctgacagcccagtttgtgctggtgaatgtggtgattgctgtgctgatgaagcacctggaggagagcaacaaggaggccaaggaggaggccgagctggaggccgagctggagctggagatgaagaccctgagcccccagccccacagccccctgggcagccccttcctgtggccaggagtggagggccctgacagcccagacagccccaagccaggggccctgcaccctgctgcccacgcccggagcgccagccacttcagcctggagcaccccaccatccccctggccgagatggaggccctgagcctgaccagcgagatcgtgtctgagcccagctgcagcctggccctgacagatgacagcctgcctgatgacatgcacaccctgctgctgagcgccctggagagcaacatgcagccccaccccacagagctgcccggccctgacctgctgactgtgaggaagagcggcgtgtccaggacccacagcctgcccaatgacagctacatgtgcagacatggcagcacagctgagggccccctgggccaccggggctggggcctgcccaaggcccagagcggctctgtgctgtctgtgcacagccagcctgctgacaccagctacatcctgcagctgcccaaggatgccccccacctgctgcagccccacagcgcccccacctggggcaccatccccaagctgcccccacctggccgcagccccctggcccagaggcccctgcggcggcaggccgccatcagaacagacagcctggatgtgcagggcctgggcagccgggaggacctgctggccgaggtgtctggccccagcccccccctggcccgggcctacagcttctggggccagagcagcacccaggcccagcagcacagccgcagccacagcaagatcagcaagcacatgaccccaccagccccctgccccggccctgagcccaactggggcaaaggacctcctgagaccaggagcagcctggagctggacacagagctgtcctggatcagcggggacctgctgcccccaggcggccaggaggagccccccagcccccgggacctgaagaagtgctacagcgtggaggcccagagctgccagaggcggcccacctcctggctggatgagcagaggaggcacagcattgctgtgtcctgcctggacagcggcagccagccccacctgggcacagaccccagcaacctgggcggccagcccctgggcggccctggcagccggcccaagaagaagctgagccccccatccatcaccatcgaccccccagagagccagggccccaggaccccacccagccctggcatctgcctgcggcggcgggcccccagcagtgacagcaaggaccccctggccagcggccccccagacagcatggccgccagccccagccccaagaaggatgtgctgagcctgagcggcctgagcagtgaccctgctgacctggacccctag

SEQ ID NO: 259738 - DNA, 6921 bp, Artificial Sequence
  derived and/or modified sequence
atggacgaggaggaggacggcgccggcgccgaggagagcggccagccccgctcattcatgcgcttgaacgatttgtctggcgctggcgggcggccaggtcccggtagcgcggagaaggaccccgggagcgcggactccgaggctgagggattaccttatcccgccctggccccagtggtgttcttctacttgtcacaggattcccggcctcggtcatggtgtctgcggaccgtctgcaatccctggttcgagaggattagcatgctggtcattctgctgaattgcgtgacccttggaatgtttcgaccttgtgaagatattgcatgtgatagtcagcgatgtaggattctgcaagccttcgatgatttcatctttgcgttctttgccgtagagatggtggtgaagatggtggcccttggaatatttggcaagaaatgctaccttggcgacacatggaataggctagatttctttatagtaattgctggcatgctcgagtattccctggacctgcaaaatgtctcattctcagctgtgaggactgtccgcgtcctgcgccccttgagggcgatcaaccgtgtgccaagtatgcgaatcctggtaaccctcctgctggataccctgccaatgctggggaacgtgctactactgtgtttcttcgtcttcttcatttttggaatcgttggcgttcagctgtgggccggactgcttagaaatcggtgtttcctgcccgaaaatttctcattgcctctgagtgtggacctggaacgatactaccagacggagaacgaggatgagagccccttcatctgttctcagcctcgggaaaacggcatgaggagctgcagatctgtccctacactgcgcggggacggcggaggggggcctccctgtggcctggattatgaggcctacaattcatcatccaatacaacatgtgtcaactggaaccagtattataccaattgctccgcaggggagcacaacccctttaagggcgcaataaacttcgataacataggatacgcctggatcgccatctttcaagttattactctcgaggggtgggttgacatcatgtactttgtcatggatgcccactcattctacaattttatctacttcattctgctgataatcgttggatcttttttcatgattaacctgtgccttgtggtcatcgccacgcagttcagtgagacaaagcagagggagagccagttgatgcgcgaacagcgcgtgcggtttctgtccaatgcttcaactttggccagcttttcagagccaggatcctgctatgaagagctgctgaagtatctggtctacattctcagaaaggcagcgcgacggctggcacaggtatctagggcggccggcgttagggtcggcttactgtcctcaccagcccctttaggtggccaggagactcagccctctagttcttgctctcggagccatcgccgcctgtccgtgcaccatctcgtgcatcaccatcatcatcatcatcaccactaccacctgggcaacggaacactccgagccccaagagcctccccagaaatccaggaccgcgatgccaacgggtcaagaagactaatgctacccccaccttccacaccagcgttatccggagccccacctgggggggcagagtcagtgcactccttttatcacgccgattgtcacctggaacctgttcggtgccaggcccctccccccaggagtccttcggaagcttccggacgtacagtagggagcggcaaggtgtatcccactgtccacacttcccctcccccagagacgctaaaagaaaaagctttagtggaagttgctgcgtcttcaggccccccaaccctgaccagcctgaatatccctcctggcccttatagttctatgcacaagctcctggagacgcagtccaccggcgcttgtcaatcgagctgtaagatatcgagtccttgcctcaaggccgacagtggcgcatgtggtcccgatagctgtccctactgtgccagagcaggagcaggcgaagtggagctagccgatcgggagatgcccgactcagactcagaggctgtttatgaattcacacaagatgctcagcacagcgacctgagagatccacactctaggagacagcgaagccttgggcctgacgccgagccctctagcgtcctcgcgttctggcggctcatatgtgatacattccgtaagattgtggacagcaaatattttgggcgcggtatcatgatagctatcctagtcaacacccttagtatgggtatagaataccatgaacagccagaagaattgacgaacgctctggagatatcaaacattgtattcacaagcctgtttgcgctcgaaatgctgcttaagctgctcgtgtatggtccattcggatatatcaaaaacccatataacatctttgatggggtcattgttgtgatctcggtatgggaaatagtcggtcagcagggtgggggcctgagcgtgctcagaacatttcgtctaatgagagttctcaagttagtgagattcctgccagccctgcaaagacagctcgtggtgctgatgaagactatggataacgtagcaaccttttgcatgttactgatgcttttcatctttatcttctctatcctaggcatgcatctgttcggttgtaaatttgccagcgagcgggacggagacaccttgcccgataggaagaattttgacagcttgctctgggcaattgtaactgtgttccaaatcttaacccaggaggattggaataaagtcctgtataatgggatggcgtcaacctcatcctgggctgctctatactttatcgccctgatgacttttggcaactatgttttattcaacctgctggtcgcaatcctcgtggagggttttcaggctgagggcgatgcaaataagtctgagtcagagccagacttcttttctccatccttggacggagacggtgacaggaaaaagtgcttggcccttgtgtcactcggagaacatcctgagcttagaaagagtctcctgccccccttaattatccacacagcagcgactccaatgtctctgcctaaaagtacttcaaccggactcggcgaagcattgggcccagccagtagaaggacctcttccagtgggtcggctgagccaggggccgcacacgaaatgaagtctcctccaagtgcacgtagcagcccccactccccttggtccgccgccagtagctggaccagccggcgctcgtcccgtaactcattgggtcgggccccatccctgaagcgccgatccccgtccggcgaacgaaggtcactgctatctggagaaggacaggaatctcaggatgaagaggagtcgtcagaagaggaacgggcctcaccagctgggagtgaccaccggcatcgaggctccctggagcgggaagccaagagctcttttgatcttccagatacattgcaggtcccaggattacacagaacagcaagcggccgcggcagcgctagcgaacaccaggactgtaatggaaaaagcgctagcgggcggcttgcgagggcacttagaccagatgacccccctcttgacggagatgacgcagatgatgaaggtaacctatcaaagggcgagagggtcagggcgtggataagggctaggctacccgcctgttgtcttgaaagagactcctggtctgcttatattttccctccccagtctaggtttaggctgttatgccaccgtattatcacccacaagatgttcgatcatgtggtccttgtgatcattttccttaactgcattacaatagctatggaacggccgaaaatcgatccacacagcgccgagcgcattttcctgaccctgtccaactacatcttcactgcagtcttcttggcggagatgactgtgaaagttgtggcattgggatggtgctttggggagcaagcctatttgcgatcctcttggaacgttctcgacggcctgctcgtgctcatcagtgtgatcgatatcctcgtctccatggtctctgactctggcaccaaaattcttggtatgttgcgagtgctgcggttgctgagaaccctgaggcccctgcgggttatctctcgcgcgcagggcctgaagcttgtagtcgaaaccttaatgtctagcctgaaacctatcgggaatatcgtcgttatttgctgcgctttttttatcattttcggaattcttggcgtccagctcttcaagggtaaatttttcgtatgccagggcgaggacacccgaaatatcactaacaaatctgattgtgctgaagcttcttatagatgggtgagacacaagtacaacttcgataatctcgggcaggccctgatgtcattgttcgttctggcctcgaaagacggttgggttgatattatgtacgacggcctggacgctgtcggagtcgatcaacagccaattatgaaccataacccttggatgctgctgtattttatctcatttctccttattgtcgcattctttgttctcaatatgttcgtgggggtggtcgtggaaaacttccacaaatgtagacagcaccaagaagaggaggaagccaggcgcagagaggagaagcggctgcggagattggagaagaagcggagaaacctgatgctggacgacgttatcgccagtgggtcttccgctagtgctgccagcgaggcacagtgtaaaccttactacagtgattattctcggtttcggttgttagtacatcatctgtgtacctcccattaccttgatctgtttatcaccggtgtcatcgggctgaatgtggtgaccatggctatggagcattaccagcaaccccaaattctggatgaggctctcaagatctgtaattatatcttcacagtgatctttgtcctcgagtccgtgttcaagctcgtagcttttggtttccgccggtttttccaggacaggtggaaccagctggatctggccatcgtgctactttccataatgggcatcacgcttgaggagatcgaggttaatgcttctctgcctattaaccccacaatcattagaattatgagagtgctgagaattgcacgcgtactcaagctcctgaaaatggctgtaggtatgagagcgctgttggacaccgtgatgcaggccctcccacaggttggcaatcttggactcctgttcatgcttctgttttttatattcgctgctctgggggtggagcttttcggcgacctcgagtgcgatgagacacacccttgtgaaggcctggggaggcacgcgacctttaggaatttcgggatggctttcctcaccctgttccgcgtttcaacgggggataactggaacgggattatgaaagatacactacgcgattgcgatcaggagtccacctgttataataccgtgattagccccatctacttcgtcagttttgtgttaactgctcagtttgttctcgttaatgtggtgattgccgtattaatgaaacacctggaggagtccaataaggaagcaaaggaggaggccgaactggaagctgagctggagctggagatgaagacactgtccccccagcctcactccccactggggtcccccttcctctggcctggggtggaaggcccggacagccctgatagtcccaagccaggagccctgcatcccgctgcgcatgcccgatcagcctcccatttttccttagaacatcccacgatcccactggccgaaatggaggcgttgtctctcacgtcagaaattgtgtcggagccatcctgctcattggccctgacggatgacagcctgccggacgacatgcacactctccttctatccgcattggagtccaatatgcagcctcatcccaccgagctgcctggcccagacctgctaactgtacgaaaaagcggtgtttccagaactcacagtctgcccaacgactcatacatgtgccgtcatggctcaacggccgagggtcccttgggtcaccgcggctggggattgccgaaggctcagtcgggaagtgtcctgtcagtacacagccagcctgctgacactagttatattctccagctgcccaaagacgccccgcacctgcttcaaccccattccgccccgacttggggtactattcctaaattgcccccacccggacgaagccctctggctcagcgccctctccggcggcaagccgctatccgcaccgacagtcttgacgtccagggcttgggatccagagaggatctgctggcagaggtatcagggcccagcccgcccttggcgagagcgtacagcttctggggacagagcagcacccaagcacagcagcattcccgttcccacagtaagatcagcaagcatatgacccccccagctccgtgccccggaccggagccaaattggggcaagggccctcccgagacacgatcttctcttgaactggacactgagctctcttggatcagtggcgatctgttgccccccggtggacaggaagaacctccttcacctagggatttgaagaaatgctatagtgtcgaggctcagagttgtcagaggcggccaacgtcctggctggatgaacagaggcgccactctattgccgtgagttgcctggatagtggatctcaaccacacctagggactgacccatccaatctcggcgggcagcccttgggaggacccggaagccgcccgaagaagaaattgagccctcccagtatcacaattgacccccctgaatctcaggggccccgtacccccccttcccccggtatttgtctgcgccgtcgggcccctagcagcgattcaaaagacccccttgcgagtggcccacctgactcaatggctgccagtccgagtcctaagaaggacgtcctcagtctttctggcctaagttccgatccagctgatctggatccatag

SEQ ID NO: 259739 - DNA, 6920 bp, Artificial Sequence
  derived and/or modified sequence
atggatgaagaggaagatggagccggagctgaggaaagcggacagcccagaagcttcatgagattaaacgatctctccggcgcaggaggcagaccaggccctgggtcggccgaaaaagatccaggaagcgccgacagcgaagcggaaggcctgccctatcccgcactggcccctgtcgtcttcttttatctgtcacaggattcccgacccagaagttggtgtctaagaactgtgtgcaatccctggtttgagcgcatctctatgttggtgattctcctaaattgcgttacacttgggatgttcagaccttgtgaagatattgcctgtgacagtcagaggtgtaggatcctgcaggctttcgacgatttcatcttcgcttttttcgcggtggaaatggtagtgaaaatggtagccctggggatttttggaaagaaatgttatcttggtgatacctggaaccgcctcgatttctttattgtgatcgctgggatgctcgagtactctctagatcttcagaacgtgtcttttagtgcggttcggactgtgagagttctgagaccattgcgggcaattaatagagtcccaagcatgcgcatcttggtgaccctgctcctcgacacactgcctatgttggggaatgtgctgcttttatgttttttcgtattttttatctttgggatagtgggcgttcagttatgggccggactgctccgtaatcgatgttttctgccggaaaatttctcactgcctctgtctgttgacctagaacgttactatcagacggaaaacgaggacgaaagccctttcatctgttcacagcctcgcgagaacggcatgaggtcttgtcggtctgtgccaactttgcgcggtgatggtggtggaggtcccccttgcggcctagattatgaagcttacaattcaagctctaatacaacatgcgtgaattggaaccagtactacaccaactgctccgctggagagcacaatcctttcaagggtgccattaacttcgacaacataggatacgcctggatcgccatttttcaggtcatcaccttggagggctgggtggacattatgtatttcgtcatggacgctcactccttctataactttatctatttcatactgctgataatcgtcggctcgttttttatgattaatctctgtctcgtcgtgattgcgacccagtttagcgagaccaaacagagagagtcccagctaatgcgcgagcaacgcgtcaggttcctttctaacgcctccactctggcctctttttcagaaccaggatcctgctatgaggagttgctaaaatatctcgtgtacattctgagaaaggctgctcgtagactcgcccaggtgagtcgcgctgccggtgttcgggtaggcctgctgtccagtcccgcaccccttggcggtcaagaaacacagcccagctctagttgctcaagaagtcaccggagattatcggtccatcacctggttcaccaccaccaccaccaccaccaccattatcacctgggaaatggaacactgagagcgcctcgcgctagccctgagatacaggacagggacgctaacgggagcagaaggttgatgctgcccccacccagtacaccagctttgagcggagctccgccaggcggtgcggaaagcgttcacagtttttatcacgccgattgtcaccttgaacccgtgcggtgccaggccccacctcctaggtcaccgtcagaggcaagcggtaggacagtggggtctgggaaagtttaccccaccgtgcacaccagcccgccacctgaaacacttaaggagaaggccctggtcgaagtggccgctagctcggggcctccaactctgacatctttaaatatcccgcctggaccctatagttctatgcataaactgctagaaacccaaagtacgggagcatgccaatcgtcttgtaagattagttcgccttgccttaaagctgactcaggtgcttgtggcccagacagctgtccatactgcgctcgcgctggcgcaggcgaagtggaactcgctgatagagagatgccagactcagactccgaagccgtgtacgagtttacacaggatgctcagcactccgatctacgagatccacactctaggcgccagcgctctctaggacccgacgccgagccctcaagtgttctggccttctggagactcatctgtgatacttttcgtaaaattgtcgattcaaagtacttcggccgaggtataatgatcgcgatactagtgaatactctaagtatgggcatcgaatatcacgaacagccagaggagttgacgaatgccttagaaatatctaacattgtcttcacaagcctgttcgccttggaaatgctgcttaaactgctggtctacggcccatttggttacattaagaatccatacaatatcttcgacggtgtgattgttgtgattagcgtatgggagattgtggggcagcagggcggaggtctgagtgtgctcagaacctttaggcttatgagagtgctaaaactggtacggtttctcccagcactgcagcgacaactagtggtgcttatgaagactatggacaatgtggccacattctgtatgctgctgatgttattcatcttcattttcagcattttgggtatgcatctctttggctgcaagttcgccagtgagagggacggcgataccctgcccgacagaaagaacttcgactctcttttgtgggcaattgtgactgtgttccagatactcacccaggaggattggaataaagtgctgtataatggcatggccagcacgagtagctgggctgccctctacttcatcgcgctcatgacattcggcaactacgtgctgttcaatctgctggttgccattctggttgaaggattccaggccgaaggtgacgccaataaaagcgaaagtgaacctgactttttctccccatcactggatggcgatggtgatcgcaagaaatgtcttgcactggtatcactgggtgagcacccagaactgcgaaaatccttgctcccaccacttatcatacacacagccgctactcctatgtctcttcccaagagcacgagcacggggttgggcgaggctctgggaccagcttccagaagaacctcttcctcgggctccgccgagcccggagctgcccacgagatgaaaagcccccctagcgctcggtctagtccgcactccccttggagtgcagcttcctcctggacctccagaaggagcagccggaactcccttgggcgtgccccttccttgaagagaagaagtccctcgggggaacgaagaagtctgctctccggcgagggccaggagtctcaagacgaggaggagtccagcgaggaagagagggcttcaccggctggatctgaccatcggcaccgtggctccttggagcgtgaggccaagagctcctttgacttgcctgacaccctacaagtaccgggattgcaccgcacggccagtggacgagggtccgcttccgaacatcaggattgtaatggaaagagtgcctcaggaagactggctcgcgcactgaggccagacgacccgccactcgacggggatgacgccgacgacgagggaaacttaagtaagggagaacgtgtcagggcctggatcagagccagactgcctgcgtgctgtctggagagggactcttggtccgcgtacatctttcccccacagagtcgctttaggttactgtgccaccggattataacccacaaaatgttcgaccatgttgtcctggtcatcatcttcctcaattgcattaccattgctatggaacggccaaaaatagacccccactcagcagagagaatctttcttactttaagcaactacatttttaccgctgtctttctggctgagatgactgttaaagttgtcgcgctcggctggtgtttcggcgaacaagcctatctgcgcagctcttggaatgtcctggatggcctgttggtcctcatctcagtcattgatattcttgtgtccatggtcagtgatagtggcacgaagattctggggatgttgcgcgtcctgcggttgctccgtaccttgcgaccgcttagagtgatatcacgagcgcagggcctgaaattagtggtggaaacactgatgagctctcttaaaccgatcgggaatattgtggtgatctgctgtgctttttttattatcttcgggattctcggcgtgcagttatttaagggcaaattcttcgtatgccaaggggaagacacaaggaatattactaataagagcgactgcgctgaggcgagctaccgttgggtcagacataaatacaatttcgacaatttggggcaggctctcatgtcactgttcgtcctggcctccaaggatggttgggttgacatcatgtacgacggtttggacgctgtcggcgttgaccaacagcccatcatgaatcataacccgtggatgctgctctacttcatctccttcttgctcatcgttgccttctttgtattgaatatgtttgtcggcgtcgtcgtcgaaaatttccacaaatgtaggcagcatcaggaagaggaagaggccaggcgaagggaggagaaaagactccggagactggagaaaaaaaggcgcaatcttatgctggatgatgttatcgcatctggctcttccgccagtgcggcttcagaggctcagtgtaaaccatactattccgactattctagattccggctgcttgttcaccacctgtgtacgagccactatttagatcttttcatcactggtgtaattggtctgaatgttgtgactatggccatggaacactaccagcaacctcagatccttgacgaggcccttaagatctgtaattacatttttaccgtgatctttgtgctcgagtcagtgttcaagctcgtggctttcggctttaggcgcttttttcaggatagatggaaccagttggacctcgctattgtgctcctcagcatcatgggaattacgcttgaagagatcgaggtcaatgcctccctgcccataaacccgacaattattaggattatgcgggtattgcgcatagcgcgtgttctgaagctcctcaaaatggctgtcgggatgcgtgccctgctggacactgtgatgcaagccttaccacaggttggaaacttgggactgctgtttatgttgcttttctttattttcgccgcactgggcgttgaattatttggcgatctggaatgtgacgaaacacacccgtgcgagggtctgggcaggcatgctaccttccggaatttcggaatggcattcttaactctttttcgggtatcaacaggagataactggaacggtatcatgaaggataccttgcgggattgtgaccaagaatcaacttgttacaacacggtgatttctccaatttacttcgtgagctttgtgcttacagctcagtttgtcctggtgaatgtcgtgatcgccgtactcatgaagcatctcgaagagagcaacaaagaagcgaaggaggaggcagaactggaggccgaattggagcttgagatgaaaaccctttccccacagcctcattcgcctttgggaagtccattcctctggccgggagtggagggtccagattcgcctgatagtccgaagcctggagccctgcaccccgcagcacacgctaggtccgcgtcacactttagtctggagcatccgaccattccgttggccgagatggaggccctctcactgacaagcgagattgtctctgaaccatcctgctctctggccctgactgacgattctctaccagatgacatgcacactctcctactgtcggcgctcgaatctaatatgcagcctcatcccacagagctccccggaccagatttgctgaccgtacggaagtctggagttagtcggacccatagtctgcccaacgatagctatatgtgcaggcatggctccaccgccgaaggcccacttggacaccgtggctggggcttgccaaaggcgcagtcaggctcagtgctctccgttcattcgcagcccgcagacaccagctatattcttcagctgccaaaggatgccccacatctgctgcagccccattccgcgccaacctggggaacaattcccaaacttcccccacctggcaggtctccgttagcacaacggccactcagacggcaagccgctattcgtacagatagcctggatgtgcagggcctgggctcgcgggaggatttgctagcagaagtgagcggccctagccctcccctcgcaagggcctactcattttgggggcaatcatcaacccaggcacagcagcactcacgaagtcattccaagataagcaaacacatgacaccacccgctccctgcccagggcctgaacccaactggggcaagggaccaccggagactcggtcatcactggagctggacaccgagttgagctggattagcggggatctactgcctccaggaggtcaagaggagcccccttctccacgtgatctgaagaagtgctattccgtggaagcccagagttgccagagacgacccacatcgtggttggatgagcaaagacggcactcaattgccgtgtcatgcttggacagcgggtcacagccccatttaggcacagatccttcaaatctgggcggacagcccctgggcggtcccggttcccggccaaaaaaaaagctgtctccacctagtattactatcgatcctcccgagtctcaggggccaagaaccccaccatcgcccggtatttgtttgcggagaagggcgccttcttctgattccaaggaccctttagccagcgggccaccggattccatggccgcatcgcctagccccaagaaagacgtattatctctgagtggcctcagtagtgaccctgccgatcttgacccata

SEQ ID NO: 259740 - DNA, 6921 bp, Artificial Sequence
  derived and/or modified sequence
atggacgaggaggaggatggagcgggcgccgaggagtcgggacagccccggagcttcatgcggctcaacgacctgtcgggggccgggggccggccggggccggggtcagcagaaaaggacccgggcagcgcggactccgaggcggaggggctgccgtacccggcgctggccccggtggttttcttctacttgagccaggacagccgcccgcggagctggtgtctccgcacggtctgtaacccctggtttgagcgcatcagcatgttggtcatccttctcaactgcgtgaccctgggcatgttccggccatgcgaggacatcgcctgtgactcccagcgctgccggatcctgcaggcctttgatgacttcatctttgccttctttgccgtggagatggtggtgaagatggtggccttgggcatctttgggaaaaagtgttacctgggagacacttggaaccggcttgactttttcatcgtcatcgcagggatgctggagtactcgctggacctgcagaacgtcagcttctcagctgtcaggacagtccgtgtgctgcgaccgctcagggccattaaccgggtgcccagcatgcgcatccttgtcacgttgctgctggatacgctgcccatgctgggcaacgtcctgctgctctgcttcttcgtcttcttcatcttcggcatcgtcggcgtccagctgtgggcagggctgcttcggaaccgatgcttcctacctgagaatttcagcctccccctgagcgtggacctggagcgctattaccagacagagaacgaggatgagagccccttcatctgctcccagccacgcgagaacggcatgcggtcctgcagaagcgtgcccacgctgcgcggggacgggggcggtggcccaccttgcggtctggactatgaggcctacaacagctccagcaacaccacctgtgtcaactggaaccagtactacaccaactgctcagcgggggagcacaaccccttcaagggcgccatcaactttgacaacattggctatgcctggatcgccatcttccaggtcatcacgctggagggctgggtcgacatcatgtactttgtgatggatgctcattccttctacaatttcatctacttcatcctcctcatcatcgtgggctccttcttcatgatcaacctgtgcctggtggtgattgccacgcagttctcagagaccaagcagcgggaaagccagctgatgcgggagcagcgtgtgcggttcctgtccaacgccagcaccctggctagcttctctgagcccggcagctgctatgaggagctgctcaagtacctggtgtacatccttcgtaaggcagcccgcaggctggctcaggtctctcgggcagcaggtgtgcgggttgggctgctcagcagcccagcacccctcgggggccaggagacccagcccagcagcagctgctctcgctcccaccgccgcctatccgtccaccacctggtgcaccaccaccaccaccatcaccaccactaccacctgggcaatgggacgctcagggccccccgggccagcccggagatccaggacagggatgccaatgggtcccgccggctcatgctgccaccaccctcgacgcctgccctctccggggccccccctggtggcgcagagtctgtgcacagcttctaccatgccgactgccacttagagccagtccgctgccaggcgccccctcccaggtccccatctgaggcatccggcaggactgtgggcagcgggaaggtgtatcccaccgtgcacaccagccctccaccggagacgctgaaggagaaggcactagtagaggtggctgccagctctgggcccccaaccctcaccagcctcaacatcccacccgggccctacagctccatgcacaagctgctggagacacagagtacaggtgcctgccaaagctcttgcaagatctccagcccttgcttgaaagcagacagtggagcctgtggtccagacagctgcccctactgtgcccgggccggggcaggggaggtggagctcgccgaccgtgaaatgcctgactcagacagcgaggcagtttatgagttcacacaggatgcccagcacagcgacctccgggacccccacagccggcggcaacggagcctgggcccagatgcagagcccagctctgtgctggccttctggaggctaatctgtgacaccttccgaaagattgtggacagcaagtactttggccggggaatcatgatcgccatcctggtcaacacactcagcatgggcatcgaataccacgagcagcccgaggagcttaccaacgccctagaaatcagcaacatcgtcttcaccagcctctttgccctggagatgctgctgaagctgcttgtgtatggtccctttggctacatcaagaatccctacaacatcttcgatggtgtcattgtggtcatcagcgtgtgggagatcgtgggccagcaggggggcggcctgtcggtgctgcggaccttccgcctgatgcgtgtgctgaagctggtgcgcttcctgccggcgctgcagcggcagctggtggtgctcatgaagaccatggacaacgtggccaccttctgcatgctgcttatgctcttcatcttcatcttcagcatcctgggcatgcatctcttcggctgcaagtttgcctctgagcgggatggggacaccctgccagaccggaagaattttgactccttgctctgggccatcgtcactgtctttcagatcctgacccaggaggactggaacaaagtcctctacaatggtatggcctccacgtcgtcctgggcggccctttatttcattgccctcatgaccttcggcaactacgtgctcttcaatttgctggtcgccattctggtggagggcttccaggcggagggagatgccaacaagtccgaatcagagcccgatttcttctcacccagcctggatggtgatggggacaggaagaagtgcttggccttggtgtccctgggagagcacccggagctgcggaagagcctgctgccgcctctcatcatccacacggccgccacacccatgtcgctgcccaagagcaccagcacgggcctgggcgaggcgctgggccctgcgtcgcgccgcaccagcagcagcgggtcggcagagcctggggcggcccacgagatgaagtcaccgcccagcgcccgcagctctccgcacagcccctggagcgctgcaagcagctggaccagcaggcgctccagccggaacagcctcggccgtgcacccagcctgaagcggagaagcccaagtggagagcggcggtccctgttgtcgggagaaggccaggagagccaggatgaagaggagagctcagaagaggagcgggccagccctgcgggcagtgaccatcgccacagggggtccctggagcgggaggccaagagttcctttgacctgccagacacactgcaggtgccagggctgcatcgcactgccagtggccgagggtctgcttctgagcaccaggactgcaatggcaagtcggcttcagggcgcctggcccgggccctgcggcctgatgaccccccactggatggggatgacgccgatgacgagggcaacctgagcaaaggggaacgggtccgcgcgtggatccgagcccgactccctgcctgctgcctcgagcgagactcctggtcagcctacatcttccctcctcagtccaggttccgcctcctgtgtcaccggatcatcacccacaagatgttcgaccacgtggtccttgtcatcatcttccttaactgcatcaccatcgccatggagcgccccaaaattgacccccacagcgctgaacgcatcttcctgaccctctccaattacatcttcaccgcagtctttctggctgaaatgacagtgaaggtggtggcactgggctggtgcttcggggagcaggcgtacctgcggagcagttggaacgtgctggacgggctgttggtgctcatctccgtcatcgacattctggtgtccatggtctctgacagcggcaccaagatcctgggcatgctgagggtgctgcggctgctgcggaccctgcgcccgctcagggtgatcagccgggcgcaggggctgaagctggtggtggagacgctgatgtcctcactgaaacccatcggcaacattgtagtcatctgctgtgccttcttcatcattttcggcatcttgggggtgcagctcttcaaagggaagtttttcgtgtgccagggcgaggataccaggaacatcaccaataaatcggactgtgccgaggccagttaccggtgggtccggcacaagtacaactttgacaaccttggccaggccctgatgtccctgttcgttttggcctccaaggatggttgggtggacatcatgtacgatgggctggatgctgtgggcgtggaccagcagcccatcatgaaccacaacccctggatgctgctgtacttcatctcgttcctgctcattgtggccttctttgtcctgaacatgtttgtgggtgtggtggtggagaacttccacaagtgtcggcagcaccaggaggaagaggaggcccggcggcgggaggagaagcgcctacgaagactggagaaaaagagaaggaatctaatgctggacgatgtaattgcttccggcagctcagccagcgctgcgtcagaagcccagtgcaaaccttactactccgactactcccgcttccggctcctcgtccaccacttgtgcaccagccactacctggacctcttcatcacaggtgtcatcgggctgaacgtggtcaccatggccatggagcactaccagcagccccagattctggatgaggctctgaagatctgcaactacatcttcactgtcatctttgtcttggagtcagttttcaaacttgtggcctttggtttccgtcggttcttccaggacaggtggaaccagctggacctggccattgtgctgctgtccatcatgggcatcacgctggaggaaatcgaggtcaacgcctcgctgcccatcaaccccaccatcatccgcatcatgagggtgctgcgcattgcccgagtgctgaagctgctgaagatggctgtgggcatgcgggcgctgctggacacggtgatgcaggccctgccccaggtggggaacctgggacttctcttcatgttgttgtttttcatctttgcagctctgggcgtggagctctttggagacctggagtgtgacgagacacacccctgtgagggcctgggccgtcatgccacctttcggaactttggcatggccttcctaaccctcttccgagtctccacaggtgacaattggaatggcattatgaaggacaccctccgggactgtgaccaggagtccacctgctacaacacggtcatctcgcctatctactttgtgtccttcgtgctgacggcccagttcgtgctagtcaacgtggtgatcgccgtgctgatgaagcacctggaggagagcaacaaggaggccaaggaggaggccgagctagaggctgagctggagctggagatgaagaccctcagcccccagccccactcgccactgggcagccccttcctctggcctggggtcgagggccccgacagccccgacagccccaagcctggggctctgcacccagcggcccacgcgagatcagcctcccacttttccctggagcaccccacgatccctctagctgagatggaggctctgtctctgacgtcagagattgtgtctgaaccgtcctgctctctagctctgacggatgactctttgcctgatgacatgcacacactcttacttagtgccctggagagcaatatgcagccccaccccacggagctgccaggaccagacttactgactgtgcggaagtctggggtcagccgaacgcactctctgcccaatgacagctacatgtgtcggcatgggagcactgccgaggggcccctgggacacaggggctgggggctccccaaagctcagtcaggctccgtcttgtccgttcactcccagccagcagataccagctacatcctgcagcttcccaaagatgcacctcatctgctccagccccacagcgccccaacctggggcaccatccccaaactgcccccaccaggacgctcccctttggctcagaggccactcaggcgccaggcagcaataaggactgactccttggacgttcagggtctgggcagccgggaagacctgctggcagaggtgagtgggccctccccgcccctggcccgggcctactctttctggggccagtcaagtacccaggcacagcagcactcccgcagccacagcaagatctccaagcacatgaccccgccagccccttgcccaggcccagaacccaactggggcaagggccctccagagaccagaagcagcttagagttggacacggagctgagctggatttcaggagacctcctgccccctggcggccaggaggagcccccatccccacgggacctgaagaagtgctacagcgtggaggcccagagctgccagcgccggcctacgtcctggctggatgagcagaggagacactctatcgccgtcagctgcctggacagcggctcccaaccccacctgggcacagacccctctaaccttgggggccagcctcttggggggcctgggagccggcccaagaaaaaactcagcccgcctagtatcaccatagacccccccgagagccaaggtcctcggaccccgcccagccctggtatctgcctccggaggagggctccgtccagcgactccaaggatcccttggcctctggcccccctgacagcatggctgcctcgccctccccaaagaaagatgtgctgagtctctccggtttatcctctgacccagcagacctggacccctga

SEQ ID NO: 259741 - protein, 2284 aa, Artificial Sequence
  derived and/or modified sequence
MDEEEDGAGAEESGQPRSFMRLNDLSGAGGRPGPGSAEKDPGSADSEAEGLPYPALAPVVFFYLSQDSRPRSWCLRTVCNPWFERISMLVILLNCVTLGMFRPCEDIACDSQRCRILQAFDDFIFAFFAVEMVVKMVALGIFGKKCYLGDTWNRLDFFIVIAGMLEYSLDLQNVSFSAVRTVRVLRPLRAINRVPSMRILVTLLLDTLPMLGNVLLLCFFVFFIFGIVGVQLWAGLLRNRCFLPENFSLPLSVDLERYYQTENEDESPFICSQPRENGMRSCRSVPTLRGDGGGGPPCGLDYEAYNSSSNTTCVNWNQYYTNCSAGEHNPFKGAINFDNIGYAWIAIFQVITLEGWVDIMYFVMDAHSFYNFIYFILLIIVGSFFMINLCLVVIATQFSETKQRESQLMREQRVRFLSNASTLASFSEPGSCYEELLKYLVYILRKAARRLAQVSRAAGVRVGLLSSPAPLGGQETQPSSSCSRSHRRLSVHHLVHHHHHHHHHYHLGNGTLRAPRASPEIQDRDANGSRRLMLPPPSTPALSGAPPGGAESVHSFYHADCHLEPVRCQAPPPRSPSEASGRTVGSGKVYPTVHTSPPPETLKEKALVEVAASSGPPTLTSLNIPPGPYSSMHKLLETQSTGACQSSCKISSPCLKADSGACGPDSCPYCARAGAGEVELADREMPDSDSEAVYEFTQDAQHSDLRDPHSRRQRSLGPDAEPSSVLAFWRLICDTFRKIVDSKYFGRGIMIAILVNTLSMGIEYHEQPEELTNALEISNIVFTSLFALEMLLKLLVYGPFGYIKNPYNIFDGVIVVISVWEIVGQQGGGLSVLRTFRLMRVLKLVRFLPALQRQLVVLMKTMDNVATFCMLLMLFIFIFSILGMHLFGCKFASERDGDTLPDRKNFDSLLWAIVTVFQILTQEDWNKVLYNGMASTSSWAALYFIALMTFGNYVLFNLLVAILVEGFQAEEISKREDASGQLSCIQLPVDSQGGDANKSESEPDFFSPSLDGDGDRKKCLALVSLGEHPELRKSLLPPLIIHTAATPMSLPKSTSTGLGEALGPASRRTSSSGSAEPGAAHEMKSPPSARSSPHSPWSAASSWTSRRSSRNSLGRAPSLKRRSPSGERRSLLSGEGQESQDEEESSEEERASPAGSDHRHRGSLEREAKSSFDLPDTLQVPGLHRTASGRGSASEHQDCNGKSASGRLARALRPDDPPLDGDDADDEGNLSKGERVRAWIRARLPACCLERDSWSAYIFPPQSRFRLLCHRIITHKMFDHVVLVIIFLNCITIAMERPKIDPHSAERIFLTLSNYIFTAVFLAEMTVKVVALGWCFGEQAYLRSSWNVLDGLLVLISVIDILVSMVSDSGTKILGMLRVLRLLRTLRPLRVISRAQGLKLVVETLMSSLKPIGNIVVICCAFFIIFGILGVQLFKGKFFVCQGEDTRNITNKSDCAEASYRWVRHKYNFDNLGQALMSLFVLASKDGWVDIMYDGLDAVGVDQQPIMNHNPWMLLYFISFLLIVAFFVLNMFVGVVVENFHKCRQHQEEEEARRREEKRLRRLEKKRRNLMLDDVIASGSSASAASEAQCKPYYSDYSRFRLLVHHLCTSHYLDLFITGVIGLNVVTMAMEHYQQPQILDEALKICNYIFTVIFVLESVFKLVAFGFRRFFQDRWNQLDLAIVLLSIMGITLEEIEVNASLPINPTIIRIMRVLRIARVLKLLKMAVGMRALLDTVMQALPQVGNLGLLFMLLFFIFAALGVELFGDLECDETHPCEGLGRHATFRNFGMAFLTLFRVSTGDNWNGIMKDTLRDCDQESTCYNTVISPIYFVSFVLTAQFVLVNVVIAVLMKHLEESNKEAKEEAELEAELELEMKTLSPQPHSPLGSPFLWPGVEGPDSPDSPKPGALHPAAHARSASHFSLEHPTMQPHPTELPGPDLLTVRKSGVSRTHSLPNDSYMCRHGSTAEGPLGHRGWGLPKAQSGSVLSVHSQPADTSYILQLPKDAPHLLQPHSAPTWGTIPKLPPPGRSPLAQRPLRRQAAIRTDSLDVQGLGSREDLLAEVSGPSPPLARAYSFWGQSSTQAQQHSRSHSKISKHMTPPAPCPGPEPNWGKGPPETRSSLELDTELSWISGDLLPPGGQEEPPSPRDLKKCYSVEAQSCQRRPTSWLDEQRRHSIAVSCLDSGSQPHLGTDPSNLGGQPLGGPGSRPKKKLSPPSITIDPPESQGPRTPPSPGICLRRRAPSSDSKDPLASGPPDSMAASPSPKKDVLSLSGLSSDPADLDP

SEQ ID NO: 259742 - DNA, 6855 bp, Artificial Sequence
  derived and/or modified sequence
atggacgaggaggaggacggcgccggcgccgaggagagcggccagcccagaagcttcatgagactgaacgacctgagcggcgccggcggcagacccggccccggcagcgccgagaaggaccccggcagcgccgacagcgaggccgagggcctgccctaccccgccctggcccccgtggtgttcttctacctgagccaggacagcagacccagaagctggtgcctgagaaccgtgtgcaacccctggttcgagagaatcagcatgctggtgatcctgctgaactgcgtgaccctgggcatgttcagaccctgcgaggacatcgcctgcgacagccagagatgcagaatcctgcaggccttcgacgacttcatcttcgccttcttcgccgtggagatggtggtgaagatggtggccctgggcatcttcggcaagaagtgctacctgggcgacacctggaacagactggacttcttcatcgtgatcgccggcatgctggagtacagcctggacctgcagaacgtgagcttcagcgccgtgagaaccgtgagagtgctgagacccctgagagccatcaacagagtgcccagcatgagaatcctggtgaccctgctgctggacaccctgcccatgctgggcaacgtgctgctgctgtgcttcttcgtgttcttcatcttcggcatcgtgggcgtgcagctgtgggccggcctgctgagaaacagatgcttcctgcccgagaacttcagcctgcccctgagcgtggacctggagagatactaccagaccgagaacgaggacgagagccccttcatctgcagccagcccagagagaacggcatgagaagctgcagaagcgtgcccaccctgagaggcgacggcggcggcggccccccctgcggcctggactacgaggcctacaacagcagcagcaacaccacctgcgtgaactggaaccagtactacaccaactgcagcgccggcgagcacaaccccttcaagggcgccatcaacttcgacaacatcggctacgcctggatcgccatcttccaggtgatcaccctggagggctgggtggacatcatgtacttcgtgatggacgcccacagcttctacaacttcatctacttcatcctgctgatcatcgtgggcagcttcttcatgatcaacctgtgcctggtggtgatcgccacccagttcagcgagaccaagcagagagagagccagctgatgagagagcagagagtgagattcctgagcaacgccagcaccctggccagcttcagcgagcccggcagctgctacgaggagctgctgaagtacctggtgtacatcctgagaaaggccgccagaagactggcccaggtgagcagagccgccggcgtgagagtgggcctgctgagcagccccgcccccctgggcggccaggagacccagcccagcagcagctgcagcagaagccacagaagactgagcgtgcaccacctggtgcaccaccaccaccaccaccaccaccactaccacctgggcaacggcaccctgagagcccccagagccagccccgagatccaggacagagacgccaacggcagcagaagactgatgctgcccccccccagcacccccgccctgagcggcgccccccccggcggcgccgagagcgtgcacagcttctaccacgccgactgccacctggagcccgtgagatgccaggcccccccccccagaagccccagcgaggccagcggcagaaccgtgggcagcggcaaggtgtaccccaccgtgcacaccagccccccccccgagaccctgaaggagaaggccctggtggaggtggccgccagcagcggcccccccaccctgaccagcctgaacatcccccccggcccctacagcagcatgcacaagctgctggagacccagagcaccggcgcctgccagagcagctgcaagatcagcagcccctgcctgaaggccgacagcggcgcctgcggccccgacagctgcccctactgcgccagagccggcgccggcgaggtggagctggccgacagagagatgcccgacagcgacagcgaggccgtgtacgagttcacccaggacgcccagcacagcgacctgagagacccccacagcagaagacagagaagcctgggccccgacgccgagcccagcagcgtgctggccttctggagactgatctgcgacaccttcagaaagatcgtggacagcaagtacttcggcagaggcatcatgatcgccatcctggtgaacaccctgagcatgggcatcgagtaccacgagcagcccgaggagctgaccaacgccctggagatcagcaacatcgtgttcaccagcctgttcgccctggagatgctgctgaagctgctggtgtacggccccttcggctacatcaagaacccctacaacatcttcgacggcgtgatcgtggtgatcagcgtgtgggagatcgtgggccagcagggcggcggcctgagcgtgctgagaaccttcagactgatgagagtgctgaagctggtgagattcctgcccgccctgcagagacagctggtggtgctgatgaagaccatggacaacgtggccaccttctgcatgctgctgatgctgttcatcttcatcttcagcatcctgggcatgcacctgttcggctgcaagttcgccagcgagagagacggcgacaccctgcccgacagaaagaacttcgacagcctgctgtgggccatcgtgaccgtgttccagatcctgacccaggaggactggaacaaggtgctgtacaacggcatggccagcaccagcagctgggccgccctgtacttcatcgccctgatgaccttcggcaactacgtgctgttcaacctgctggtggccatcctggtggagggcttccaggccgaggagatcagcaagagagaggacgccagcggccagctgagctgcatccagctgcccgtggacagccagggcggcgacgccaacaagagcgagagcgagcccgacttcttcagccccagcctggacggcgacggcgacagaaagaagtgcctggccctggtgagcctgggcgagcaccccgagctgagaaagagcctgctgccccccctgatcatccacaccgccgccacccccatgagcctgcccaagagcaccagcaccggcctgggcgaggccctgggccccgccagcagaagaaccagcagcagcggcagcgccgagcccggcgccgcccacgagatgaagagcccccccagcgccagaagcagcccccacagcccctggagcgccgccagcagctggaccagcagaagaagcagcagaaacagcctgggcagagcccccagcctgaagagaagaagccccagcggcgagagaagaagcctgctgagcggcgagggccaggagagccaggacgaggaggagagcagcgaggaggagagagccagccccgccggcagcgaccacagacacagaggcagcctggagagagaggccaagagcagcttcgacctgcccgacaccctgcaggtgcccggcctgcacagaaccgccagcggcagaggcagcgccagcgagcaccaggactgcaacggcaagagcgccagcggcagactggccagagccctgagacccgacgacccccccctggacggcgacgacgccgacgacgagggcaacctgagcaagggcgagagagtgagagcctggatcagagccagactgcccgcctgctgcctggagagagacagctggagcgcctacatcttccccccccagagcagattcagactgctgtgccacagaatcatcacccacaagatgttcgaccacgtggtgctggtgatcatcttcctgaactgcatcaccatcgccatggagagacccaagatcgacccccacagcgccgagagaatcttcctgaccctgagcaactacatcttcaccgccgtgttcctggccgagatgaccgtgaaggtggtggccctgggctggtgcttcggcgagcaggcctacctgagaagcagctggaacgtgctggacggcctgctggtgctgatcagcgtgatcgacatcctggtgagcatggtgagcgacagcggcaccaagatcctgggcatgctgagagtgctgagactgctgagaaccctgagacccctgagagtgatcagcagagcccagggcctgaagctggtggtggagaccctgatgagcagcctgaagcccatcggcaacatcgtggtgatctgctgcgccttcttcatcatcttcggcatcctgggcgtgcagctgttcaagggcaagttcttcgtgtgccagggcgaggacaccagaaacatcaccaacaagagcgactgcgccgaggccagctacagatgggtgagacacaagtacaacttcgacaacctgggccaggccctgatgagcctgttcgtgctggccagcaaggacggctgggtggacatcatgtacgacggcctggacgccgtgggcgtggaccagcagcccatcatgaaccacaacccctggatgctgctgtacttcatcagcttcctgctgatcgtggccttcttcgtgctgaacatgttcgtgggcgtggtggtggagaacttccacaagtgcagacagcaccaggaggaggaggaggccagaagaagagaggagaagagactgagaagactggagaagaagagaagaaacctgatgctggacgacgtgatcgccagcggcagcagcgccagcgccgccagcgaggcccagtgcaagccctactacagcgactacagcagattcagactgctggtgcaccacctgtgcaccagccactacctggacctgttcatcaccggcgtgatcggcctgaacgtggtgaccatggccatggagcactaccagcagccccagatcctggacgaggccctgaagatctgcaactacatcttcaccgtgatcttcgtgctggagagcgtgttcaagctggtggccttcggcttcagaagattcttccaggacagatggaaccagctggacctggccatcgtgctgctgagcatcatgggcatcaccctggaggagatcgaggtgaacgccagcctgcccatcaaccccaccatcatcagaatcatgagagtgctgagaatcgccagagtgctgaagctgctgaagatggccgtgggcatgagagccctgctggacaccgtgatgcaggccctgccccaggtgggcaacctgggcctgctgttcatgctgctgttcttcatcttcgccgccctgggcgtggagctgttcggcgacctggagtgcgacgagacccacccctgcgagggcctgggcagacacgccaccttcagaaacttcggcatggccttcctgaccctgttcagagtgagcaccggcgacaactggaacggcatcatgaaggacaccctgagagactgcgaccaggagagcacctgctacaacaccgtgatcagccccatctacttcgtgagcttcgtgctgaccgcccagttcgtgctggtgaacgtggtgatcgccgtgctgatgaagcacctggaggagagcaacaaggaggccaaggaggaggccgagctggaggccgagctggagctggagatgaagaccctgagcccccagccccacagccccctgggcagccccttcctgtggcccggcgtggagggccccgacagccccgacagccccaagcccggcgccctgcaccccgccgcccacgccagaagcgccagccacttcagcctggagcaccccaccatgcagccccaccccaccgagctgcccggccccgacctgctgaccgtgagaaagagcggcgtgagcagaacccacagcctgcccaacgacagctacatgtgcagacacggcagcaccgccgagggccccctgggccacagaggctggggcctgcccaaggcccagagcggcagcgtgctgagcgtgcacagccagcccgccgacaccagctacatcctgcagctgcccaaggacgccccccacctgctgcagccccacagcgcccccacctggggcaccatccccaagctgcccccccccggcagaagccccctggcccagagacccctgagaagacaggccgccatcagaaccgacagcctggacgtgcagggcctgggcagcagagaggacctgctggccgaggtgagcggccccagcccccccctggccagagcctacagcttctggggccagagcagcacccaggcccagcagcacagcagaagccacagcaagatcagcaagcacatgaccccccccgccccctgccccggccccgagcccaactggggcaagggcccccccgagaccagaagcagcctggagctggacaccgagctgagctggatcagcggcgacctgctgccccccggcggccaggaggagccccccagccccagagacctgaagaagtgctacagcgtggaggcccagagctgccagagaagacccaccagctggctggacgagcagagaagacacagcatcgccgtgagctgcctggacagcggcagccagccccacctgggcaccgaccccagcaacctgggcggccagcccctgggcggccccggcagcagacccaagaagaagctgagcccccccagcatcaccatcgacccccccgagagccagggccccagaaccccccccagccccggcatctgcctgagaagaagagcccccagcagcgacagcaaggaccccctggccagcggcccccccgacagcatggccgccagccccagccccaagaaggacgtgctgagcctgagcggcctgagcagcgaccccgccgacctggacccctag

SEQ ID NO: 259743 - DNA, 6855 bp, Artificial Sequence
  derived and/or modified sequence
atggacgaagaagaggacggggccggcgctgaagagagcggacagccaaggagcttcatgcgcctaaacgacttgtctggagcaggaggaaggcccggccccggaagcgcggagaaagaccccggttctgcagacagcgaggcagagggactaccctacccggctctcgcgccagtcgttttcttttacctgtcccaggactccagaccccgcagctggtgtctcaggactgtttgtaatccctggtttgagagaatctccatgctcgtgattctcctgaactgcgtgacactgggaatgtttcggccctgcgaagacattgcctgcgattcacaacgctgtagaatccttcaagcttttgatgatttcatttttgccttttttgctgtcgaaatggtggtgaagatggtggcgttagggattttcggcaagaagtgttatctgggggatacgtggaataggctggacttttttatcgtgattgcgggcatgcttgaatattccctagacctgcagaatgtttctttcagcgctgtgcgaaccgtcagagtactccggcccctacgcgccatcaatcgggtgccatccatgagaattcttgtcacactcctgctggacacactgcctatgctcgggaacgtcctcctgctgtgtttcttcgtgttcttcatctttggaatcgtgggggtccagttgtgggctggtttattgcgaaaccgctgcttcttacccgagaatttttcattaccactcagtgtcgatcttgagaggtactatcaaaccgagaatgaggatgaatcaccattcatttgctcacaaccacgagagaacggcatgcgctcgtgtaggagtgtgcctaccttgcgcggtgacgggggcggaggaccgccgtgcgggctggactacgaagcttacaactcatcctcaaatacaacctgcgtcaattggaaccagtactatacaaactgctctgctggagagcacaatccattcaagggagcaattaatttcgataacatcggctatgcgtggatcgctatcttccaagttatcacattggaagggtgggtcgacatcatgtatttcgtgatggacgcccattccttctataatttcatctactttatcctactgatcatagtgggctctttctttatgataaatctctgcctggtcgtcatagcaactcagtttagcgaaacgaaacaacgggaatcccagcttatgagagaacagcgcgtaaggtttctttccaacgcaagcacattggcaagctttagcgaacctgggtcttgctacgaagaactactgaagtatttagtgtatattttgcggaaagccgccagaagacttgcccaggtgtcccgcgcagctggagtcagagttggtctgctttccagccctgcccccttaggcggtcaggagacacaaccaagttcttcttgcagcaggagccaccgccgtctgtccgttcatcatctcgttcaccatcatcaccatcaccaccaccattatcaccttggaaacggcaccttgagagcaccacgtgcctctcctgaaattcaggacagagacgccaatggaagccggcgccttatgttaccacccccgtccacacccgccttgtctggcgccccacccggcggtgccgagagtgttcactctttctaccatgccgactgtcatctggaaccagtgaggtgccaggccccccctccaaggtcgccaagcgaggcctccggacgcacggtgggctccggcaaggtgtatcccaccgtccacacgagccctccgcctgagacactgaaagaaaaggctctggtggaggtggccgcgtcttcgggccccccaacccttacgtcgctaaacattccgccaggtccatattcctctatgcataagttactggagacacagagtacaggggcttgtcaatccagctgcaaaatatcatcaccatgtctcaaagccgattccggagcttgcggccctgacagctgtccctattgtgcaagagccggcgcaggggaagttgaattagccgatagggagatgccggacagtgatagtgaggctgtgtacgagtttactcaagacgctcagcatagcgatttaagagaccctcactcgcgacgacagaggtccctagggccggacgctgaaccgtcctccgtgctagcgttttggaggcttatttgtgacacgtttcgaaaaattgtggacagcaaatatttcggaagggggatcatgatagccatcctcgttaacactctgtctatggggatagagtatcacgagcaacctgaagaactaacaaacgcgctggagattagtaatatagtatttacctcattatttgcacttgagatgctgctaaagctgctcgtgtatggccccttcgggtatattaagaacccttacaacatcttcgatggcgtgatagtagtgataagtgtttgggagatcgtaggccagcagggagggggattgtctgttttgcggactttccggctgatgcgagtcctcaagctggtgaggttcctgccagctttacaaaggcagcttgtagttttgatgaagactatggacaacgtggcaaccttctgcatgctgctgatgttattcattttcattttcagtatcctgggcatgcatctgtttggctgtaaatttgctagtgaacgagatggcgacaccctgccagacaggaaaaattttgactcattgttgtgggccatcgtaaccgttttccagatccttacacaggaggactggaacaaggtgctttacaatgggatggcaagtaccagcagctgggcagctctgtattttatcgctttgatgaccttcgggaactatgtgttatttaatttgctggtggctatcctcgtcgagggctttcaagctgaggagatcagcaagcgcgaggatgcctcaggacagttgtcgtgtatacaattgccggttgatagccaaggaggagatgccaataagtccgagtccgaacccgattttttcagcccctcattagacggcgatggagataggaagaagtgccttgctctggtttcattgggcgaacacccagagttgcggaagtcattgcttcccccgcttattatccacactgctgcaacccctatgtccttacccaaaagtacttcaacgggcctcggagaggctcttggcccagccagcagaaggacaagctctagcggcagcgctgaacccggtgctgcccatgaaatgaaatctccgccctccgcacgatccagtcctcacagtccgtggtctgcagcatcgtcttggacgagccgcagaagctcaaggaattcgcttggacgggctccgtccctgaaacggcgctctcccagcggggagcgcagatcccttctttccggggaaggccaggagtcacaggatgaggaggagtcatccgaggaagaaagagccagtcccgccgggagcgatcatcgtcatagaggttctttggaacgagaagccaagagtagcttcgatctgccagacacgcttcaggtccctgggcttcaccgcacagcatcagggcgggggtctgcctccgagcaccaagactgtaatggtaaatcagccagcggaaggctggcacgcgccctgcgacctgacgatccccctctggatggagatgatgccgacgatgaggggaatttaagcaagggggagcgtgttcgcgcatggattcgtgcgagactgccggcttgttgtctcgagcgagattcctggtctgcttatattttccctcctcagtcccggtttcgtctgttgtgccatcggattatcacacataaaatgttcgaccacgtcgtgctggtgattatcttcctgaattgcataaccattgcgatggagcggccaaagatcgaccctcacagcgcagaaagaatctttctcacgttatcaaactacattttcacagctgtgtttctggcagagatgacagtgaaggtggtggctttaggatggtgttttggggagcaggcatacctccgatcaagctggaacgtgcttgacgggctgctcgtgctgatctccgttatcgatatactggtaagcatggtcagtgactctggcacaaagattttaggtatgctgagggtattgcgtctgctacgaactctgaggccccttcgggtgataagtcgcgctcagggcctaaaactggtcgtcgagacccttatgtcgagcctcaagccgatcgggaacatcgtggtcatttgctgtgccttcttcattattttcggcattctcggggtgcagctgttcaaaggaaagtttttcgtttgtcagggcgaggacactcggaacatcacaaacaagtccgactgtgctgaagcttcctaccgctgggtcagacacaaatacaatttcgataatttaggacaggctttgatgagtttgtttgtgctggcgtccaaagacggatgggtcgatattatgtacgatggcctggatgccgtgggtgttgaccagcagcccattatgaaccacaacccatggatgttgctttacttcatctcctttctacttatcgtggcgtttttcgtcctgaacatgttcgtcggagtggtggtggagaacttccacaaatgccgtcagcaccaggaggaggaagaggctaggcggagagaggagaaacggctgagacgactggagaagaagaggagaaacctgatgctggacgacgttatcgcctctggctctagcgccagtgctgcgagcgaggcccagtgtaagccatattactctgactattcaagattcaggctgctggtgcaccatctgtgtacatcacactatttggacctctttatcactggggtgatcggcttgaacgtggtgacgatggccatggagcactaccaacaaccacagattctggacgaggctctaaagatttgcaattacatattcactgtgattttcgttctggaaagcgtttttaaactggtcgccttcgggtttcgcaggttctttcaggaccgctggaaccagctcgatctcgccatcgtgcttttgagtatcatggggataaccctcgaggagattgaagtcaatgcaagcctcccaataaatcccacaatcattcgcatcatgagggtcttgagaatcgcacgagtcctgaagcttctcaagatggccgtgggcatgcgagcccttctggacaccgttatgcaagctctaccccaggtgggcaatctgggactgctcttcatgctcctctttttcatttttgccgccctaggggtggaactgttcggggatttagagtgcgatgaaacccacccctgtgagggattaggcagacatgcaacctttagaaatttcgggatggccttcctgacactcttcagagttagcaccggcgacaactggaatggcatcatgaaggataccctgcgggattgcgatcaggaaagcacctgctataacaccgtgatctctcccatctactttgtgtcatttgtgctgaccgcccagtttgtccttgtgaatgttgtgatcgcagtattaatgaaacacctcgaggagtccaataaggaggctaaggaagaagctgagttggaagccgaactcgagctggaaatgaagactctaagccctcagccacatagccccctcggcagtccttttctatggccaggcgttgaaggccccgacagtcccgacagtcctaaacccggggccctgcaccccgctgctcacgccaggagcgcctcccactttagcctagagcacccaacaatgcagccacatccaactgagctgcctgggcctgatttgctgaccgtcaggaagagtggggtgtctaggacccatagcctgccaaacgacagctatatgtgcagacacggtagtactgccgaaggacctctcggtcataggggatgggggttacctaaggctcaatctggttcagtgctcagtgtccactcacaaccagccgacacttcgtatatcctgcaactgcctaaggacgcgccgcacctccttcagccccatagcgcacccacttggggcaccatcccgaaattgccacccccaggacggagccctctggcccagaggcccctgagaagacaggccgccatccgaactgacagcctggatgttcaggggctggggagccgcgaggacctgctggccgaggtaagtggtccctcccctcctttggcaagagcatacagtttttggggacagagttctacccaggcccagcagcacagccgctctcattcgaaaatatcgaagcatatgaccccccccgccccttgtccgggaccagagccaaactggggaaaggggcccccagagacacgcagctcgctggagctcgacacagaactcagttggattagtggcgatttgttacctccaggaggtcaggaggaacctcccagcccgcgggacctgaaaaagtgctactccgttgaggcacagtcatgtcaacgacgacccacctcgtggctagacgagcaaaggagacatagcatcgccgtatcttgtttggattcgggaagccagccccacctgggaaccgaccccagcaacctgggcggtcaacctctgggcggacctggttcccggcctaagaaaaaactttctccacctagcataacgatcgatcccccagaatcccaggggcccagaaccccccccagtcctggcatatgcttgcgcaggcgagctccctctagtgatagcaaagatcccctggcgtctggccccccggacagcatggcagcctctccgtctcctaagaaagacgtgctctccctttcgggactgagttccgatccggccgatcttgatccttag

SEQ ID NO: 259744 - DNA, 6855 bp, Artificial Sequence
  derived and/or modified sequence
atggatgaggaggaggatggagctggagctgaggagagcggccagcccaggagcttcatgaggctgaatgacctgagcggggccggcggccggcccggccctggcagcgctgagaaggaccccggcagcgctgacagcgaggccgagggcctgccctacccagccctggcccctgtggtgttcttctacctgagccaggacagccggcccaggtcctggtgcctgaggacagtgtgcaacccctggtttgagcgcatctccatgctggtgatcctgctgaactgtgtgaccctgggcatgttccggccctgtgaagatattgcctgtgacagccagcgctgccgcatcctgcaggcctttgatgacttcatctttgccttctttgctgtggagatggtggtgaagatggtggccctgggcatctttgggaagaagtgctacctgggggacacctggaaccggctggacttcttcatcgtgattgctggcatgctggagtacagcctggacctgcagaatgtgtccttctctgctgtgaggacagtgcgggtgctgcggcccctgcgggccatcaacagagtgcccagcatgaggatcctggtgaccctgctgctggacaccctgcccatgctgggcaatgtgctgctgctgtgcttctttgtgttcttcatctttggaattgtgggcgtgcagctgtgggccggcctgctgaggaaccgctgcttcctgcctgagaacttcagcctgcccctgtctgtggacctggagcgctactaccagacagaaaatgaagatgagagccccttcatctgcagccagccccgggagaatggcatgaggagctgccgctctgtgcccaccctgcggggagatggcggcggcggccccccctgtggcctggactatgaggcctacaacagcagcagcaacaccacctgtgtgaactggaaccagtactacaccaactgcagcgctggggagcacaaccccttcaagggggccatcaactttgacaacatcggctacgcctggatcgccatcttccaggtgatcaccctggagggctgggtggacatcatgtactttgtgatggatgcccacagcttctacaacttcatctacttcatcctgctgatcatcgtgggcagcttcttcatgatcaacctgtgcctggtggtgattgccacccagttcagcgagaccaagcagcgggagagccagctgatgagggagcagagggtgcgcttcctgagcaatgccagcaccctggccagcttcagcgagcccggcagctgctatgaggagctgctgaagtacctggtgtacatcctgaggaaggccgcccggcggctggcccaggtgtccagagctgctggggtgcgggtgggcctgctgagcagccctgcccccctgggcggccaggagacccagcccagcagcagctgcagccgcagccaccggcggctgtctgtgcaccacctggtgcaccaccaccaccaccaccaccaccactaccacctgggcaatggcaccctgcgggccccccgggccagccctgagatccaggacagagatgccaacggcagccggcggctgatgctgcccccacccagcaccccagccctgagcggggcccctcctggaggagctgagagcgtgcacagcttctaccacgccgactgccacctggagcctgtgcgctgccaggcccccccacccaggagccccagcgaggccagcggccgcacagtgggcagcggcaaggtgtaccccaccgtgcacaccagccccccacctgagaccctgaaggagaaggccctggtggaggtggccgccagcagcggcccccccaccctgaccagcctgaacatccccccaggcccctacagctccatgcacaagctgctggagacccagagcactggagcctgccagagcagctgcaagatcagcagcccctgcctgaaggctgacagcggggcctgtggccctgacagctgcccctactgtgcccgggccggggccggggaggtggagctggccgaccgggagatgccagacagcgacagcgaggccgtgtatgagttcacccaggatgcccagcacagcgacctgcgggacccccacagccggcggcagaggagcctgggcccagatgctgagcccagctctgtgctggccttctggaggctcatctgtgacaccttcaggaagatcgtggacagcaagtacttcggccggggcatcatgattgccatcctggtgaacaccctgtccatgggcatcgagtaccacgagcagcctgaggagctgaccaatgccctggagatcagcaacatcgtgttcaccagcctgtttgccctggagatgctgctgaagctgctggtgtatggccccttcggctacatcaagaacccctacaacatctttgatggagtcatcgtggtgatctctgtgtgggagatcgtgggccagcagggcggcggcctgtctgtgctgcggaccttccggctgatgagggtgctgaagctggtgcgcttcctgcctgccctgcagaggcagctggtggtgctgatgaagaccatggacaacgtggccaccttctgcatgctgctgatgctgttcatcttcatcttcagcatcctgggcatgcacctgtttggctgcaagtttgccagcgagagagatggagacaccctgcctgacaggaagaactttgacagcctgctgtgggccatcgtgacagtgttccagatcctgacccaggaggactggaacaaggtgctgtacaacggcatggccagcaccagctcctgggccgccctgtacttcatcgccctgatgaccttcggcaactacgtgctcttcaacctgctggtggccatcctggtggagggcttccaggccgaggagatcagcaagcgggaggatgccagcggccagctgagctgcatccagctgcctgtggacagccagggcggagatgccaacaagtctgagagcgagccagacttcttcagccccagcctggatggagatggagacaggaagaagtgcctggccctggtgtccctgggggagcaccctgagctgaggaagagcctgctgcccccactcatcatccacacagctgccacccccatgagcctgcccaagagcaccagcacaggcctgggggaggccctgggccctgccagcaggaggaccagcagcagcggcagcgctgagcctggagctgcccacgagatgaagagcccccccagcgcccggagcagcccccacagcccctggagcgctgccagctcctggaccagccgccgcagcagcaggaacagcctgggccgggcccccagcctgaagagaagaagccccagcggggagcggcgcagcctgctgtctggagagggccaggagagccaggatgaggaggagagcagcgaggaggagcgggccagccctgctggcagtgaccaccgccaccggggcagcctggagcgggaggccaagagcagctttgacctgcctgacaccctgcaggtgcccggcctgcacaggacagccagcggccggggcagcgccagcgagcaccaggactgcaatggcaagagcgccagcggccgcctggcccgggccctgcggccagatgatcctcccctggatggagatgatgctgatgatgagggcaacctgagcaagggggagcgggtgcgggcctggatccgggcccggctgcctgcctgctgcctggagcgggacagctggagcgcctacatcttccccccccagagccgcttccggctgctgtgccaccgcatcatcacccacaagatgtttgaccacgtggtgctggtgatcatcttcctgaactgcatcaccatcgccatggagcggcccaagattgacccccacagcgctgagcgcatcttcctgaccctgagcaactacatcttcaccgctgtgttcctggccgagatgacagtgaaggtggtggccctgggctggtgcttcggggagcaggcctacctgcggagctcctggaatgtgctggatggcctgctggtgctgatctctgtgattgacatcctggtgtccatggtgtctgattctggcaccaagatcctgggcatgctgcgggtgctgcggctgctgcggaccctgcggcccctgcgggtcatcagccgggcccagggcctgaagctggtggtggagaccctgatgagcagcctgaagcccatcggcaacatcgtggtgatctgctgtgccttcttcatcatcttcggcatcctgggcgtgcagctgttcaagggcaagttctttgtgtgccagggcgaggacaccaggaacatcaccaacaagagtgactgtgccgaggccagctaccgctgggtgcgccacaagtacaactttgacaacctgggccaggccctgatgagcctgtttgtgctggccagcaaggatggctgggtggacatcatgtatgatggcctggatgctgtgggcgtggaccagcagcccatcatgaaccacaacccctggatgctgctgtacttcatctccttcctgctgattgtggccttctttgtgctgaacatgtttgtgggcgtggtggtggagaacttccacaagtgccggcagcaccaggaggaggaggaggcccggcggcgggaggagaagaggctgcggcggctggagaagaagagaagaaacctgatgctggatgatgtgattgccagcggcagcagcgccagcgctgccagcgaggcccagtgcaagccctactacagcgactacagccgcttccggctgctggtgcaccacctgtgcaccagccactacctggacctcttcatcaccggggtgattggcctgaatgtggtgaccatggccatggagcactaccagcagccccagatcctggatgaggccctgaagatctgcaactacatcttcaccgtcatctttgtgctggagagcgtcttcaagctggtggccttcggcttccgccgcttcttccaggaccgctggaaccagctggacctggccatcgtgctgctgagcatcatgggcatcaccctggaggagattgaggtgaatgccagcctgcccatcaaccccaccatcatccgcatcatgagggtgctgcgcatcgcccgggtgctgaagctgctgaagatggctgtgggcatgagggccctgctggacacagtgatgcaggccctgccccaggtgggcaacctgggcctgctcttcatgctgctcttcttcatctttgctgccctgggcgtggagctgtttggagacctggagtgtgatgagacccacccctgtgagggcctgggcagacatgccaccttcaggaactttggcatggccttcctgaccctcttccgggtgtccactggagacaactggaatggcatcatgaaggacaccctgcgggactgtgaccaggagagcacctgctacaacacagtcatcagccccatctactttgtgtcctttgtgctgacagcccagtttgtgctggtgaatgtggtgattgctgtgctgatgaagcacctggaggagagcaacaaggaggccaaggaggaggccgagctggaggccgagctggagctggagatgaagaccctgagcccccagccccacagccccctgggcagccccttcctgtggccaggagtggagggccctgacagcccagacagccccaagccaggggccctgcaccctgctgcccacgcccggagcgccagccacttcagcctggagcaccccaccatgcagccccaccccacagagctgcccggccctgacctgctgactgtgaggaagagcggcgtgtccaggacccacagcctgcccaatgacagctacatgtgcagacatggcagcacagctgagggccccctgggccaccggggctggggcctgcccaaggcccagagcggctctgtgctgtctgtgcacagccagcctgctgacaccagctacatcctgcagctgcccaaggatgccccccacctgctgcagccccacagcgcccccacctggggcaccatccccaagctgcccccacctggccgcagccccctggcccagaggcccctgcggcggcaggccgccatcagaacagacagcctggatgtgcagggcctgggcagccgggaggacctgctggccgaggtgtctggccccagcccccccctggcccgggcctacagcttctggggccagagcagcacccaggcccagcagcacagccgcagccacagcaagatcagcaagcacatgaccccaccagccccctgccccggccctgagcccaactggggcaaaggacctcctgagaccaggagcagcctggagctggacacagagctgtcctggatcagcggggacctgctgcccccaggcggccaggaggagccccccagcccccgggacctgaagaagtgctacagcgtggaggcccagagctgccagaggcggcccacctcctggctggatgagcagaggaggcacagcattgctgtgtcctgcctggacagcggcagccagccccacctgggcacagaccccagcaacctgggcggccagcccctgggcggccctggcagccggcccaagaagaagctgagccccccatccatcaccatcgaccccccagagagccagggccccaggaccccacccagccctggcatctgcctgcggcggcgggcccccagcagtgacagcaaggaccccctggccagcggccccccagacagcatggccgccagccccagccccaagaaggatgtgctgagcctgagcggcctgagcagtgaccctgctgacctggacccctag

SEQ ID NO: 259745 - DNA, 6855 bp, Artificial Sequence
  derived and/or modified sequence
atggacgaggaggaggacggcgccggcgccgaggagagcggccagcctaggagcttcatgcggctgaatgacctcagcggtgccgggggccgccccggacctggcagtgctgagaaggaccccggttccgcagactccgaggcggagggtctcccctatcctgctttggcacccgtggtcttcttttaccttagccaagattcccgaccgcgctcctggtgcctgcgcaccgtgtgtaatccatggtttgaacgcatctccatgcttgtgatcttgctgaactgcgttactctgggtatgtttagaccatgtgaagacatcgcttgcgattcacagagatgtaggatactccaagcatttgacgatttcattttcgcattcttcgccgtcgagatggtcgtgaaaatggtggcccttggaatattcggcaagaagtgttacctaggcgatacttggaacagacttgacttttttattgtgattgctggtatgctggagtactccctcgacctccaaaacgtaagcttttctgccgtgagaaccgtgagagtactccgccccctgagggccatcaaccgggtgcccagcatgcggatactggtgaccttacttcttgacactctacctatgctgggcaatgttttgttactttgcttcttcgtgtttttcatctttggaattgtgggagtgcagctgtgggccggcctgctgcgtaaccgttgtttccttccggagaactttagcctgcccctgtcagtcgatcttgagcgttactaccagacagagaacgaggatgagtctccttttatctgttctcagcctcgggagaatggcatgcgcagttgtagatcagtgcctacgctgcggggcgatggaggaggtggtcccccctgcggcttggactacgaagcatataattcatcctcaaacactacttgcgtcaactggaaccagtattatactaattgttctgcgggtgagcataatcccttcaaaggcgccatcaatttcgataacataggctatgcctggatcgctatattccaggttataaccttggaaggatgggttgacattatgtattttgtgatggacgcccattccttctacaatttcatttatttcatcctgctcatcattgttgggtctttcttcatgattaatttgtgtctagttgtcattgctacacagttcagtgaaacgaaacagcgggaatcgcaactgatgagagagcagcgcgtgcgcttcctaagcaatgcttccacattggcctcctttagcgagccgggcagttgttatgaggaactgcttaaatacctggtatacatccttagaaaggctgcccgccggcttgcccaggtgagcagggccgcgggcgttcgggtgggcctgctttccagtccagcccctctgggcgggcaggagacccaaccgtcctctagttgcagtcggagccatcggaggctgtccgtgcaccatttagtgcaccaccaccaccaccatcatcaccattatcacctcggcaacggtactttaagggcccctcgggcctccccagagattcaggatcgggatgcgaacggctcccgaagactgatgctgcctccaccaagcaccccagcgctcagcggtgctccaccagggggcgcagagtccgtccactctttctatcacgccgattgtcatctggaacccgtgcgctgtcaggcaccacccccgcgctctcccagcgaagcctccgggaggacggtggggtcgggcaaagtatacccaactgtgcacacttcacctcctccagagactctcaaggagaaagcattggtagaggtggccgcctcctctggcccgcccactctcacttccctgaatatcccccccggtccatacagttccatgcataagcttctcgaaactcagtccaccggtgcctgccagtcatcctgtaaaatttcctctccttgcctcaaagcagactccggcgcctgcggccctgactcttgtccctattgcgcccgggctggagcaggggaagtggagctcgctgaccgggagatgccggattctgattcagaggccgtgtacgagttcacacaagacgcccagcattctgatctacgtgatccacactctcggcgccagagaagccttggccctgatgccgagccctcttcagtcctcgcattctggagactcatttgcgatacttttcgcaaaattgtggattcaaaatatttcgggaggggcataatgattgctatcctcgtgaatactctaagtatgggaattgagtaccacgaacagccagaggagttaacaaacgccctcgaaatttccaatatcgtttttacctcactcttcgcactggagatgcttttgaagctcctggtgtacggtcccttcggatacatcaagaacccgtacaatatatttgacggcgtcatcgttgtgatttcagtctgggagatagtaggccagcaggggggaggtctgtcagtgctgagaacctttagactgatgcgcgtgctgaagctggtgagattcttgcccgcgcttcagcgtcagctggtcgtgttgatgaagaccatggataatgtggcaacattttgcatgttgttgatgctattcatcttcatattcagcattttggggatgcacctgtttggctgtaaatttgcatcggaacgcgacggcgatacccttccagacagaaaaaacttcgactccctgctctgggctattgtgactgtgttccagatcttaactcaagaagattggaataaggtcctgtacaatggtatggcctcgaccagcagttgggcggccctgtatttcattgcgctcatgaccttcggtaattacgtcttgttcaacttgttggtggccatcctggtggaggggtttcaggccgaagagatcagcaagagagaggatgcttcgggccaactttcctgtatacagcttcccgtagatagccaggggggcgacgctaacaagagtgaatcagagcccgatttcttctcccctagcctggatggggacggcgaccgcaagaaatgtctggctctagtctcccttggagaacacccagaattgcgtaaatccctactcccaccattaatcatacacaccgccgcaaccccaatgtctctccctaaaagcacatccaccgggctcggcgaagccttaggccctgcatctcgccgaacttccagctcagggagcgcggagcccggtgctgcacacgaaatgaaatctccccccagcgcccggagctcacctcactcaccctggtccgcggcatcgagctggacttctcgaagatcttctcgcaactctttggggagagcacctagtttaaaacggcgatcgccttcaggggagcgccgcagtctgctgtcgggcgagggacaagagtcccaagacgaagaggaaagctcagaggaggagcgcgcttcccctgccggtagcgatcatcgccatcgaggtagtctcgagagagaggcaaagtcatccttcgatctgccggatacacttcaggttcctggcctccaccgaaccgcttcggggaggggctccgccagtgagcaccaggattgtaacggaaagtctgcatctggtaggcttgcacgcgctttgaggcctgatgatccccctctggacggcgacgacgccgacgacgaagggaacctttccaagggggagagagtgagagcatggatacgcgctagactgcccgcctgctgcctcgagcgggattcttggagtgcctatatctttccgccacagtcacggtttaggctgctttgccataggatcattacccataaaatgtttgatcacgtggtgttggtaataatttttttaaattgcatcaccatcgccatggagcggcccaagattgacccacattcggccgaacgaatttttctgacgttgtcaaactatatattcactgccgtgtttctggcagagatgacagtgaaagttgtcgccctcggatggtgcttcggtgagcaggcctacctgcggtcttcctggaacgtgctggacggactgcttgtcttaatcagcgtgatcgatatattggtgtccatggtgagtgattctgggactaaaattttgggcatgttaagggttctgcgactgttgcggactcttagacccctcagagtaatcagtcgagcccaagggcttaaactcgtcgtggagactctcatgagcagcttaaagccaattggcaacattgttgtcatctgctgtgcttttttcataattttcgggattcttggcgtgcagctcttcaagggtaagttcttcgtgtgtcaaggagaagacactcggaacatcacaaacaaatctgactgcgcggaagcctcgtatcgctgggtccgccacaagtacaattttgacaatttaggccaggccttaatgtccctgtttgttctcgcctcgaaggatggctgggtggatatcatgtacgacggcctcgatgccgtcggagtggatcagcagcctataatgaaccacaacccttggatgctactatatttcatcagttttctgctgattgtcgccttcttcgtgttgaatatgtttgtgggcgtagttgtggagaacttccataaatgtcggcagcaccaagaggaggaggaggcgaggcggcgggaggaaaaaaggttgcgtagactcgagaagaaacgaagaaatctgatgctcgacgatgtaatcgcctctgggtcaagtgctagcgcagcaagtgaggcgcagtgcaagccttattattccgattactccaggtttcggctgctagttcaccacttgtgcacctcccactacctggatctctttattaccggagtcatcggcctcaacgttgtaaccatggctatggaacactatcagcagccacagattttggacgaagctctgaaaatctgtaactatatcttcaccgtgatatttgtgcttgagtccgtattcaagctcgtagcatttggattcagacgatttttccaggacagatggaaccaactggatttggccatagtactcctgtccataatgggtatcactctagaggagatcgaggtaaacgcgtctttacccattaacccaactatcataagaatcatgagggtgctgcgcattgcacgcgtgcttaagctcctgaagatggcagttggaatgcgtgccctgttggacactgttatgcaggccttaccacaagtcggcaacctcgggctcctgttcatgctgctgttttttatattcgccgccctcggggtcgagctgtttggagatctcgaatgcgacgagactcacccctgtgaaggcctggggagacatgccacattccggaattttgggatggcattcctgacattatttcgagtgtccacaggcgacaactggaacgggataatgaaggataccttacgtgactgtgaccaggagtctacatgctataacaccgtcatctctccaatttatttcgtgagcttcgtcttaactgcccagttcgtccttgtaaacgtagtaattgccgtactcatgaaacacctggaggaaagcaataaagaggccaaagaggaagccgaacttgaagcagagctagagctggagatgaagactctcagcccgcaaccccactcccccctcggatcaccattcttatggcctggcgtagaaggacccgacagtccagacagcccgaaacctggagctttgcacccagccgctcacgcgcgtagcgcatcccatttctccttggagcatcccaccatgcagccccatccaaccgaactgcccggccctgatctcttgacagtgcgaaagtccggggtttctcggactcacagccttcctaacgactcttatatgtgtcgccatgggagcaccgcagaggggcctctgggccacagaggttgggggttgcctaaggcccagtcagggtctgtgctctcggttcactcacagcctgctgacacatcatacatcctgcaactgcccaaagatgcgcctcacctgctgcagccgcattctgcccctacatggggtaccatacccaaactgccaccccccggcaggtcccccctcgcgcagcggcctctgcgccgtcaggctgctatccgcacagactcgctggatgttcagggtctaggatctcgcgaagatctcctggccgaggtgtcagggccgtccccacctttagctcgggcctacagcttttggggccagagctcaacccaggcacagcagcactcacgctctcactccaaaataagcaaacacatgacacctccagcgccatgcccaggccctgagcctaactggggtaagggaccacccgaaacaaggagctctctcgagttggacactgagctttcctggatatctggggatcttctgccacctgggggacaggaggagcctccatccccccgggatctcaaaaaatgttacagcgtggaggcccaaagttgccagagaaggcccacctcgtggctcgacgagcaaaggagacactctatcgccgtttcatgcctggattccggatctcagcctcatcttggcactgatccgtcaaatttaggcgggcaaccgcttggggggcccgggagtcgaccaaaaaaaaagctcagtccaccgtctataacaatcgatccgcctgaatctcaagggccccgaactcccccttcccctggtatctgtcttagacgcagagccccttcaagcgactctaaggaccctctcgccagtggccccccggactctatggctgctagcccctctcctaaaaaggatgtgttgtccctttcgggactgagcagtgatcccgccgacctagatccatag

SEQ ID NO: 259746 - DNA, 6854 bp, Artificial Sequence
  derived and/or modified sequence
atggacgaagaggaagacggcgctggtgcagaggaatccggccagccccgtagcttcatgcgactgaacgacctgagtggagcagggggacggcctgggccagggtcagcagagaaggaccctggatcagcggactccgaagcagaggggctgccttaccccgctctggcccctgtggtatttttttacctctcccaggacagccggccacgctcatggtgtcttagaaccgtgtgtaatccttggttcgagaggattagcatgttggtgatcctccttaactgcgtcactttggggatgtttcgcccatgtgaggatattgcatgcgactcccagcggtgccgtatattgcaagcgtttgatgacttcatttttgccttctttgccgtagagatggtggtgaaaatggttgctctgggcatatttggcaaaaaatgttacctgggcgacacttggaatcgcctggacttcttcattgtgatcgccggaatgctagagtacagcctggatttgcagaacgtgagcttttctgcagtgcgtactgtgcgagtactcaggccactgagggcgattaatcgtgttccatcaatgcggatcctcgtgaccctcctgctggacaccctaccaatgctgggaaacgttttactcctttgtttcttcgtttttttcattttcggaattgtgggggtccaactttgggcaggcctgctcaggaatagatgttttctcccagagaacttctctctgcctctgtccgtcgacttggaacgctactatcagacggaaaacgaggacgaaagtccattcatctgctcccaaccccgagagaacgggatgaggagctgccgttccgtgcctacacttagaggagacggaggcggtggacccccatgtggtttagattacgaagcgtataatagttcgagcaacactacctgcgtcaactggaaccagtactatacaaactgttccgcaggggaacacaacccctttaagggagcgattaacttcgacaatataggctacgcgtggatagctattttccaggtgataaccttagaggggtgggttgacatcatgtacttcgtgatggacgctcactccttctataatttcatctactttattctgttaattatcgttggcagcttttttatgatcaacctctgccttgtggttattgcaacccagttttccgagacaaaacagagagagtcgcagctaatgagggaacagcgcgtaaggttcctaagcaatgcaagcactctggcttctttctcagaaccgggaagttgttacgaagagcttcttaaatacctcgtgtatatcttacggaaagctgctagacggctcgcacaggtgagtcgcgctgccggagtgcgggttggattgctttccagtcctgccccacttggaggccaagaaactcagccgtcttcatcctgctccagatcgcacaggaggttgtctgtgcatcatttggtgcaccaccatcaccaccaccatcatcactaccacctaggtaatggtactctccgagcacccagagcctctcccgagattcaggaccgcgacgccaatggatcaaggaggctgatgctgccacctccgtcaacacccgctttgtcaggtgcgcctcctggaggagcagaaagcgtgcatagcttctaccacgccgattgtcacctggagccagtacgctgccaggcaccaccgccaaggtctccaagcgaagcctcagggaggacagttggaagcggcaaggtgtacccaactgtgcacacctccccgccaccagaaaccctcaaagagaaggcgttggtcgaagtagcggcttcctccggccctccgacactgacgtcgctgaatatccctcctggcccttacagcagtatgcataaattgttggaaactcagagcacaggtgcctgccaatctagctgcaaaatctcttcgccatgcctcaaagcagacagtggagcttgtggacctgatagctgtccatattgtgccagggcgggagccggagaggtagagttagctgacagagagatgcctgactccgatagcgaagcagtgtatgagtttacccaggatgcccaacattcagatttgcgcgatccccactcacgcaggcagaggtctcttggcccagacgctgagccctcctccgtgctggccttctggagactgatctgtgataccttcaggaagatcgtggattccaagtacttcggcagaggcatcatgatagccatcctcgttaacacactgtccatgggtatcgaataccacgagcagcctgaggagctaacaaacgcattagagattagcaatatcgttttcaccagcctcttcgccctggaaatgttattgaaactgctggtctacggaccgttcggatatattaaaaacccctacaacatcttcgatggagtgatcgtcgtgatttcagtctgggaaatagtcgggcagcagggcggaggactgagtgtgctgagaacattcagactcatgagggtgctgaagcttgtccggtttttgcccgctctgcagagacagctggtggtgctgatgaaaacaatggacaatgtggcaacattctgcatgctgctaatgttattcatctttattttttctatactgggcatgcacttgttcggatgcaagttcgcatctgagcgcgacggagatactctccctgatcgcaagaactttgactctttattgtgggcaatcgtgactgtctttcaaattctcactcaggaagattggaacaaagtgctgtataatgggatggccagcacaagttcttgggccgcactatatttcatcgcgctcatgaccttcggtaactatgtgcttttcaacctccttgtggccattctcgtcgaaggctttcaggcggaggagatttcaaagcgagaggatgcatccggccagctctcgtgcatccagttgcccgtggattctcagggaggggatgctaataagagcgagagtgagcccgattttttttctccatctctggatggagatggcgaccggaagaaatgcctggctctagtgagtctgggagagcacccggagttgcgcaagtcgttgctcccccctttaatcatccacactgctgctacccccatgagcctgcctaagagtacttctaccggcttaggggaagccctcgggcctgcctctcggaggacctcctcctccgggtccgctgagcccggagccgctcatgagatgaagagcccgccaagtgccaggtcttcacctcattctccttggagcgctgccagttcctggacctcccgacgcagctcacgaaattccttggggagggcgccttccctcaagaggcgatcaccgtcgggagagcgacgctctctgctaagtggcgagggccaggaatcacaggacgaagaagaatcctccgaggaggaaagggcctctccagccggtagtgatcacaggcatcgaggctctctcgagagagaagccaagtcgagtttcgacttgcccgacactctgcaggtcccagggctccatcgcacagcatccggcagaggatcagcgagcgaacaccaggactgcaacgggaagtcagccagtgggagattggcacgcgcactgagacccgatgatccaccactggacggcgatgacgcggatgatgagggcaacctgtctaaaggagagagagtcagagcttggatccgcgcaaggttacccgcttgctgtttagagcgcgactcctggtcagcctacattttcccaccacagagtcgatttcgtctactctgtcatagaattattacacacaagatgtttgaccacgtcgtccttgttatcattttccttaattgcatcacgatcgcaatggagagacccaaaatcgacccacactctgccgagcgtatctttcttactctgtccaattacatcttcaccgccgtgttcctggccgagatgacggtgaaggtggtcgcactcggatggtgcttcggagagcaggcatacctgcgttcctcttggaatgtgctggatggactcctagtgctgatatccgtgatcgacatattggtaagcatggtaagtgactccgggactaaaatcctgggtatgctaagagtcctgaggctgctgaggacactccgccctctcagggtgataagtagggcccagggcttgaagctcgtggtagaaacccttatgtcgtccctcaaaccaattggcaacatagtggtaatttgctgcgcttttttcataattttcgggattctgggggtgcagctcttcaaagggaagttcttcgtgtgtcaaggggaggacacgcgcaatattacaaataagtccgactgtgctgaagcgagctataggtgggtgcggcacaagtataattttgacaacctggggcaggcactgatgtccctgttcgtgctggcatccaaagacggctgggtggacatcatgtacgatggactggatgctgtcggtgtggatcagcagcccatcatgaatcacaacccatggatgcttttatactttattagttttctgctgatcgtggcctttttcgtgctgaacatgttcgttggcgtggtcgtggagaatttccacaagtgtagacaacaccaggaggaagaagaggcacgcaggcgtgaggaaaagcggctcagacggctcgagaaaaagaggcggaacctgatgctggacgatgtgatcgccagtggcagttccgcaagcgctgcttcagaggcacagtgtaagccgtattactccgattattctaggttccgactgctggtccaccatttgtgcactagtcattatctcgatctgttcatcaccggggtgataggcctgaatgtagtgaccatggcaatggagcactatcagcagccccagatcctggacgaagccttaaaaatctgcaactacatttttacggtgatatttgtcctggagtccgtgtttaaactggtagcattcgggtttcggagattcttccaagatcgctggaaccaattggacctggctatagtcttgctgagtattatgggaatcacactggaggaaattgaggtcaacgcgagtctgccaattaaccccactatcataaggattatgagagtgctaaggatagctcgggtcttgaagcttctcaagatggctgtgggtatgcgggcattattggacaccgtgatgcaggcccttccgcaggtgggcaacctggggttattgttcatgctgctattcttcatattcgcagccctgggagtggaattgtttggggatcttgaatgcgacgaaacacatccgtgcgagggcttgggtagacacgccacctttcgaaacttcggaatggcctttttgaccttgttccgcgtgtcaacaggggacaattggaatggaataatgaaagacactcttcgggactgcgatcaagagagcacgtgctataataccgttatctctccgatatacttcgtgtcattcgtccttacggcccagttcgtgttagtaaatgtggtcatagcggtgctgatgaaacacctcgaagaaagcaacaaggaggctaaggaagaagccgagctcgaggctgaactcgagctggagatgaagacactgtctcctcagccacattctcccctgggatccccattcttatggcctggggtagaggggccagactcaccagacagtccaaagcccggagccttacaccctgccgctcacgctagatcggcttcccacttttcactggaacacccaaccatgcaacctcatccgacagaactacccggtccagatctgctgaccgtgagaaagagtggcgtgtctagaacgcatagtctgcccaacgatagttacatgtgccgccacggctccaccgcggagggtcccctgggacaccggggttggggcctgcccaaagcacagagtggatccgtgctttccgtccacagccaacccgcagacacctcttacatccttcagttacccaaggacgctccccatcttctacaaccccacagcgcacctacatgggggacaatacctaaacttccacctcctgggagatcccctttggctcagcgcccactaaggagacaagctgcaattaggacagatagtctagatgtgcagggcttggggagccgggaggatctactcgctgaggtcagcggtccttctccgcctctggctcgagcatatagtttttgggggcagtctagtacgcaggcccagcagcacagccgtagccatagcaaaatcagtaagcatatgacaccacccgcaccctgcccaggaccagagccaaactggggcaaaggccctcctgagacccggtcaagcttggagttggacactgagctgagctggatcagcggggatctccttcctcctgggggtcaggaggagccgcctagccccagagatctgaagaaatgctattcagtcgaggctcagtcctgccagcgcaggcccacgtcatggttggacgagcaacgccgacactcaattgcggtttcttgcctcgattcaggtagccagccacacttaggaactgatccatctaaccttgggggtcagcccctgggcggtcctgggagccgtccaaagaaaaagctgtcacccccttctattacgatagatccacccgagagtcagggcccaagaactccaccttcccccggaatttgcctcagacggagagccccaagttcagatagcaaagatcctttggcctccgggcctcctgatagcatggcggctagtccatctcctaagaaagacgtgttgagccttagtggactgtctagtgatccagccgatctggatcctta
